United States Patent Application Publication US 2022/0102000 A1 - sequence listing, part 18

SEQ ID NO: 3652 - DNA, 32759 bp, Unknown
  16S sequences of unknown bacteria
gtgcctcagcgtcagttaaagcccagcaggccgccttcgccactggtgttcctcctaatatctacgcatttcaccgctacactaggaattccgcctgcctctacttcactcaagaacgacagtttcaaatgcagccccggggttaagccccggtatttcacatctgacttgccatcccgcctacgcaccctttacacccagtaaatccggacaacgctcgctccctacgtattaccgcggctgctggcacgtagttagccggagcttactctccaggtaccgtcattatcgtccctggctacttaggtttacaatccgaagaccttcttccctcacgcggcattgctgcatcagggtttcccccattgtgcaatatcccccactgctgcctcccgtaggagtctgggccgtgtctcagtcccaatgcggccgatcaacctctcagttcggctaccgatcgtcgccatggtgagcctttaccccaccatctagctaatcggacgcgagcccatccttcagcgaataaatcctttgacaacaaagtcatgcggctccgttgtgttatgcggtattagcgtccgtttccagacgttattccccactgaagggcaggttgctcacgcgttactcgcccgtccgccactaagatacaaaagcaagctctcgtatccccgttcgacttgcatgtgttaggcatgccgccagcgttcgtcctgagccaggatcaaactctctaaatatggtatatatccgccgaagcggtctatatcgtctttagagcttctagctcattcgcagcctctctgctgctcgcaccggtttaggcccggtgtgccttcaattaacgggtagttttggttctttccgtttacgttgtttaattttcaaggtccccacctctcagagagaggtacttgttagtataccacagcgaaaccgccgtgtcaacaagtttttttcaccgctttttgacggctcatctataatagcacagagtattcattctgtcaacacttttctgcaaatattttcacgttttttccgtcggcgcccaacaatatataaggacataaagagaacagctggcagaggccccttgaagagcggcggcgactttggtatactaggtaaaggttatttattccccaagagaaggagcggtatccatgccaatcagaatccccgatcatctgccggccgccaaaatcctggaatcggaaaacatcttcgtcatgaccgaaaaccgcgccatgcaccaggatatccgtccgctccagattctcatccttaatctcatgcccaccaaaatcgaaaccgagacccagctgctgcggctgctgggcaacacgccgctgcaggtggacatcgacttgatgcagacggccacccacatatccaaaaacaccgcgccggagcatctgctggagttttaccagaccttcgaccaggtgagggacaacaaatacgacggcatgatcatcaccggcgcgccggtggagaccttggatttcacggcggtggattactgggaagagctgtgcgccatcatgcgctggtcgctgacccatgtatattccaccctgcacatttgctggggggcccaggcggggctgttctaccatcaccatgtgcccaagtacgcgctgagcgaaaagctgtcggggatattcaaacaccggccgctggacatgaaccatccgctgctgcgggggttcgacgagatgttctacatgccccattcgcggtacaccgaggtgcaccaggatgatatcgatcacaacgcgaatttgcaggtgctggccctgtcggaaacggcaggggtcggcattgcggccacccgggacgcgcggcaggtcttcattaccggacactgcgagtacgatcgatacaccctggcgggagaatacgatcgggactgcaagcgaggcatctcgccgcggattccccagaattatttcccgggggataatccgcgggcggtgccccccatgctgtggcggggacacgccaaccttctgttctccaactggctgaactattttgtctaccaacagacgccctacgacctgacgaggttggattaggcagctatgccgccttccagttcagcccaagcctcctgctcggtatcggcggaaaatagaaagcgtcccacccagtcataaacttcgatgtgtccgccgacgtttttcataataacatccatgggggattcctccttctgtttcaccaaggatagcagcctatgctctcagtataggagaaggagtgtcccataaacgggacttaagaaagcgtcgtcaggcctgtgcggccggacgacgcttttttattctgcgacaggcaggcgcaggatagtccgcaggcgggagggatccgtccgccggggatcgctgagatagatctcatggtggcggcgctcccgaccggtgcaatcgaccaggccttgctcggccatgaagcgatgcagatcggctatggtcgccggctcgtccgcataggggccgatgtgcatccgctgaacgcagaggccctcctccaggacagaaaactgggcggcggaaacatccacttccggctttttccggcggcattcttctactgcccaatcaaagacggcgggggtgacaaaatccggctgccggatgagggctgtccattcccaatcctcccggcggctggccgcgatatcggcaccctcgaaccaccaaagtccctccagcgggggcaccacatagtcgaagtacccggccggcgcgttcccgccgaggcggctcattttaatagtaaaagtcagcgcatacagagtctgcacggcagcctggtaggcgggactgtcaggagcgccccggccgtccaccatcaaaaagggcatggacggtaccagcacccgttccggtttccggccgggggcgtagaagcgggggtaggcttttttataatccagtttctcggtcacaggatctccctcatttcagggcaatatagatgtggatttccgcgtgctgcatatcgccgccgggctggtattcctcaaaatccgccgtgaaggcgcgcggcagatccatggcccacagcttttcccagaaagcggccacgtccttttgcacatcgccgtgtacgacaaatttggcataccggccggcggggatgacggcctggacgaccccggcgggaagcgcctctccgggaaccgcctcgcagccgacgaccacgtcataagagtcgccggcatagccggtgtacagcccgatgcttttgccgttgaccttgccgggaatggcctcgtaaagaccggcgtacagccgctcccacaagtcaccgattatctcccccatatggggatcggtgttagaggagcgtgcttgcaggccgacgatggttttggcgttcagctggacaacttcataggtcatggaaacttccttctttccggacaacgtgcagggcgcggcttgtcctgtgtgatgcttccagtatacctaggataaccagacaattacgtgtcatattctgcatacaaccggagaacatctcgggctttttctttcaggatgcggcggatatgcggcggagaaagcacctccacctccccgccgaaggaaaggaggaagccatagacccaggcatcctccggataccaaacggacacggacagagaaccgtcctgttcccgccggatatcctcccggcggaagctgtcgaacacccggtaggccgccgtgggggcgaagcgcagggacagggcggtaacggcggcgggcggcgcggcggcttccagcggcggcgggccgtcggggcggggcggaaaggattcctccagccgctcggcgcggccgatgcgggagagccggaaggtgcgccaggcctggcgggtacggcaataggcttgcaggtaccagcgtccgcccttgaagtgcaggcggacgggttcaattacccgttcgctctgttcgccagcggcgttataataggtcaggtgaacgaggcgggcggtcagaatggcggccttcaggatgtcgaaagcttccttctccgccggatcgcggccccaggaggaaaaatccacctcgatccatgaggcttccgccttatggaacaggcgggcgagcttatcggtgacggcgggatcctcgccgccggtggcggccaggcttttcaggcccagcagaatagcctcctgctcgttttcgttcaggagggatttatccaggacgtaatcaggcagcagacggatgccgccgcccttgcccttggcggcatagacggggatgcccgcgccgctgaggacatccacatcccgatagatggtgcgttcgctgacttcgaagcgttccgcaagctgccgggctgtgatattgggggtatccagcagcagataaacgatttcaaaaaggcggtggatttgcatggcggaggctcctttctctacaggcggattccggctgcggtgttatcagtataccatattgagaaaaaagaaaaaacacttgactctcccggtacgtcatagcgtatactcgtcaatggatggggccccgtccgataccagacagagaggagaatccctttgaaaaccgtcaagcaggtgaccacgctgaccggcgtgagcgtgcgcaccctgcattattacgacgagctgggcctgctgacgcccagcgaggtgaccgcggccggataccggctgtacggcgacgacaagctggagcggctgcagcagattctgttcttccgggagctggatttcccgctgcgggaaattgcgcgcatactggatagcccggatttttcccggcaagaggcgcttcgccagcagaaacggctgctgacgctcaagcgggaccggctggaggggctgctccggctgctggacgatttgacaaacgagaaagaaggcacgcacatggcatttgaggcatttgacacggcggccatcgacgcctacgccgcggaggcgaaagagcgatggggcggcggcgaggcttaccgtcagagcgcggagcgcacggcagcgtacaccgcggaggactggaacgccgttcaggaggaaatgggggcgcagtttgcccggttcgccgcgctgcggggcggagatcccgcgggcgaggaggcccaggcggcgtgcgaagcgctcaagcggttcatcagctgccggttctacgattgcaccaaggagatcctcgcgggcttgggcgcgatgtatatcgaggacgaacggtttcgagagagcattgaccgctgcggcgagggaaccgcccggttcgccggggaggccatcgcgatttactgcgcgacatgaaaaaagccggccgcccattcggggcggccggcttggtttttagtgttgcacttcgccgtcgtcggcggagtcgggcagggcgggttcttcctctttcttggggaaaaccgcggggatgggggtggaatcggcggccacggtgccatccatgatggctttgaactgctcgccgtccagtttttcgtgctggaacaggtagcgggccacggcgtggagcttatccatatgctcggacagcttcttttccgtttcggcatagccgccggtgatgatgcggttaatctcctggtcgatttcggccgccacttcctcggaatagttgcgggtatgaccgaagtcacggcccaggaacacctcgccggagtcggaggcgccaaacacaatcgggccgagcttatcgctcatgccgtatttggtgaccatcttgcgagccgtttcggtggcgcgttcaatgtcgttggaagcgccggtggagatatcgtccagcaccagtgcttcagccacgcggccgcccagcagcacctggatgtcctcgagcatctccttcttcgcccggtaggagcgatcggcctcgggcaggctcatagtatagccgccggccatgccacggggaatgacggaaatctgatgcaccggatcctgtgtcgggcagtagtaggtgaccacagcgtgcccggcttcgtggtaggaggtcaagcgcttttccttgtcgctgatgacatggctgcgcttttcggtacccatgaccaccttgatggtggcttcctcgatttcgggcatggtgatggagtggaggcccttgcgggcggccaagagggccgcttcgttgagcaggttttcgagatcggcgccggtgaagccggcggtggatttcgcaatggtggacagttccacgtcgggggccaggggcttgccgcgggcgtgaaccttgaggatttcctcacggcccttgatatccgggtagttgaccacaatctggcggtcgaaacggccgggacgcatgagggcgggatccaggatatccgggcggttggtggcggcgatcatgatgacgccctcgttggcgccgaagccgtccatttccaccagcagctggttgagcgtctgctctctttcatcgtgaccgccgcccaagccggcgccgcgctggcggccgacggcgtcgatctcgtcgatgaagatgatgcagggggaattctttttcgcctggtcgaacaggtcgcggacgcgggacgcaccgacgcccacgtacatttccacgaagtcggagccggaaatggagaagaagggcacgcccgcctcccccgccacggcgcgggccagcagggttttaccggtgccgggagggcccacgagcaggacgcccttgggcacgcgggcgcccagttccttaaacttcttaggagatttcaggaaatccacgatttcccgcagttcttccttttcctcgtcggcgccggccacgtcggcaaaggtggttttgcgcttctcgtccaccggctgcttgatacgggccttgccgaagcccatggccttgccgcctccgtcgatagaggacaggctgcggcgcatcatgacccacatggcgatgaaaatcaccacgatgagcagagacggaatgagattgacaatccagggcagctggctgaccggcttgtaatcgtaggtgattttggaatccttattggcgggatcccgattgtattcattgaccatgtcgcccacgtcgttgacgaacaggctgacatcgggcacggtgtatttcaggacataatcgcgctcgtcgattttaccgtccttgttgatgtccttggtccggaaggcttcccgcagggtgagttccagattgccgttgcccaaatccagggtgtagctttccacctggttattctcgaaatacgccacgtaatccgagtatttcacattggacgacgaggtgcgtgggtcgagaaacagccagagaatcaggaaaaacaccagcggaatgccgatgaacaggccgacgttccgtatgatttttccgaaatcgttgttattgttggattccatagaacctcactccttaccgggccgtgcgtcccttccgggaacggcgccgtttgctcttattggtaaatctccggcttcagcacgccgataaacggcaggttccggtatttttccgcgtaatccaggccgtagccgacgatgaattcatcaggtaccacggcccccacgtagtcgggccggatgtccaccttacggcgctccggcttgtccagcagcgtgcacaggcggatgctgcgcggctgacgggcggacagatttttcagcagaaaggacagggtgacgccggaatcgaggatatcctccaccaccagcacgtccctgccctccagggtggaatccagatccttgagaatccgcacctccccgctggtcgtggtgcccgcgccatagctggacaccgagagaaaatcgatggcgcagggcaggtcgatggcccgcatcaaatccgccataaaaattagggatcccttcagtacgctgaccaaaaagaggttctttccttgatagtcctcggtgatgcgccggcccatcgcctgcacgatttcctgcagcttttcctctgtatacaggatttccgacacatcgttgcgtatactcactctttctatccatcccttcgccaaaataaccctgcgtgagtgattaccggccgtcctccgccgttattatcaaaaaacggcgggtgctctcgtccggtcgaacccgttcgtcgcagccgcagccatacgccagcagaatgccggcactgtcgcacaaaatcgggatagcatcccggatttctggcgaaattttggcttcattgaacaattttttcaggctttttcctccctggcgacccatcggatgataggcgtcaccgggcaggcgctgccgcaccacgagatcaccgcttatcttatcatagttcaccgtgttttttaataagtttttgtgaattttctttttcttctcatattcctccaaagaaatacaagcaatttggtagattctgccgcaaatctcacaacgctcccccggacgtatcgtccactcgaaatacggaacagcggcgcggggcgcggcgggccggatttgcaggcggccgtcggccaggagggccgtccgcccgcccggcagattgacgctgccgccgacggtcagcagggtatccaaggcggcggcgtggcgctcctccgcttcctccccagccaggcggcgaagagcccgcaggcgcagggcctcatgggcggcggccagcggcgccgggtcgaaaacatcctccgccagccgggcctcgtccaacagggcggcggccagcgtctccaggcagtcgtcgtcccgccgggcggcgcgggccagccggccggcggcctcctccagccggggattcacccgccgcagggcgggcaccgcctcgtggcgcaagaggttgcggcagtaagcggtatcgaaattcgtgctgtcggtgacgaaggggacggcgttctcccggcagtaggcctcgacctcctcccgagtcacatccagcagggggcggatccgccggcccaggagaggacggatcccgccgagccccctcaccccgctgccccgggccagatggagcagaagggtttccacattgtcgctcgcggtgtgggccgtggcgatccggtcatagccttcgcaggcgcaaagttcgttgaaaaaggcatagcggatccggcggccggtttcctccagcccttccccccgggcagcggcctcggcagccacatccgcccgcatgacgtgaaggggcacgctccagcgggcgcaccattcccgcgcaaaggcctcgtcccgctcggcctcgtccccgcgcaggccgtggttcacgtgggcagcgaccagccgccagccatgggcgggggccagcgccctcatagcgtggagcaaggccatggaatcagccccgcccgacagggcgatcagcacggcggcgccgtccgggatcagcctctcccgcctcacggcggcggccacggtatccagcagcggcatggaaagaacgcctcccttcgcgtagagatataagataagtgaaatgcgggcccatcgggcccgcaaaaaattttcacgttaggtaatggccgagccagtggtaattgccgcgccggtaggcaaggctggaggtaattgccgcgccggtaggcaaggcaattacgcttcgttgcgatgcagctccagaccgctgaactgcgtaaactcgcccgaccaggccagcttgaccgttcccagctcaccgtggcggtttttcgccacgatgacctcggaggtgccggtttccaccgacgtgggatcgtccttttcattcttatagtattcctcccgatagaggaacaatacttgatccgcgtcctgctcgatggaaccggattcgcgcaaatcggccagggcgggccggtggttgccctgcttttccgtgccgcgggacagctgggcgcagatcataaccggcacgtccagctccttggccatgattttcaggctgcgggtgatgtcggacacctcttgcacgcggttgtccgtttttttggcggactgcatcagctgcaggtagtccaccaccacaaagcccaaatccttcatccgcctgaggcgggccttcatctcgggcacagtgatgctggcggtatcgtccaggtagatgggggcgctgcacaggctgctggaggccatggcgatccggccccattcctccggggtcaggttgcccacccgcagctttttgctggatacccgcgcttccgacgagagcaggcggttgaccatctgctcccgcgacatttccaggttgaagaacgccaccgggcggttgctcttaaccgccacgttgcgggcgatgttcagcgcgaagctggtcttgcccatgccggggcgggcgccgacgatgatcatatccgaccggttgaggccggtggtcagctcgtcgagggcggcgatgccgctgggaatgcccacgaactgatcccggtcgctggaggccagcttggagaacatctcgtagttgctggccagcacgtcccggatatgctccaggccgccccgctgccgtccctggcggatttcgtaaatcttctgctccgccgcgtccatgagcagggacgggtcgttgcccggatccatggcgtcgtcgatgatttccctggcggcgtggatgagcgagcgcacatcgtgcttttcccgcacgatgcgggcataattgccgatattggaaatggaggggacgatttgggccatcttgaacagataggcctttccctcctcgccggagaaaaagccctccgatttcagcgattccagaacggtgacgaaatcgatggtctgggattccatcatcttctggctcatcacccggtaaatggcctgatgctcgggcagataaaaataatcggggcgcaggatatccgccacctggttgatgctttcgggatccatcagaatagcgcccagaaccgcctgctccgcctccaggctgtagggcaggttcagcccgtcgttatacgccgtttgagccatcggccccacattcctttcctaaacatcccggcagtgatattggcgcttagccttcgccgaccatgaccgtgatcttggcgctgatgccgggatacagtttgacctcggcctcgtagctgccgaaggccttcacgtccgccatggagattttccgcttgtccacttccacctggaactgggccttgagcccctcggccacctccttggtggtgaccgagccgaacaggcggccggcgctgcccgccttggcggtcagcttgaccgttttacccttcagggctttggcggcctcctcggcgttctgcttttccatggccgcgtggtgccgggcggcctcttctttatttttcagatcgttcatggcctgggcgtcggcctccatggccagcccccggggcagcaggaaattgcgggcgtatccgtccgatacattgaccagctggccctttttgccctggcccttgacgtcttccttcaaaatgactttcataagagcgtgtacatcctttcctcatatggtatcgttctgctggagctgggcggcgagagagcgctccctggcttccagatggccgtcgatggcttccatcagccgccgcttggcctcttccatggacgtgtgtttcagcagggcgccggccatggtcagatgaccgccgccgcccaaagcctccatgaccagctggacgttgaagtcccccatggaacgggcggaaatattcacgtcctccccgtccacaaacagggcgaaggaggcctccacccctttgatggagagcagctcgtcggccgcctgggccgccgcgatccgcacctccggcccgccttcctcatcgctggcgatggcggtatggcggtaaagctccgccccggcgacgatggcgcttttcttgcggtaagcctccatgctgccggagaacatccgcttgacctccacggtgtccgccccctgcttgcgcagataggcggcggcctcgaaggtgcgcacccccgccttcatgacgaagctgcgggtatccagcatgatgccggccagcagggcctcggcctccaggcgggtcaggctgctgcccgccatgtactgcaccagctcggccaccatttcggaggcggaggaggaatagggctcgtgatagaaaatcacggcgttgtcgataaagtccaccatcttgcggtggtggtcgatgaccaccacggtctgggccgcctgatacaggggcggccattccagcatgttggggttatgggtatcggtgataatcagcagggtgcgccgggagaccagcagcatggcgttgtccggctcaagaaacaaatcgccccggccggccttgccgtaccgctccagcagctcgggggccagggtggttttccgctgggtgacgacattggcgggtttgcccatggcgcggaccgcggccgccatggccacggcggatcccaagcagtccaaatccgagtaccggtggcccatgaccagcacgttttccgccgtctgaatcagctccgagagggcggaggccacgacgcgggtgcgcaccttggtgcgccgctccacccctttggaggcaccgccgtagaaatcaaagccgttcttcgtcttgatggcggcctgatcgccgccccggcccaaggccatttccagggcctggcgggccatttcctcgctttcccgcagggtttcgccccggccgacgccgatggacagggtgatccccgcccgctcgccggtctggatggtgcgcaccctatcgagaatgtcgaatttcccttccaggatcccctggaggtgccgctgctcgatgaccaccatatacttatcggtgccgcatttgcgcaggatgccggtggtggatccgatccagtcctccagcagggtttccaccttgccggacatctgggccttctcgctgtcccgcacgtcctgcatgatttcctcgaggttgtctatgtagaccaccatcaccgccgggcggctggccgcgtattcctccgccgtttccttcaggcgggtatcgtccagataatagagcacgtacagcttggagtcccgcatattcacctggctgaggctgacggtatagcgttttttgcccaagcggacatccagggccttctttttctgcgcgtcctccagcgaacagccgccggtgatgacagcggccggctcaccaaagatttcggatccttccagcacctgctcccggaacagctcgttataccacacgatttccccggaagccccgcacaccgccaccggcatggggaaagcggacaggctgtcctgctcttcctggctgagatggcgggcgatgcgggagagataccgggcggtatcgttgcggatgcggcgggtgttgatcagcaggaaaaccgccaacaccgccagggcggccgcttccccgtaaaacagggggcggttgtagaagaacgtgacgccgatggtaacggccagcagtacgccggcaccgataaggatcggcagcagcaggctttttcttcgattgttcatgcgccacccgcctttcctagatgggggtcccagcagggataccccggcggaaatttccgccggggtttgccggttcagatatccatgatgatggggaggatcatgggacttctcttggttttctggaacagcatacgggacagttcgtcccgcacgcgggttttcatggtcgtccagtcataggcgtgggtgcgcaggcagtcttccagcacggcccgtgccgccacccgcgcgtcgtcgatgagcttttccgattcccgcacgtaaacgaagccgcgggagacgatgtcggggccggacaccacctggccggtggatgcgtcgatggtggcgaccaccacaatgaggccgtcctcggccagatgcttgcggtcgcgcagcacaatgctgcccacgtcgccgatgcccaggccgtccaccatcacccggccggcggggacggctccggtcacctccatcttatcgggggtgatctccaccaccttgccgatatcggtgatcaggacgttctggggcggcatgcccatggattttgccagattggcgtgcttatgcagatgcttctgttcgccgtggacggggatgaagaacttcgggcgggtaaggccgtggatgatcttcagttcctcctggcaggcgtggccggaaacatggacgtcgtacattttctcatacaccacgtcgcagccccgcttcatcagctcattgaccaccttgcccaccgttttctcgttgccgggaatgggggtggcggaaatgatgatgtaatcgtcggggccgacctccaccttccgatgctcggaataggccatgcgggtcagggcggacatgggctcgccctggctgccggtggtgatgatggtcattttgtccttgggatagcggttgatgagatcgatgtcgatgagcaccccgtcgggcacgtgcagatagcccagctcggtggcgatggtgacgaaattgatcatgctgcgcccggaaaccgcgaccttccggccgtccttgaccgccgcgtccataatctgctggatgcggtgcaggttggaggagaaggtggcaatgatgatgcgcttgttctccgcctttttgaacaggttggcgaagctctcccccaccacccgctcgctgggggtgaagccggggcgttccgcgttggtggaatcggccagcagggcgagaaccccttcggttcccagggcgccaaagcgggccaggtcgatcatgggacccatgatgggggtgcagtcgattttgaagtcgccggtatgcaccacgtagccgatgggggttttgatgcccagggccatggcgtccgggatggagtggttgaccggaatgaattccaccgacaccttgccgaactggacgacgctgccgggctccaccacgttgagcttcaccttgccggacaggccgtgctccttgagcttggaatccaccagggccagggtcagcttggcgccgtagacaggcaggttgacctgcttgagcaggtagggcagggcgccgatatggtcctcgtggccgtgggtgatgaccacgcctttgatgcgatccttattcttctccacataggtgaagtcgggcaggacgatgtccacgcccagcatttcgtcatcggggaacgccatgccgcagtcgatgaggaaggcgtcgtccccgtattcgaacagggtgatgttcttgccgatttcgttcaggccgcccaggaaggtcaggcgcaccggggtggccgaggccttcttctgccgggaattccggccgcgggcgggcttgggcgccgccggggcgccgttggtgttgggattgggcagggacagcaccgccttgtccgcgggcttgccgctgcgcgccgccccttttggggggcgcgacgcctgggcttcctgctgcggcgcggcggccttgggtgccgcctttggcgcgcggggagcgcggcggggacccctctgtttgctggccggtttggttccgccggccggggtctcgttcttgttttcagttgacacgaataatatcctccgtttcgggagcggcgtctccgcggggagagggcgctccttctcatgatgatgcgcggacgctgacgtccctccgcgcggtgttgcttcggctatggttgccgtgggaatcgaaggagcctccgggcggctttgcctgccgcgaagaaatccaaagccccgcgtcacgcggggctgtccgttgcgacacgggcggacccggccggggccataccgcccgcggcttgaggctttccgccgtgtccgaacacatttccttggtttgccatccgatctttctgccggaaaatccggcctcgtcttatctatattaccggttttcccggttgatgtcaagctgtccggaggaattctgagcggagagggcgcgcaggcgttcctccagccggccgcagacctcctccgcgatttcagcgctggaggcctcggccaccagtaccagattcttgcccgccttggtgggccgcaccaggccggtgccgccccgcaggcgtacccgggccccctcggccggggcgccgtcggaagcggcttcgggcgtttcgtcccgcagctggcgcagaatgcggccggggttgccctcgcaggggatggtgcgggtggtcacggcgaaatcgggcaggcggccgagcagctcggccagggtgacgtgatactgcttcatccggctgaggaggcgcacggcctgcatcaggccgtcccgcacccagggctggttagcggccagccgccgggcctccccgtcgcagccctccaccggacaggacaggtagcggcgcaccttgcggccgtaatgggccgccatttcttcgatggccaccggcgcgtcgtatggcagggcgagatcgccgccgtcctccagctccagcaggcagttgacgcccagcaccctctcgggccagacatatcccgcctcgggatcgtaaatggacagccgcctccctccggcccccagatggaaccggggaccgctttccgccccgcagcccagggtggacaacacctcgccgagcaggcgcaccggctcgtagtcggatccccgcacctcggccgacaggccggacaggccgtccggcgccatggaaatgagctcctggcggtacaactggcgcatgccggtcatattggtggcctcccggacggtatcccagcccacccggctgaaatcgccgccggtcaggcgagcttccaccgaccgctcggtattgcgcgcggcgggcaggcccccggcacccagcaggcggacggcccctttcaggccgccgctgacgtagacgccggtgcggataaggctgaaattcacgaaatagtcgaactggggctcgatgcaggggccgaagtcccagaccaggcccccgacggagaggatgccggccgtcaaagccattttcatcacagcggccgctttgtcggagctgcagcccacggccaccttttcgccccgcacctggctgccgatggcggcacccagccgggcgcagaattcgggggtgagctccacgcccgtttcgccgcacaggccgccgtcgtcgaacaggccgggggccgggccgccctcccgcaggttttcccgcaggtgggtgccggcctccacctgcttttcgggccagattttcacgtgggggctgacggcggcgtgctcgccgataaccgcgccctctcccacggcggcgccttcgaacagggccgcgccccggcgcaccgaggccccgtggcagaccaaggcgccggtcaaagccgcccggtcgccgatatacaccccatccagcaggacgctgccccgcaccttggcgttgttgccgatgtggcagccatcccccaggacggcgaaggggcctatctgggccgccgcgccgatttggacgtttttaccgatatagacgggcgggatgagggtgtagccgcccgccggctcttcggccatgcagacgccgtccttgacgggcaggttggttttcaccctgccctccagaatatcccgctggcaagtcagatacgtggtcaaatccccgatgtcgcaccaataatccttggtttcataggcgtacaggggcaggccgtcccgcaggagcaggggaaacaaatccttggcgaagtcgaaattggtatccgccgggatggattccagcgcctcgggggacaggatatagatcccggtattggccgcgtcggtggccgcctggccccagccgggcttttccaggaagccggtgatccgcccctcccggtcaaactcggccagtccgtattcccggggatcggccacccgggtgacgatcagggtggcggcggcgtgacggcttttatgaaacgcgcaggcttcactcaggtcgatgtcggtcagggcgtcgccgctgatgatcagaacatcgtcattggcgccgccccactggctgtccaccgccaggcggacgctgcccgccgtgcccaggggcttgtcctcctcggagaaagacaggcgcatctgccggtagccgtccccgaaatgggcggtgatggccgacgggatataccgcatcgtcaccgccgcgtccaggacgtcgtgctcctggagcaggtcgaggatgtattccagcaccggccggccgcacaggtgcgccatgggcttggggctgtcgcaggtgaggggacgcaggcgcgtgccttccccgcccgccataatgactgctttcatgaatgaaaaacctctctttttgatgtcgtagtcctagtattgacggaaaaaagagggtttatataaggcctttcagggaaattgtaaaggaacgtagtcaaatgcctgtaaatatggtaaaatatcggataattcccggaaggaagtgagcagcacttgagagcagacatcaaactggctctgaaacagttccaaattaagacctggggtaatcgcggccggataaagagcgtacagctggaaatcctgccggaggaaatcgttcattatatcgcgccgaccaatatcgtcatccggaaaaaggaaagcgccgacgtggtaagaaggccgggcatcctacttatcacaaatttccgcgtgttattttataatagaatttcaaatgagattttcaaggaggagttccctcttttggaaattcagggagtatccgccgacgccggttggtttacctcgtatgtgtcttttctcacccatacgaaaacgattgactttctggttcactacaaaaaggagcgttaccaggcgattgtccgtgtattgaacgaagctataaaaacagccgtgaaccattataatgataacactctcgtttacaatccggacgataccgttacagtcgtcacctgcgctgggtgcggcgcaacaaacatcttacaaaagagcaccattaagccgtgcgcctattgcggccgcagtctcagcagcgaatagctataaagtagaaaggacggaaaagccatgaaacacatcgatttattcaccgacggggcctgctcggggaatccggggccggggggctggggggcggtgctgcgctataacgggcaggagaaagagctgtgcggcggcgaagccagcaccaccaacaaccgcatggagctcaccgccgtcatagaagggctgtccgcgctcaaggagccctgcgacgtaacgctgaccagcgattccaaatacgtcctcgacgccattgagaagggctgggcccgctcctggaagcgcaacggctggcgcaaggccgacaagaagcctgccctcaatgccgatttgtgggacaggctgctgaccctgctggacatccatacggtacggctggtctgggtgcggggacaccagggccatcccgaaaacgaacgctgcgaccagctggccgtgggatattatcagcggtggaaatagccgcgttacaaaaaatgtcgaaaaaccgagcgggcggccgcgaactttttacactttgcgtattgcaatctagaccaaaaaggtatatattaaacctgcaagacgcatactacgtcgtgactttataatagagagctggttttgcgtatgtcatcagccgcacgttttatttacgcggacaacgccgccaccacccgcctgctgccgcaggtgctggataaaatgattccctacctcaccgaggaatatggcaacccctcctccctgtacagcttcgggcaggcggcccgccagggggtggatgccgcccggatcaccatggcggaatgcctgcactgccggcccgacgaggtgttcatcacttcgggaggcagcgaggcggacaactgggcgctgaaaatggtggcggagagcctggaaaagaagggcaagaaacacatcgtctccaccgtgttcgagcatcacgccatcctccacgcgctgaacgccctggagaaacggggctttgaaatcaccctgctgccggtgtatgaaaacggcatcgtccgggtggaggacgtggcggccgccattcggccggacaccgccctggtttcggtgatgttcgccaacaatgaaatcggcaccatccagcccattgccgaaatcggtgcgctgtgccgggagcggaaggtgctgttccataccgacgcggtgcaggcggtggggcatgtaccggtggattttgaggggatgcacatcgatcttctctccctatcggcgcataagttccacgggcccaagggcgtgggcgcgctgctggtgcgcaaggggctgcgcttcggcaacctcatcgacggcggcgcccaggaaaagggccgccgggcgggcaccgaaaacacggcaggcatcgtcggcatggcggaggccatgcggctggcctgcgcctccatggcacaggcgaccccgggcctcatcgccaagcgggatcggctgattcaggggctgctgagcgccctgccccgctgccgcctcaacggcgatccggtgcggcggcttcccggcaacgtcaatatcagcttcgagggcatcgagggcgagagcctgctgctgatgctggacatgaagggaatttgcgcgtcctccggctcggcctgcacctccggctccctggaccccagccacgtgctgctggccatcggcctgccccacgcggtggcccacggctccctgcggctgaccctgtcggaagagaccaccgacgaggacgtggactatatgcttcaggtcatccccggcgtggtgcagcggctgcgggagatgtctcctctttgggaaaccatctgcaaaaacgactgaaaggtatcgaacaagaaagaaggaaccgagcatggcagcattttacagcgaaaaggttatggatcactttgccaatccccgcaatgtgggcgaattggaagacgccaacggcgtcggtgaaatcggcaacgccaaatgcggcgacattatgaaaatgtatataaaggtggaggacggccggatcgcggacgtgaagttcaagaccttcggatgcggctccgccatcgccaccagctccatcgccaccgaaatgatcaagggcaaaaccatcgaggaggcgttgcagctgtccaacaaagcggtggtggaagcactcgacggcctgcccgcccacaaaatccactgctccgtcctggccgagcagtccatcaaggcggccatcgccgactattaccggcggcagggcatcgaccccacccccattgtgggcgagctgcccgatcccgacgaatacgaggcctgccacgtctgagcggcagggtctctgagcatccccgaacgacaagcgcgtcccgaaacgcggcatagacccagcggagaatcggagtgcggcgagccgcattccagaaaacggagcgatcgctccgttttcttccaaagggctatggccatcgccgggacgcgcttttttcgggctagtgagggttgttcacggggggaaaaatccttttgttaacatcttgttaattattttggaatatggtacaatgaagcatcatgcagccgcgcccggcggcgggagcagacagaggtgaccggcgattcgagtctatgacagaaaaacggggcggacggtggaacagccctccgccgacagcggcgcggtggggtggatttaccgcaaccggcccgcccggttcgtggtttcctgcgtctgccggaagaccctgctgcggctggtgggccggtacgcggacagccggctgagccggatccatatccggcggttcgccgagaagcgggggatcgccgactggcagggctacggcagcctgaatgcctttttcgcccggccccgcgccaatgtggcttttccggcccgcgaggacacgctgggctccccctgccaggcgctggtctgcgcgtgggatcagctgcggcccgacgcggtggtgcaggtcaaaggggtgacctatcccctggccgagctgctggacgaggacgcctcccgctttgaagggggcgcggcctattgtctgcggctggagtcgggccatcaccaccgggtctactgtttcgacgacggggtgctggaggaagaaaattcggtgcccgggcggtacgactcggtgcatgcggcggccctcccccacgtgccgggcctgtacgccaagaaccaccgggtgatcacccgctaccgtaccgaacagttcggcacggccatgctggtggaggtgggcgccatgttcatcggcagtgtggtgcggcaggcgccccttggagagcctgtccggcgcggggacgtcaagggctggttctgcttcggcggcagctcggtgctgctcttttttgaacccggccgggtgcggcccgacgccgatttgctcgcgcagacggcggcgggaatcgaaacggctgtggatgttggggaaaagattggggagaaaataccgcgatgaagaatttttcgagaacgcgctccgtgccggccgtggaacggcccagcctgtccagggctttcccggcggcgggaaagctgaacgtggcctgctgcatcacggtggcgggcttcgtcctggcgctgtccgggctgtgcctgctgcttcgcggccagctggcgatggggatttttgtgctgaccctggcctcggtggccgatctgctggacgggttcaccgcccgcaagctggggctggtgtcggcctacggccaatcgttggattccctgagcgataccatcagcttcgtggccacgccggccgtgattctcatgtggttcggccattttcgtcccatttgggtggtggcgggactggtttacgcggtgtgcggggtgctgcggctcaattatttcgagcacaacccggcgccgggctatttcatcggggtgtccagccccattgcctccggcctgctcatcatgccattttacgcgctgaccttcctgttccgggtggaggccggatggctgacgacgctttatccgttctacgccctggcggtgggcctggccatgatcggcggcttcaaggtgaagaaatacagcttcaccaacgcggccatcggcctgtgctgctacatcatcgcggtggcggggctggtcaagtccctgctgtaacgtcaagcataggcaagcgccccggagcgaatgctccggggcgctttatcatgaggaggcggccggtccggtttcctcggtaaaggccacgtgatagacgtcgtcctcccggatcgcgtcctttggcaccgccaggaacaggctccactggccggacagccattcctggccgatagtcgtccgcagacgggcggtgacgtgccggccctgacggaaaagccgaaggaactccacatcctgggcgctggtatagggaagctgcaccaccaggaggaccttctcctcatagaacgcctccgtcttgtaggccgccgaggatgtctgccagacagcggcccggctgttgttaccgtccggccgttctttaagataatacgcctccgcctcagccagggtgcggtatacctgtatgggcgacgcggcggcttcggcataaagcgcccggccgcaatactgggcaaccaattccggagctgtctccccgtcgtccacttgggcgatgcagcgggacgcgcccgcggcgtcctcccgggccacctccacgcaggccagccagtaagccatatcggcggtccgcataaacgggcagtaccgggcatagcgcacgatgagggcgtccccctcccgccgcaaaccggtcacctgatgggtaatggagccgctgggctcctcgatgatcaccagcagaagcgtgcgggtattgaaaaactccgcggtataggagacaaaagccccattgtcgacgggataatccgccgattcgtaggccgtccggaacgccgccagctcctccgccgagtccacccgccgggccagggggaagtcgatagcctcccggcagggaatgccatagcggaataacgcgcttttgaaggggatctccccctccgcctctgcagaggaaaggctgccgctgtcttccggcgccggagaaccgttcagccgggggatcatccacaccgcccccaggatcagcgccatcatcgccgccgcggctgcggtggtcttgaatgcctgcgccgccgcccgccgtccccgaccgggaagggagacgtccggcgggcggacgggataggacaggcgcgcttctatgtcctcccacaggccgggatcctcccgcgtttcctgagccagccgcgcacgcagccgctccttttggccggtcttcatccggcatttcccctttcgcgtcagacagtgttccgcagctttttcatggcggagcggtacagccaagccaccgtgcccagtggcttgtccagcaggcggctcacggcggccaaggtcatgtccgccatgacgtgaagcagcaccacctgccgttcctccggacgcagaggctccaacaccgagcggacatacaggcggcggcagacagtctcctccgtgctttcggcggcgggcggttcccccaccgactccggaaaagaacgctcccggagccgaatccaatccaccgccaagtggtgggtgacagtcatcagccaagccttatgagggccgccgggccggtagcttcccgccttgtcgcacagacggagaaacacctcagaggtcacatcctccgcgtcctcccggcggccggtgaccgacagggccagggcgtacaccaggccggcgtacgcctcgtatacctctctgagagcactccgatctccggccagcaggccggccatcagccgcgcaaaccgctcattcgtcatgccgtcgtcctcccgtgccgctgaaaagctcttcctatctaatacgtctgaagaggggcggatttatggggaaaggccacatttattttccggtataccgggccgggacgcgcccgccgttcaccagagccacggcggcgagaatctcctcccgccgggactctgcctcctccggcggcagggtcagcactatgtcgtccaaatcataggggccgttgcggaaccggccgatcaccgccccctggaacgccccatcgatcagcaggtaaaaaagaggctcctgcccgtccttcttgaagatcggcgtcaaaacagcctcgaaggacttgaccagaaaatcgttgcggtgcagggcgaagacgccgcggggcggcgcgtcccccggctctgtcagcagagaaacgtcctcaggcagcatgaagacaggcgagccatcctcccgggcggcgggcagcaggcttccccgcgccgtcagggcggacagggcggcccggagatcccgcaggggcaggccgaagaaggaccgggccatggtctcgtccgccgccccgtggagccgcacgaagcggagcagcgcccgctcgatcgcgtcctccctctccggccaggccagggagggaaactcggtttcaaagggataccaggccctatcccattcgctgtcggcctgatcctcgaaaaccagaaacatttcctggagccggtggagcatgggggtgatggccttggcggccagaccggtgaactcccgcagggcggcgacggtcatgggcccctcccgccgcagcaggtcgagaagccgggcgtcgttgggccgcagggcggcgtccttgcggtatatcgcgccgtacagggctaaatccgcctcgtccacataggcgatgccgcccccctggaaccggcccttgaccagttcccgccgggatcgcctgtcgaaattccgggccgcgcccccgtccggggcgaaggcggcgcggaagctcagctccggcggggagccggggcagcaccagtaaggggtacgcaccggggacatgtcccggaaaagtcgatcgtaatccgcttcgtttgccggcggacagaaccgctgccgttcaagccgcacgcggcgcagggcgttgtcgcataaaaccatggtaaaaccacctttccaacagggagaattctgtcgacaaaatgctgttgtcagcgctccggttgtgtgttaaactattggcatacaggccaaggatattggcggcggacaggctggccctgccgccgttttccattgtaacataaaccgaccaaaatgactagaaacataggaggcgcggtatgacagcggtagaagaggacgctctgcggctgatggaacaggtgcagggcagcttttgggagcggcaggattctgcccctcttcgcgcggtcatggcggcggaggggcggtcctggccgctccccccttgtccggatccggctgtcgccctagccgacgagcagtatgatacgacgccgctgtccgaggacgcgtgcttggtgcggggcacctttcgcaccgtgagcctggacgccgccatggcggacacgccccgccgcctgaccgccgtttgcatccgccggccggagggactgcggataacgcacctccatctctctgaggacgggccggcggcctcctgccgggaagaggccgccggcggcgaacggatccgcgggaacagcgcggcgctgcgggagcttatccgacagacctcccgcgccctgcgggagcgcaaccgggagctggaggccctgaccgaaaacattccgggcggggtgcagtgctgccgcaacgacgaggaattcaccatactgaacatgaacagcggcctgcccggcctgttcggctatacccgggcggacattgaagagcggttcggcggcaaattcgcccgcatgatccacccggcggatctccccggagttcagacaatgatagccgagcagctgtcccgggggccggcgatcgatctggaataccgggtggtgtgccgggacggttctttccgctgggtgctggacaaggggcagctccgcacgacggaggacgggacctccctgttctactgcatcctcatggacattaccgagcagaaaagggaacgggaggcgctgcgcctgagcctggagcgccatcaggtgatcctggatcaaaccgcggatatcattttcgagtgggatattcataccgacacgctggtttgttcccccaactggcagaaaaagttcggctatatccccgtggagcaggaggtcagccgccggattccctgctcggacaatattccaacggaggacatgccggccttcatcgacctgctgcacagcgtgtcccttggcgtaccctactgcgagacgaagttccgcatccgcaacacggcgggagacttaacctggcagcggatccgggccaccacccaattcgacgaagaggggcggcccctgcgggccgtcggggtcatcgtggacatcgacgaggagaaaaagcagcggcagacgctgctggagcaggcgcagcgagatccgcacaccggcctgtacaacaaaacctcggccaaatcccgggtcaaggaattgcttcggatgcccggcggggacgtcagtcacgccatgctcatcatcgacgtggataatttcaaaaccatcaacgaccgctacggccatctctgcggggacgcggtgctggtcgcgttttccgcccggctcaaggcgctgttccgcaccgccgatgtggtggcgcgcatcgggggggatgaatttctggtctttctcccccatatcagcgggcgggagacggcggcgggcaaggcggaggagattctgcaaatttcccgggagctgtccctggaggtgccaccggatatggcccccgcctcctgcgcggggggcggcgttcccgcgctgtcctgcagtgtcgggatcgccatgtatccccaggacggccaggattatgccgggctgtatctcaatgccgaccgggcgctctacctggtcaagaacaacggaaagagcggctttgctttctatgagcggcagctctgctccccggtgacgcccggggagcagaccggcgccggcatactgccgggcgccgaggacacgtacaccatgggccgtgcgctctacccgtatattttccgtctgctgtaccgcacggcggacgtggagacggcggtggaacatattctggaggtggtgggccgcacgtacgatgtcagccgggtatacattttcgaaaacagcccggacgatcgcgcctgcagcaataccttcgagtggtgcggcgaaggggtgccgcctcaaaagagccggctgcagaacctgccctactgggacgacctgccggattatcctgcgcattttgatgaaaacggcgtgttctgctgccgggacacggcggcgcttcccccgcccttgtgcggatttctggctgggctgggggtggtttccctgctgcagtgcgccgtgcgggacgggggccggttcagaggcttcgttggcttcgacgaatgccgggtcagccgctattggacccgggagcaaatccattccctcaccctggtggccaacattctctccaccttcctgctcaagcaccgtctggcccaacggctggaggagctgtccgaaagccggctgtgagccgaaaaaaccgccggcgggcctccaaggaggcccgccggcggtttgctttacccggaacgcgtaattcatatgatgatttacgccgtatatttataattataccactatattgacagattaccggaaaaatgataggatgactttagtgtataaaggaggggacgccatgccggcagaggaaaaaaaccgcacccagcgcacggcagacgccattctgcgcttcatcgcggagcaggggctgcagccgggcggccggctgccgaacgagagcgagctgtcccggcggctggaggtcggccgcggcacggtgcgggaagccatgaagctgctggcctcccgcaacatcgtgaccatccggcagggcagcggcacctacgtggccgagcggccgggaatggcggaggatccgctggggctgcagttcatcgcggacaagaggcagctttcccacgatctcattgctatccgctttctcatcgagccgcccatcgccgccatggcggcgcgcagcgccgaggaggcggaaatcgagcggctgcgcgggctggcgggggaagtggaggcgcgcatccttcgcggggagagccatatcgcgcaggacgtggagctgcacaccgccatcgctttgtgcagccgcaacctggtggttccccggctcatccccatcatccacagcaccatccagatattcaccgatttgaaggatccccggctgctgcgggaaaccatcgagattcaccgccgggtggtggacgccatcgcggcccacaatccggtggaggcccaggacgccatgtatctgcatctcgtccacaaccgggaatccctgcgggcaatcgaacggcagcagacgaccgaatgacagcaaggaggacacgctatggttccaggtatcctattggcaggcgagcccatgggcctgtatatcgcgcaggaggagggccctatcgaccaggccgtgaccttccgggccgccgtggcgggcgcggagttcaacgtggcggtggggctgacccgcctggggcatcgggtggagtatctgacccggctgggctgtgacccggacggcgaacggatccgccgggcgctccgggaaaccggggtgggcgacgcgcttgtgatcaccgatccggagcggcccaccggcatcatgttcaagggccgggtttcccggggggatccccccatcttctaccggcgcagaggctccgccgccgccgcgctcagccgggaggacgtggagcgtctcgacctgtccgccttcggctgtctgcatctgaccggcattctgcccgccctctccccttgcgcgctggacgcggcggaatatttggtggacaaggcccgggcggcggggcttttcatctccttcgatcccaatctgcggccccagctctggccctcccccgccgtcatggcggagaccgtcaaccggctggcggccagggccgacctgttcctccccggcgcgggcgagggcgaacgcctgatgggcagcgccgacccggccgccattgcgcggcactaccagcggctgggcgtgcggtacgtggtggtcaagaccggcaaaaccggcgcttacgccgccggtgaaggggaggcgttccaaagcccgacgtaccaggaaaccgccgtggtggacacggtgggggcgggcgacggctttgccgccggggtgctcagcgccctgcgggaggggctgtccctgcgggaggccgtgcgccggggcaacgccatcggcaccatccagatccagcacgagggcgacaacgaagggcttcccacgcgggaggcgctggaggaattcatgacgcatacgccgctgaaaacggcggaggaggcatcgctatgatcgaagtattacgcgccgtcggcatcgtgccggtggtcaaaatcaaccgggccgccccggccgccgggctggcccgcgccctgtgcgaggggggactgcccgcggtggaaatcaccttccgcaccccggcggcggcggacgctatccgcgaggcctgcgccgccgcgccggaggccttcgtctgcgccgggacggtattgacggcgcagcaggccgagcaggccgtggcggcgggggccaaggccatcgtcagccccggcaccaacatggaggtggtggactggtgcctcgcccagggcgtgccggtcatccccgggtgcgccacccccagcgaaatcgaggcctgcatgcgtaaggggcttcgccttgtcaagctgttccccgccgaggtgctgggcggagtgaggatgctcaaagccctggccgggccttatgccggcgtttccttcatggccaccggcggcatcagcccggccaacgtgggggattacctgcggcagaagaacatcgtctgctgcggcggcagctggatcgtgccggaagcggcgctggacgccggagacttcgacgccatccgccgcctggccgccgaggcgcgggccatcgtggacagcatataagacgacagcaacgcggcgggagcatggttccccgccgcgttctgtatatcaaaaaaggtgccaaaaggcagcaaagagggtgcaaaacgcttcgttttgcccccttcttttatggcttgacgtagccgcttttgatgcgctccaccgccacattatccatggcccgctgatccttttcagaaatccgctccaacgtcttggatttgaccagataggcggcgtaattgtccgcgtgaaatgtcaaaccggcggaacgggggcggccgtcccgtcatatagtggaaggaactccattttgagaaaggcaggattccgcccatgattaaaatctttatcgatcagggacacaaccctacgaatcccaacgccggggcggaggccaacggtgtgcgggagcaggatgtgacctacgaggtaggggtgcggctggccgatttgctgcgggctaaccccaatttcgaagtccggctgtcaagaaattcgccggacgagcagctgggaacctccaacgccacctctctggccgcccgggttaacgcggccaacagctggcccgccgattatttcatcagcctgcactgcaacgccagcaccaacaccaccgccagcggcagcgaggtctatgtctacagcgagaccagcccggccttcccgctgggcgaggccatcctggtgggactgcagaacgccaccggtctgcgcaaccggggaatgttcatccgcccgagcctgtacgtgctgcgccgcaccaacatgcccgccctgctggtggaaatgggctatctgaccaatccggaggacgcccgcctgctgtccaccgacccgcagagcttcgcccggggcatctacaacggcatgctgtcttattttcagctgacataattccccgcaagctgcatacactactgccaggaatgaacaaggaggcagcaagctatgcaagacaaccatcgcttttatttgtgccgcagagacggcaccctggtgggcctcatccacggcggcggcggggaactgacctgctgcggggagcccatggaggagctgacggcgggcagcaccgacgccgcccaggaaaagcacgtgccgcaggtgaaggtggacggctgcgacgtgaccgtggaggtgggcagcgtgcaccatcccatgtcggaggaacacagcatcaactgggtgtacctgcttactgaaaaaggcggccagcgcaagaacctgcccttcgacggcaagccggtggccgtcttccggctgaccgacgacgatcgcccggtggcggcctacgcctactgcaacctccacgggctctggaaaaccgagatatgaaaacggccccccgggttatccgcggggccgcttatttattcgccgaagcaggcggtgcagaagggggtggtgcagccgcggcaggcttccctaaggccggggaggctgatgtagcccaggctgtcggccccgatggagcggcaaacggcatccatccccatgcggcccgcaatcaggttctcctcgtccccgatgtcggtgccgtaatggcaggtgtggcggaagggcggcgaggaaatccgcacatgcaccgccgccgcccccgccgcgcgcaggctgcgcacgattttttcgcaggtggtgccccggacgatggagtcgtccaccagcaccacccgcttcccccgcaccacggcggacagcgggttgagcttcaggcgcacggcggtgtcccgctgggtctgggtgggaaaaatgaagctgcggcctacatagcggttcttcataaagccggtggccaggggcaggccgctttcggcgctgtagccggcggcggcctccaggccggaatccggcacgccgcagacgatgtccgcgtcggcgggatgctcccgggccaggatccgccccatccggcaccgggcctcgtacacgctcagcccgtcgataaccgaatccggccgggcgaaatacacatactcgaagatgcacagccccccggctgccgggcgggaggcgggcacggcgtcccgggcgatcaggcggccgttttccatcaccaggatt

SEQ ID NO: 3653 - DNA, 2449 bp, Unknown
  16S sequences of unknown bacteria
tccagcagccgcgagtgcagatagaagatatcgcccggatatgcctcacgtccggccgggcgcttcagcagcagcgaaatggtccgataggcgatggcatgcgcgctgaggtcatcaaagacgatcagcacatcctcgcctttctccatccattcctcgcctatggcacagccggcataaggcgccatatactgcatgagcgcagaatcggcagcggacgcagagacgatgacggtatggtccatggcgccgtgtctggccagctgttcagcgagctgtgcgctcgtcgacgccttctgcccgatcgtgacatagatgcatttgacctgctttcccttctggttcacgatggcgtccagcgcgatcgcgctctttccgctctgtctgtccccgatgatcagctcgcgctgtcccttgccgatggggaccagcgcatcgatcatcaggatgccggtctgcagcggttcgctcacgctttgccgcgccatgatgcccggcgcttctttttccagcggccgctgtttctctgtctgcagcacgctgccatccagcggctgtcccagcgcggagacgacatggccaagcagcgcgtccccgaccgggacctgcaccacgctgccgctgcgccgcaccggatcgcctgcctggaccttgcgggcatcatccagcagcacagcgcctaccgcgtcttcttccaggttcatcgcgatgccgcgcaccgcatgaggaaaatacagcagctcgccggccatgacatcctgcaggccgcttacgcgggcgatgccgtcagcacatgacatcacccttccttgttcccgcacatcaaggcgctcatcaaagctgaggatctgttccttgatgcgccgtgcgatcgtttccgtattcatctgttcctccttcctgcgcgcgcagatatgtgcgaagcctctccagccgcgaggcgagcgagccatcgaggatcagatcgccgcattgtacacggatgccggcgatgagcgtctcatcctggatgatctgcagcctgacgctgccagcgacatggcgctggatcagcgcatggatcttcgcgcgctgatcatcgctgagcactcgagccgtgaacaccttggccgtgatgatatcggcagcgtgtgcctgatgcagctgcagcacttctcccagcttcgcgcacagcccgcagcggctcatctccttcaggatggccactgtctgcggatgcgcttcctctgcaaatccctcttccagcaggcgtgcctttctcgaaggggaaagcagcgggtgggaaagcaaagcgaggtaatcaggcgatgcctgcaggatcgcctgcgcttcatacagctcgtgaatgatgacatcatccgcaagacacagcgcccgggcaaaggcttcgctcaggcttgccatgggtgatcatctgcctcgctgagccattcttccacatagcgggcatgcagcgcggcatctgcttgtttcccgctcagcttttcgctcacggcggcagcgatatccgcgatggcaccggcggtcttgcctcctgctggcgcagggcacgcagctgtgcctcgctctgcgcacgcagcgcgttgatctcctggcgcgtctgcacgagctcgcgcgcatgcagcgcatccgcttcttcacgcgccgtctgcacgatatgcgccgctttggcctgcgcttcttccagctgctgctcccgcagcgctttcagccgatccgcctttgcgcgcatcatcatggcctcatccatctcctgccgcatgatctgccggcgcgacgtgagatacgcgctcactttgtcccagaacaggaccttgccggccgcggtgagcagcagcgtggatatggcgaccagcagcatgtcgctcagactgatccgcagatagctgtcaatgtcaaagccgggcatggcctaccccttcagaaagatcagcaggatggagatgaccagcgcatagatgccggtcgtctccgccagcgcgacgcccagcaccagcacgctgcgcaccttgcctgcggcatcgggattgcggccgatcgcctctgcggccttccccgccgcgatgccctggccgatgccttgtcctacgccggcgatcatggcgatgccggcgcccagcaatgccatgccgcggacaaaaaactcattgaattccatcgtttaccctccttcatcttcatcctgtgcggcatgcaggaagaataccgccagcgtaaagaagatatatgtctggatcagccccgagaacacatcgaaatacagatgcagaaacggggtgaatgcaaatgcggccgcgctcagcggcagaaaggcgcggatgcccgcatagacgagcagcgagatgaccgtgcccgccagcatattgccgaacaagcgcagcgccagcgaaagaggcaggggcagctctgagatcacattgagcggaagcatcagcttcagcggctcaca

SEQ ID NO: 3654 - DNA, 6574 bp, Unknown
  16S sequences of unknown bacteria
ctgcttattgctttgcgcaattgaagcaggggacttgcttgattcggttaaaaaataggaaacagaagaaaaaggagtaagcaaaacgcatgggaatcagattaatagcaagtgatctggatggaaccttatttacggatgaaaaggccatttcagacgagacgcgcaggacattagaggaggttacggaaaaaggaattttgtttgttccgtgtaccggaagggcatttgcttccgttccggagctggtgcagacgcttcctggcgttcagtatatgatcgtatcaaatggagccgcaatttaccgtgtggaagatggcgagcggatatatggctgtacgctttccgtcgattcggtggagcggattctggagcttccgatatcggaggagatgacattcgaagtacagattcagggacagtcctatacggagcagcgctacattgatgatccggcccgattcggggcgaccggttttggcgtacagtatatccggacgacccgacatgccgtggaggatatacaggcgtttgcccaaaaacataaggcagagctggatggtatggctttcgtgagtgcggatcagatgctgcgggaatccttttggaagcaattggaggattctgcgcaggatatccgtatcacatcttcgattccacatctgatcgagatcggtcacattgacgcagacaagggaaagacgcttggacattttctgcagatgcgcggcatccctgcagatgaagcgatggcattcggcgatgcgggaaatgatatctctatgcttacggcagtccggtacgggtttgcgatggcaaatgcgactgacgagtgcaaggctgcagcatatgcggtcgcagaagagaataatgcggacggtgtggcgaagatgatccggaaatattgtctgtaaaatttcaaaacaaataaattctctctgtgatgtttcggaatttcatggtagaatagaaagcaccaaagaaaagaaatcaaaaagtacacgggggtaaaatgtatgctttacacaattaaaaatgaagcactgaaggtcgtgatcgataatcacggcgcagagctgcattccatccagacgctggatggcacggagtatctctggcagggtgatccggcagtctggaacggacaggcgccgaatctgtttccgtatgtggcccggctgacagatcagaagtacacctttgagggcaaagagtattccatgaagattcacgggtttattaatgcagtggatctgtatgtggagacggaggaacgggatcagatcacgttccgctatgacagcggcgaggagacgctgacacagtatccgttcccgtttatctaccgaatcacctatctgctcgacggtcatacattaaagatcacgaacaaggtagaaaatatcggggagaaacgcatgtattttggccttggcggacatccaggcttcaatgtaccgctggaggcgggactttcctttgaggattattgtctggagttttcagaaaaggcaaatccatccagagtcctcttcacagatgactgctatcgaaccggtgaaaatgtggactatccgctggaagacggtgtgcgcatcccactgcaccatgatctcttcgatcgtgatgcgatcgtattgaaaaatgtcgatcaccgcgtgacgatctgttctgataaaggaaagcgtgccgtgagccttttcttcccggactttccggcgatcggtttctggcacatgccgaagatggaggcaccttatgtgtgtctggagccatggagatctcttccgtcaagaaaaggtattgtggaggatttcgcgcagcaggaggatctggttgcgctggatggcggcaagatctatgtaaataagtggagcgtggatattttagagtagaggatgcggagcggattttagctgagatatgtcccgtcggaaaagtcaggctggctaattgtccgcgggaataaaaacgggtcacggcgacaatgccatgacccgttttattcctgcggtgtgcaatcctaaaacacctcaaatgtacagacaggaggagcgcatgaaatttttccatttatccgatttacatatcgggctgaagatgatgaaccgggatctgctggaggatcagcgctatattttccaacaggtgacagcactggcggaaagggagcagccggatgctatcgtgatcgccggggatatttatgacaaggccgtgccgtcggcggaggcggtagggctgttcgatgagctgatcgtcggacttcggatggctgtgcccaaggcggcgatcatgctgatcagcggcaaccatgacagcgcaccgcgtgtgaactgttttcgaagcgtgctttgtgcacagaatctgtatatgatcggaatgccgccgcagacagaggcagatcagatcgcacaggtgaccttagaggacacctgcggaccggttcatttttatctgcttccgtttgtgcgtccgtccatggtaaaaccaattctcggaaccgacgagaacggtgtcagtttttcttatgatgagacggtgcgtcggttgctggcaagagaatcgatcaataccacggagcgaaatgtgctcgtcacacatcagttttatcttccggcggggaagctggcagaggagattgagcggatggattcggagacgcggacggtcgggaacatcgatcagatcaggacagatatgctggagccatttgactatgtggcgatggggcatatccataagccgatgcaggtcggagcaaagcagtacgtgtattgtgggacgccgttggcgtgttctgtgagcgaagccggtcaggaaaagggaatccgtatggttgaactgaaggaaaaaggagcagagccaaagatcacggtgcttccgcttgtaccgttgcgacaggtgcgggtggtgaagggaagcctgacagaggtattgcagcaggcctgtgaggactatgtgacgatcattctgactgaccgtgtagacctggatgtgatcgatctgcaggaacggctgcatgcggcatttccgtatctgctggaaattcgtcgagagggattgcggacggtcagttatgaacgacagcagacggaagaggcagtgcggaatccatacgagctgtgcagcggtttttttcaggaactggacgaggaagagaaaagactgctgagggatgttttgcagaccgtacaggaggtgaaatgagatgagacccacccatctgacgctacaggcgtttggttcctatggggaacggacagagatttcatttgaacggacgaatcagaacttgtttttgatcacgggtgatactggagctgggaaatcgacgattttcgatgcgattgtatttgctctttatggagaggcagggtctaccgcgaataagaaagatggtgtcgtactgcaaagtcagtatgtcgactatgcgcaggagccatttgtggagctggtcttttctgaaggaaatggcagcgaccgcagaatttatacagtgcgacgtgtgccaaggcatctgaaacggatcacgcgaggagctgccaagggaaccgggacacgggagatcaccggaaatgtgactctgattatgccggatggcagcgattatccggcaaaagaggcagacgcaaaattagaggagattgtcggattgacaaagcaccagtttatgcaggtggcaatgatcgcacagggagaatttatggagcttctacgggcaaaatcagacgcaaaaaagctgattttcaggaagctgttccatacggagctgtatgcacaggtgacggaggagcttgcgaaccgcagacgggagaaggagcgggagctggcgattgtgcggacgatggttcagacggcggttgcccgggtgagcgttcccggggattatgagagggcagagctgctcagccagcaaaaggagcgggtgctctttggcgaactgtcgaccatggaagcgtttctggaggatttacggctgctgtgcagctgtctgaagaagcactgtcaggagataaaaaacgaatgtgaggcagttgttgaacgccgggatcaggtaaaggctattgcggtagaggcagagcatatcgaaaagctgtatgtgcagctgcatcaggcggaaaaagagctgcagatgtgtgagacagaaaaggataagatgcaggcacttgccgagcttaccagaaagctcccggcggtctggacactgcagagtatgtatcagcgcatggaggatgcacggactcagctggcggaaacaaagaaagagcagcaccggctgcaggctgcgcttccaaagtatctggagcaggagcaggctgcagcaggggcagagaagctgcagaaggaacagctggatattttgaatgaaaagcttggtcagacggctgcgcaggtggaaaaggcgcaggagctgtttgaaaggattgcacgggagaagcagaagcaggcagaacgaaagcagatgctggaaaaagcggaacaaatggaaaaaagagcgcagaatgcacagcttcagcaagaagaacagaccggattgtggaaaacacagatggaggcgcttcagactgtggataagcgtcaggtactctgggaacaaaagcataccgaggcagaggagctgcttggggactggagagagcttggagcgttgcgaaacgagatgcggattcttcagaaatccggcatggaactgcaggagcgttatgcaaaggttcggcaggagtatcaggctaagcatgcgtacagtgagcaggtacggcaggtttttctggatgcacaggcaggctttttggcacagcagctggtcgaaggagagccctgtccggtctgtggttcgaaaagtcatccggctccgtgtcagattcagccggatttgcgcaccctgtcgcgggatgcagtcgatcaggccagagcggaggcagagaagcttcaggccgagcaggagcagctggccggggaagcaagagaggcagcggtgcagtggcaggagaagaaaaaggtatttgcagatatggggcagcgtttcttacagcggataaaaagaaatatttccgttgcctccgaacagccttcctttgcagaaatgcaggggctgctggatgcgtggaatcgggagcttcagacagaaggagaacgcatccgggccggacaggagcagctgaaaaagctgcaggcatctcttacgcaggcagagacgcgaaaaagacagctgcaggaggaactggagcaggcgcagcaggaggtaaaaaccgcggcagccgcttttgagggaagccgcgcggcgcttgagagccttcagacttcttccgactttccggatgcagcgtctgcatcacgtgtgcttgcaaaagcgaaagcccaaaaggaggcacaggaggaacgttacagagccgcaaagcaggcagcagagaatgcaatgcagcagcgaagaaaggcagaagccttgctgcagcgctatgaaacagatcttccggtgcagcagcgtcagctgcaggaacgacgggctcagtatgagagcgagctttctgaacggaagctttctgaagcagaatggaaggcgctggcaggtatttatcgccgggaacaggaggagccgttccgggcacagatcgatgcatatactcgcagatatgcggcagcggaaaagctggcagcagctgcgaaggaggcaatcggagaaaggcctcagccggatatggaggtgattcgggcacagatggcagagacggagcggcggcttcaaaatgtgcagaaacgccaggagcaggcgcagcagctgtatcgggaaaatactgcggtgctttcggagcttttgccaaagcttacgaagcggcagcagctggtcgaagagcatgcacggctcgatactttgtatcggatggcatccggaaatgtcagcggtgcccggatggatctggagacctatgtacagcggtattatctggaaaagattctgcagtctgccaactgcagattttacgaaatgtctgccggccagtttgaactgaggatgtatgagctggaaaaggccggagagggaaagaaccggggactggatcttatggtatactctaacgtgaccgggaaagagcgggaggtgcggacgctttcaggaggagaatctttcatggcagctctgtcgcttgcacttgggatggcggaccagattcaggagagttcgtctgcgatccggctggatatgatgtttattgatgaaggctttggctctctggatgagcattccagaagtcaggccgtgcgcgtgctgcagaagatggcgggcggttccagactgatcggaatcatttcccatgtgaccgaactgaagcaggagatcgaggatcagctgatcgtccggaaggatgagaccggcagtcatgtccgctggcagatcagctgacaatctgacatattttcataaaaagttcataataattggtggaaactgctacttgacggatgacacgctacttgttatagtatgaatagaacaaagaaaaatgttcaacaccgagtagctgcttcgcagcttatcagaaggagtttgcactcctcctgatacaagcaagcc

SEQ ID NO: 3655 - DNA, 32759 bp, Unknown
  16S sequences of unknown bacteria
agtccctcgccggatttcggcgacggcgaccgggtatcccatccgaaattcggcgagggactggtcatttccgtaaaaggcggagctgtgacagtcgctttcgattccgtggggatcaagaaactggccctggattttgctccgctgaagaagatttgaaaaatttgaggaagaagaacggatctctgagattcggggaaaaatttgggaaacgggagtttttttatgaacagagaagaggcgaagcgccgcatggcggagctgacagagcttttagaataccacggcgataaatatttcaatcaggatgcgccggagatcaccgaccgggagttcgacgaactatctgtcgaactccggaaactggaagcggaatttccaaatctggcccgaaaggattcccctacccgaaaggtgggaggcagagcgaagcgtgaggccggcgtattagtgcgccaccgcgtgccgatgctctcgattcaggatgtgttcagccgggaagaggtggaacactgggtaacggatatgagaaaaaaactgggcgaggacacggaatttctcgtggagacgaagatcgacggactctctctggctctccggtatgagagaggcagtctcgtgacggcgctcaccagaggagacggcaggctgaacggcgaagacgtcacggccaacgcaagagtgatcgccgacgtgagggcagaattgcccgacgcgccggaatatctggagctgcgaggtgaagtctatatggaaaacgcggcgtttgaagaagtcaaccgccgtcaggaagaagccggaaaaaaaacgtttgccaatccgcgaaactgtgcggcgggcacgctgcgccagctggatacctccgtcaccgaacagaggaggctctctctgtttattttcaatctgcaggacgtgagagggatttcctttgaaacgcatgaccaggtctaccgctatctcaaagagcggaaggtaaaagtgatcgatcattactttatctgccgaaatgagggagaggtctgggaagccatcgaaaagatcggagagatgcgcggcagtctgccttacgaaatcgacggcgcggtggtgaaactcaaccgcctgtcggacagggaaaagtgtcccgataccagcaaaaacgcggggtttatggtggcgtataaatatcctccggaggaaaaggagagtgtactgcgggaagtggagctctccgtggggaggacgggaagagtgacgccgacggccgtattcgatcccgtgcgcctctgcggaactacggtgtccagagcgactctccacaatcaggactatatcgatgagctcgacgtagggatcggagacactgtcgttgtatataaatccggtgagattataccgaaagtaaagaaagtaatcagggagaaacgccccgcgggaacggtgcgctttcagattcctgatgtctgtccggtatgcggcgcccctgtccttcgggatgaagatacggcggatatgagatgtaccggcgtcagctgtccggcgcagcttgagcggcatatcatcaattttgtgggacgcggcgccatggatatcaaaggctttggcgaagtctacgcgaaggaactggtggctcaaggttatatttccgacatcgccgatatttttctgctgaaaaatcaccgggaggaactcatcgaaaagggaatcatcggaaaagaaaaaaatacagataaactgctgaacgcgattgaagaagccaaaaagaacccgcctcatcagctgatgacgggattcggcattccaaatgtaggtcaggccgcttccaagtcgattctgcgtcatttcggcagtatcgaagcagtggcggaggcttccgaggaagaactggttttggtggatgacgtgggggaaatcaccgcgaaagcgatctgcacgtacttcagcagcgaacagaacagggagatcctgcgccgcctgaaagaagagggcgtcaatactctcctgaaagaggacggagcagcgcaggcggaaacacagaaatttgcagggctcactttcgtcatcactggaactctgcctacgatggaccggaaggccgcggcggctctggtggagcagctgggcggtaaagtgagcggaagcgtatctaaaaagacgagttatcttctaaccggcgaagccgccggcagcaaactggcaaaggcagaatctctgggggtaccggtgatcgatgaagcggaatttctgcggatgacgcgagaaggagaatgagagatcgccggcgctgtgagacagggagaatggacgccggctttcgctctggcgttcttcggcggaagaacgcggtataaggagcgggctgacggaggatccggaggaaaagaaaatttcgggataccaagaaagcgattgacgatctgacgcaaaatataatataataaacaatgcagttgtcctttgatggcttcgtaagagtgactggggtcctgcgcaataagagcccgtgaacctcgtcaggtccggaaggaagcagcgataagcgggacctcttatgtgccgcagataagcctttttcattctgcggagccttcaaaggacaactttttttctgaaatcggacctgcggccgtcctttctccggaaagacggcgtgcaggcttttcatgacagaatcagagtaatatgcaggaaaatcaccgcaggagtggaggacagcaatgtattcggcgatatacagagacttccggccggatcggttcgatcagatcataggccaggatcatatcgtaaagattttgaaaaaccagatcgcgtccgggcagaccggacatgcctacctgttctgcggaaccagaggaaccggcaaaacgacgacggcccggattctggcaaaggcgctcaattgtgagagtgaaggcgagaggccctgcggtgtgtgcgacagctgtatctctattaaagaggggacgtttttggatgtgatcgagatcgacgcggcatccaataacggtgtagacagtatccgggaactccgggaaagtgtaaaatatccgccggtgaaaggccgcaataaagtttatatcatagatgaagttcatatgctctctcagggggcatttaacgctcttttaaagactctggaagagcctcctcaaaatgtggtgtttatactggcgaccacggaaccgcaaaaactgccggcgacgattttgtcccgctgtatgcggcttgatttccgaagggtttccgaggagtctatcatcgataatatgaagatgatctgcagagcccggggaatcgaagcggatcccggcgcgttgtctctcatcgcggtcaacgctgacggttcggtcagagacagtctgagcattttagagcagtgtatctctacaggcgcggactccatttgccgggatgatgtggcagaacttctgggaacggcgggagaggagtctctcatcgggctgacgggctgcattatccgggggcagatctcagaggcgctgctgcttttggacaggatcatacgttccggcagcgatgtaaagcagtttatgaaagagtggctgacgcatttccgcagtctgctgatggcgaaatatgtggcgcagccggagaatattctcagtatgtccgtggagaatgtgctgagagtaaaggaacagagtgcggaaatcactacagaactgctgaatcgcgggattaccgatctgacgaagactatagcggaggcccgctggtcctcccagcccagagttcttctggagatgtgcatcgtgcggctgggcgctccgcaggagagcgaggagacctttgcctttcggaacgatgcggtacggacctctctgcagcagagcgcagctgcggaaaagacggacactgcgcagatccgcagcgattcggccgcgagcgaccgtgtgtcagaagaggaacgaaagtctccggtatccgccggacagcgggaaagactggcgccgcctgttctggagagttcgtctgaggtcggattggaggagtcggaagcggcgccggatatcgtatcttcagacgatgaaatcatgatcttcggttctgatgacatagaagatgaattcggcgctatgatgccgacgattcagcagatttatgatgcggaaccggtttctcctgctgccggcaggggaacagccggcgaaagcagagcgcagcggactcctttccgggaagaagaactgcctgtgaagtcggcggaggcgccgccggaaattccggaaagcggagagcagacggcatgcgggcctgaggtagacgagctgtggaatacggccgtaaaaaaggctgtcggagaaaagccgatgctcatccggatcgagacaaaggcgcatccgatccgtatacagggcggcatcctttatgtctctgcggaagacgattacaccgaaaaaatgctcatggaaaagggcaaagagctcctcgaatccaagcttgagatgtattacggcagccctctggcgctgtgtttggacagcggaggcaacggagcgccggtctctgcgggagcacagcgggaagactcgtccggggcggaggagatcgcaagacaaatcgaagaacgctttcacatgaaagtggagatagaataaagaagattcggcgggaggttgcggaaagacagcggccttccgccacagcagcagacagggcaatattatcgggaggaaaaacatgggaaaaggtatgagagcaggcaagaaaccgagcgcgggtaagggcggcggaaatatgcagaagcagctggctcaggtacaggcgatgcaggcgcgtatgcagcaggttcaggaagaaatcgaagcgaaagtagtggaaacttccgccggaggcggagcggtttctgttaaaataaacggaaagaaagagttggtcgaagtccttctgaaaccggaagtggtggatccggacgatatcgaaatgcttcaggatctcattatcgccgcggtaaatgaaggtatgcggcagatcgatgagatcagcgaaagcgagatgggaaaagtgaccgggggtatcaacattccgggactgttctaagggggcatcatggctcagtacgcaaagcccctggcaaatctgatccgggaactgtctaagctgcccggcatcggcggaaagagcgcgcagcgcctggcatttcacattctttcgatggatgaccgggaggcggaagtcctcgcaaattctataacgagagcgaagtcttcgatgaggtattgttctgtctgcggaaatctgaccgagagcgatccctgtgagatctgttccgatgaaaagcgggaccgcacggttatctgtgtggtggaacaagcccgggatgtggcggccatggaacggatgaaagaatacaacggtctgtatcacgtcctcaacggggcgatttctccgatggatgggatcggaccggaggatatcaatctgaaacagctgatcatccggctgcagcaggacgatatccgggaagtgattctcgccaccaatccgaccatcgaaggagaggctacggctatgtatgccgcgcgtcttatcaaaccttcgggaatcaaagttacgcggatcgcacacgggatccccgtaggaggcgatctggagtatacggatgaagtcacgctgtcaaaggcgatggagggcagaagggaattgtgatagccggtccgccggttcggatgggacgaatatggacaggcggctcacgaataagatatctcatcggaggtgatgagatgtcaatggcaaacgaagcgggaattctcctggcgtatgcgataggaatgttcggtctgtttgtagtcgtgtgtatgtttatcgttccgctgaaatacgcggtgagatttttaatcagcagtcttctgggcggaatcgcgatcgtcgtgatcaatcttgccggggcggctgtgggaatccacatcagcctgaactgcctgaccgcggcagcggcaggagtcttgggcgtgcccggggtgctgatgctgctgtttttccagaacatatgacaatgacgtaaccgttcttttcagcggtctgccggccggagaacgcagggacagggcggatttatagtttgatcgttctcggtttttaacagaaactgcggtcacgaagttctccgggcaacgtcgatgcagaaggcatacgtcagatttgagaggcgcatgcggcgatatccccgtgtacatagtaatttcagcgaagaagtcgcaggacaggagagatcatcagatgaagaattataattataagacatcgggcgtctgttcctcacgcatcacatttgatatcgatgacgagggatgtctgagaaacgtggtttataccggaggctgcagcggaaatctcaagggaatcggcatgctgacagagggaatgaaagcctccgaggccgcagagaaattggaaggtatccgatgcggatttaagaatacatcgtgtcccgatcagctggcgaaggccatccggagcatagatctttaaacatgacagctgtctcgcgggaggcagctttcttttttgtacaaaccgcagccggtcttttgggacaaagcggccggttccggcggggagagggggtgtccggatgcttcgtatatattttggtgatacggataaggacaaagataaatttattttcgatcaaatcgcgtcggtcatgccgtcggatgtgtttctgctggtcccggaccagtttactctgcaggcggaacggaatgctttcgaatatatgaacgctgacgcgcttttggagctggagatcgtcagccggtccgggttcgcgcgccgcatcgtgtctcaggagggatctcccggaggcgtggcggtggataaatacggccgttttatgctgctgacagggctgttgctgaaagagcagaaggaggaagggatttttgcttcggtgaggaaaaaaaattcttttatctctctggtaaacgatatgatttcagatatgaagcagtatgatgtgacgccgtcggaactggcggagatcgaaagttctctgaacgacgacagcatattatgtgaaaaaatctcagatgtgagagagatttacgagaaatatgaggaacttctcgccggccgttacctcgattccgaagattttctccgcatcgtgtcggaaaagatccgcggttctgaactggtaaagtcgcaccggttctggatcgacggcttcgactatatgacgccgaagctgctttccatggtagaagctatcgcctgtaccgcaccggaagtcaatgttgtctttaccggcgacgacagaaatgcagagggacagttcgcggtatttcagcgtatgagaaaagctctgagagagatggcagaacgggctcagattccttatcaggaacacggaataccggaaaaataccgaagagacgtctcccctccccgggtgaatctgacggtctgcagcgatttttacgcagaggcggagacagcggcggtgcggatcacggaactggtcagagaaaaaggactgcgttatcgggatatcgtcatcatctgcaatgatgctgaggtcagaggatcgatttttcgccgggtctttgacagatatgaaattcctctgtttatcgaccgcaaaagggggattctgcaggatcccgcggtggaatttatctttgccatgatggacaccgtacgtgacggcagacggttttacgatgtcttccggatgatgaagacgggatattctcctgtgagccacgacgaatgcgaggagctggaaaattactgttcgaagtatcatatccgcagcggccggtggaaaaaaccgtttgtatacggaatgcaggaagagggcgaggaaaagctgaaccggctgaatcagctccgggagacggcggatgcgtttatccgccgcggggaggaactctttcaaggccgaaaaacggtgagggaaaagacggaagcgctctatctgtttctgacgcagaccgctcagatgccgcagaagatcgatgcggccagagcggcgctggaagagggggatgaatttgagtatgccgagagcgcggctcagatctggaaggtgatcgtcgctattttcgatcagattgtggaggtcatcggagaggaagaactgacggatgaagaatacgcacagattctgattcagggattttcggaggtggaaatcggtctgctgccgacgacaaatgaccaggtcctcttcggaaccatgcagaggacacgcaccggttcgataaaagcgctcttcgtctgcggcgcaaatgaaggagtgctgccggagaccgcgtcttcctggggaattttttcggaggacgaaaaacagttcctcagtgaaagaaacagacggatctgcagtaccgatgaactgagggatatggagcagcagctggccatgtacaagatgatttccaaggcggaagactatctctttgtgtcctgggcggaaatcgataccgagggtgcgcagcttcgtccgtcagaactgatcgctcagctgagggagcggagcggtatcgccggaactgccgctgcggcggaggtttccgaatccagggacgtgctgtgcggacgtcccgaagatctgatacaaaacaggcgaggtgcgcttcctcacctgacggaagctctgcggaaaacggcggcgggagaggctttggacgatgtttggaagacggcgtcgctgttttatgaaggggatgagtcttatgaaaatatcagaaaaggactctttttcgacaataaagtggaacgcctgagcgaagagacggtaagagagttatacggccggggcatttcaaaggagctggtgctgagcgcctcttctctggaacgtttctgccgctgtcctttctctttcatgatcacttacgggctgcggccttccgaagaacggaattttgaagtggatctgcggtctatcggtgatatttatcatttttgtctgatgcgcctgtccgaatacttaacggacgaaggtgtggagattaccggcgcggattcccgctggatgaaggtgacggaagaggaatgcagacgtctgaccgaccggtttgcggacgagttttctgagacttaccgcgagggcgtattccgtcaggaagggcgggaaagctacctgcggaaccgcatcaaggaagtctgtttccggacagcctggatgatggtgcgtcaggtgcagtgcggaaggacgaaggcgatctatttcgaaaagcggttcggccgccgtggggacgcagtttttcctccggtgcgcatcgaactgcaggaagggagatcgatctatatcgaaggaatgatcgaccgcgtggatattctgtcgccagagccggaatttcctctgccggcagaaggggaaaccgccgatttttcagcgctgccggaccgtaattatatccggattatcgattataaatccggaggcgataaattcgatatagaggaagtacgaagcggattccgtctgcagctgatgctctatctcaggggcgctatgggaggcatagaaaaatcctgtcctgccggcgttttctatttcaaaattccggataaaatggcggaagtcagcgatgtgccgcaggatcaggtggatgacgctgtccggaagaaactcaaaaaagagacgaagctggacggagctctgctctgtgaggaacgcgtgatcgaatgcatggacggagattttaccggttattccgatattatcccggtgtataagaacagagacgggggattcagcggcccgggcctgctgacggaagaagagttccgcggactgatcgacgaaaatgaccggaatctgcagaaagcggcttcggaattcgccgcaggccgggcggatatcgagccgatgaagacggcaaaatccgacgcctgcaggtactgcggataccggagcatctgtacaattcagcgccgcggcggaggagcgggaacgagatgaaatatgtgataaaaaaagcggatatcgcactgggaatttttctcgcggtattgtgcgccgtggtctgctggtatgtctattcttccggcagcagcggttcatacgccgcagtgacggtaaacggccaggcgtacggtacgtattctcttgcagaggatcaggagatcgatatcgattcggaatacgggcataaccgtctgaccgtaagcggcggacggattctcatgacggaggcttcctgcccggacggctactgtctgaatcagcataaaaagaacggtggaatgaaggattccaatcagacaatcgtatgtcttcccaaccgtgttgccgtgtctattctgacaggagaaaagacggagagggaacgaggccagagcgacggtatttacagtgattcggatgctgtggcgggagccgccggaggaggtccggaggaaggcggtgaacgggatgcggaaaaacgataatacggcttccgcggtgcagaggaaagcgtataaaatttccgtctgcgctgtgctgaccgctctcgccctgattttttcttatgtggaagcgctgtttccgtttcaattcggaatccccggaatgaaactcggactgtccaatctggtcgtgctggtagctctttacaggatcggcgcgtcgtatgctctttcggtaaatctggcgcggattttgctgtccggtttgctgttcggcggagtgtcagccatgatgtacagtctcgcggggggaatgttcagctttatcacgatgcttctgctgaaaaagaccaggatattcagtcctctcggagtcagcatggccggaggcgtgacccacaatatcggtcagctgaccgtagcggcgctggtggttgaaaactcaaaaatctatctttatcttccggcgcttctgatctcggggaccgtaaccggtgttctgctgggtttcggcgcggttctgattctgaatcgtctgaagaggtgaggacccgctgcagcacccgagagtcctgtgatttccgaaagcggatttgttttcctttttttgtaaaattgagtatagtgaatatacgatgtaatgggcgtgtcaagggagaaagggatttttatctcgaagtaaaatacgtacagcgtccgcgggggatggtgtgagaaaggcaggtaaaaagatgcatgtgattttatgcgccgacgaccgaaacggcatgatgtttcatcggcgccgtcagagcagagaccgtgctgtgctggaggatatcgagaaactgagagcggggaaaaaactcctgatgaacaagtactcggataaaatgttttcggaatacgggtacagcgatcacgagacttttgaaagttccgaagccgcgctgaccgccgccggagaagatgatttctgctttctggaggatatcagcccggcggcgcatcggggcaggatcggaagtatcgttatttaccgatggaatcggcattacccatcggatctgcggatcgaaggagatctgctcgacggttgggcggctgtcgaacgcatggattttgaaggaaattcacacgaaaaaattacccgggaaatttttgaacgccaatgcggaaggcggacaggatgaaggagaccgccctaaaacggaaagaaccgccgcgcggtgcgcggcgagtgcggcgaaaagagggctgccggattgaaaaaacggagcggtcatgacagaagatgcaggagaaaaataatgggaagaaatagacggaaagcgacggcggctgagcagattcaggcgatatatgaaaaagaagctgaagtgaggacttcagggacggctcagattgcggagaacagaggacggaaaatggaaacgccaagatcggatggaccgataggcgaggagcggcgggtttcgtcggtttcaggaggcggcagaaaaaagagcatgaaaccggcggccgctctgtctcttttgctctgtatcaccacctttttcagcggctgcagcggtgcggccggcggaaatgaaaaaactgccgccgattctccggcggtggaaaccggttctcagagcagcggagttctaagtctgggaggctcgccggagaatgcggtaatctcggagaaaaatattcctgattacacgggagaaccgtttgccgaggtgaacgacaaccttccggcctttacagaggcagatttcgcagagacgtcgtcttttgagacttacagtgaactggattctctgggcagatgcggaaccgccttcgcaaatatcggaagggatctgatgcctacagaagaacggggaagtatcggacaggtgaagccgtcaggatggcagaccgtgaaatatgactgcgtggacggcaaatatctgtacaatcgctgtcatctcatcggatttcagttgacggcggaaaatgccaaccggcagaatctgatcaccggaacgagatattttaatgtggaaggcatgcttccttttgaaaatctgacggcggattacataaaggagaccggaggtcatgttctgtaccgcgtaaccccggtctacgagggggataatctggtggcttcaggagttcagatggaagcatgttctgtagaagaccggggcgagtcggtctgtttcaacgtatttgtgtttaatgtgcagccgggaattgtgataaattacgccgacggtaccagccgtctcgcttctgacagcggttcttccggtcaggacagcggcctggtatccgatacggcagtccgggggaattccagatcgaaaatctaccactgtccgggtcagcgggcgtacgaagatatggcggattccaaatatctggtggtcttcggaagcgaaaaggaagcgcaggacgccggataccggaaggcgaagaactgataaaaaggggctgatcgcactgttcttcgacagtgcgatcagcctttctttgttttcgagtgcgaaaaaagggacgccgcacaaaggatttttgttctttgatgcgacagtcctttcattttatttattctgttttatcctatctctgttatttctgtcatttttctgccgatgtaccgtctgtcgggcgatagactatttttcctcttcgtcgtacagatggtccagtgaatcgtcgctctccagaatggacagtgtttcgtccgaattactgtcggaatccgacggagaatctgtgtccggctctgcagaggctgttccggaggtctttgcgccgccggacggacggctgccggtgagcgccgcgggttcggcgtctttcggtgtatccggattttgcaggccggatgtattcgatgggcctgaaatatccttcggagttttatcctccggcatactctgaccgccggagccggaagagcggaaattacctgtggcgccggaataaaacactgcggatgcggtctgcatgtagagaatcagcaacatctctccgaagagcgagacgataccgaaaatgaccgcgaggactgcaggaaatatggcggcagaagaggaagatgcggatacggctgtaaatgccgcgccggcggctaatcccaccgggacgcagagaagcagtatccagggcaggaaagataactgaagaaggaaaaaattagaaatatttcctttcatcaggcgtacgcttcgcgatacacattcacttcccgtacaatcttcatctgccgcgatgaagaaagtcatctggtaacgcatgagaaaaatgacagccgctaacaaaagcccggtaaataccatgaaggataagaaggcggctatcgggctgccggaaacggtgcccattcccagaaagaagctgcccggaagaatgaagagaagagcccagagcacggagaagatgctcaccagaagattggcgatgaaggcttttccgtactgtgtaaatccggcgaaaatagtacggacagaaaaaggctcgtttctcaggattctcagagacaggccggataaagatacgctgaaggctccggcggtgagaaaaatatacagcgccagcgccgaagcgatgaggccgaacgttgtcatgccggcggccggagaggtctgcatcgacgtcagcatgtcggaaatcatctcagaagtcgcgcttccttcggatgccagcatgctgttcagctgagaggtctgcgtcatgtaactgttcagctggatgacgacagcgggaactgtggtgagaagcgtatagatcagcatgagaggcagaaggcgaagccacttgcccgacagctgtttttttgccattcgtttcatttctccgatggtaaagatcggaatcgttgccgtgcgatattgattcatgaaatcactcctttactgtaattgaaacaggccggaaagataccggctgactcattttatgtcagaaaaaccgggtcggtgtcagttttcatatacgtcgtagccttccccttcgatgacaggatcgcggcggtctacgaatccgtcgcggtagggatctatcgggctgccggagacttcgctgtccggatcatagacgtcaggatcgtattcgtcgggaagcatgtccagcatatcccggcggtccatatccctgtcgtaatcctccgtcatttcagcgatgagatccagtacgtattcgtccggttcttccggcatagcctgcgaaaaatcgtaagaatactttgttcctgacagtttttcctcgcggtagagcatcagagcttcacagggggaaagacgtttctgtgcccctccgttttccggctgacagacggcgatgtccggtgtcagataccactggcggaaatggaagagctcgtccgccagaaagccgaagtttctgccgcggccgagaccggcaagagagagcagcgtatccttgatggtctgcaggctggcgtaaagctgtgtattatcgtccggcacgccctttatcatatcttcaaaaaaggattgcactacatcctgaagggcttccagatccatcagcagcagaagttccgcaaaggtgtcatagtcgatatcggcttctgtttccatcagagccgcaaattgctcgaaatacataaaatcctcctgggattcgatgtcgagcatttccataatttcttcgattgtcataaaatctgcctttcgattttttgtgtttttctggtctgttcctgcaaaaatactcgtattcaaaagttggatcagacagtgttattttcactgaatattatatataatattacagtaaaagtacaataaaaggaaaatgaaagaaatcgtaaataaaagaatcgataaaatatggtaagaagaggaaaaaaggaggagaaccgatggccggtttaaaaaaactcagacagagagaagaaatcgacgacagatacaaatggaatatcgccgcgatgtacggagatgaaaaagaatgggaaaaggattttaaagaatccgaaaagatggcggaggaattctccgcttactcaggaaggctttccgggggcgcggaagttcttctttcggctctcagagaccgggacaagctgtggatgaaggcggaaaaagtctatgtgtattctcagatgaaaaaagacgaagataatcgccggtcccgttaccaggaactgaatcagagagcgcagtctctgctggctcagatttcgtccgcaacagcattttttatgccggagcttacagaactcccggagggcacgattgagaagtatctggaggaaaacggggaactcagagaatattcctatatgctgctggatctgatccgcagaaaacagcatgtgctgtcgaaggaatccgaagctctgatggcgcagatgagcgaaatcgcgggtgcgccgaaacagattttctccatgatcaacaacgccgatatcaaattcggcaggattcacgatgaagacggggatgagatcgaggtgacccacggcaattatatcagtctgatggaatcttccgacagagcggtgcgaaaggcggcctatgagaatctctacgccgcttatgccgcacagaaaaatacgctggcggccacatataattacaacgcaaagaaaaactgtatcatttccaaaatcaggaattatccttccgctctggcggcagagctggacggtgacaatattccggaagctgtttaccgcaatctggtcaaatccgtcaacgagaatctggatgtccttcacaggtacgtccgcctgagaaaaaaacttctgggggtagacgaaatccgcatgtacgatatgtacgcgcctctaatggacatgccgaagcgggatgttccttatgaagaggcgctggaaatcgtcagaaaaggtctgcgtccgatgggggaagattatctgaaggtgatgaacgacggaatcgaggccgggtggatcgatgtcttcgaaaacgaagggaagaccagcggagcctattccttcggaagctatgacagtatgccttacgtgctgctgaattacaacaataaatttaaagacgcctttacgatcgttcacgaactgggacattcgatgaactcctactatacgagagaaaaacagccgtatatttacggaggacattctatcttcaccgcagaagtggcgtccaccgtcaacgagtgtctgctgatgcacgaccttttgaaggattgtgacgacaggcaggaaaaactctatctgctgaccatctatatcgaggaattccggggaaccatattccgtcagacgatgttcgcggaattcgagttagcggttcacgaagccgtaggaaagggagaggtcatgacggcagaccgtctctgtgaaatctacggagaactgaataaaaagtattttggcccggaggtaggctatgacgatcagatcgctatggagtgggcgaggatcccgcatttttacaatgctttttatgtatataagtacgctacgggatattccgccgcggtggctctctcacgcagaattctcaccgggggtcaggctgcccgggacgcctatatggaatttctcgcggcgggcgacagcgattatccgatcgaactgctcaaaggcgcgggtgtagatatgagcacgccggaggtggtggacagcgccatgaagacattcagagaattgatcgggcagctggaggaactcgtggaaaatgattaagtctttcaatatatttgcaaataacgacgagatttcagtgcgaatctcagcggaggtccggggaaaaatggaggaagccggtgcggtttaccgggaagatgaaaaaggcgcggatctcatcttctgcataggaggggacggagctctgctccggctcctccgccagtacgactttcccgaagcgcccatcgtgggcatcaataccggtcatctggggtttttccaagagatcacgatggacggtatcgatgaattcatccgcatgctgaaagagggaaattaccatatccaggagaacagcgctctcagcgctgaaatctgtacggacagcggaataaagaatatcacggccatcaatgaaatcgtcatccgcggggagggagagcggctgatgcatcttgatatgagcatcggcgataattacatctcccggttcagcggcgacggtattctcatctgcacgccggcgggcagcaccgcgtataattattcgctgggcggcgtcatcgtcgatccggaggtggacatgctgcagatcacgccgatggctcccgtaaataattccgcttaccgttcttttacctccggtatcatcgtgccgaccaataaaactatcgaaattctgccggcgaaggatgaagaccgcttcgtagtcgtcatcgaggacgggcgtatcgtagcgagagacgacgtgcgcaaagtcaccgtccgcgtggcggagggaaaagccagaatcgtgagattccgcaattacaatttctggagcaaagtaaaggataagattctttagagatacagcaaaggcacagtgaaaaacttctgtattgattggaaagtgagataacgaggtttcaacagacatgtcagaaagagatttgaagaggaagctgacggatatcgtccgggaagaggcggacgagcggcagaccgcagtttcggacagcggccgcttcacctataccgttacgccgcaggacggcgagatgacggtaaaacaggttctgaagcggagaatgggattttcctccaggctgctgcgccggctgaagacggaaggcagggtcatgcgcaacggcgccgaagtgcgtctcttcgccgatgtgatcgaaggagatgtcattcaggcggaactgccggaggagagatgttcctttctgccgcaggatattcctatcgacgccgtctatgaagatgaggacatgctggtcatcgataaacagcccggaatcgtgacgcatcctacaaaagggcatcctgtcgggaccattgccaacggtctcatgcgctatatggagcaacacggcagttcttttaaaatccgttttgtcaaccgcctggatatgaacaccagcggccttctgatgatcgcgaaaaattctcactgccaggattcgatgatgaaacagatgataaagtggagaagacgtatctggcgattctccacggggtgataccggaggaacggggaacgatcgatcagcccatcggccggccggatcccgacgatatgcgtcgccgggtcatggaggacggatatccttctgtaacgcattacgaggtattggaacggttcgagattcccggggcggagggcggcggatacacgctggtcaaacttcggctggagacgggcaggacgcatcagatccgggtacatatgacgtacgccggtcatccgctcatcggcgacactctgtacggcagtgaggatcgggaactcatcggcaggcaagcgctccatgccgcgtctctccgtttttttcagccggtcagcggggagcagataagatgtgaagccgctcttccgcaggatatggaaagggcggtccggcttctgagagagaagagacaagagagaaaaggcgaggagcgcgcggaaagcaggtgactgttttccggcggcggatacgaagccgtatccgccaccggaaaaagattttcttgtgcagaatggagtttttcctgttttttacggaatttcgttcttcgcgatgcgtggataaggcgcgggaagtgtggtacaatagcttcaacttagcgatttgcgagaaaagcgaagcaagagcttagttgaactcgtacctgtccctcggcgacaggcgagtcgaacaggaaaaaagacgaagactgagccgtagtcgacacggtacaatagcttcaacttagcgatttgcgagagaagcgaagcaagagcttagttgaaccggtgaagcctgtttctccgcggcagacgccgcggaaaggaaagaatgatacgcagaatgagatgcagaaaaaaggaggtcagcatgatcgtctttaaagtgttgctgatcgtagcgcttgtgataccgctggtatattttgcagccatcatgatgaactctgtcatggatgagatattacataaagaagataagagcggcgacaaaaaatgaacggtatttttataacatttgaaggaaccgacgcttcgggaaagacgacgcagatcggtctgctcagcgaatatctggaaaaaaaaggggttccccacatcgttaccagagagcccggcggcactgccatcggcgagaaaataagaacgattatactcgataaagaaaacagcgaaatgcttcccgcaacagaagctcttttatacgcagcgtcgcgggcacagctcacagggcaggtcgtgcgccctgctctgcgggaaggaaaagtcgtcatcagcgaccgctttctggattccagtatcgcttatcagggatacggcaggaatctcggcgatatgatccgcaggataaatgaacccgcagtagaggggctgaagccggatctgacgattctgctgaaaaccgatccggcagcgatgagaaagcggcgcgacgcgtctctggaagacaggatggattctcagaaactcgaatttcacagagaagtgctccgtgggtatctgactctgtcgcaagaggagccggagcgcttttttgtcatcgacggcgaaaggccggtcgatgagatcgccaaagccattcgggagcgggtgggcaggttcgtctggaagtagcgtaatcagaaaaggatttttataagatatatttcagaaaaaagcggaggatatcatgtcattttcggactggcagggcaacgaacatctgattgccagattaaagcagatgattcgaagcggcagaatttttcacggatgtctgtttgagggcagtccgcagcagacagagcggctggcagacgattttgtccgggcggcgctctgcgaaaggcaggacggcgacgcctgcggcgtatgtactttctgcagaaaattcgactctggaaacagcgaagacgtcatcgccgtcggcgcggaaggcagtgtaaaggataaagatatcgagctgctgatctcggcggctatgaagaaatcgtataccggaagacccgtttttctggtggtacgcggcgcgggacgcatgacggcgagagcgcagaaccgactgctgaagacgctggaggaacctccttccggtgtcaagattctgctcctgacggaaaatgcggaacttctgacagaaacggtccgttccagatgtatttctttccgtctaaaagacggcgaagtctccgccgggagaagagatcccgcgccggagaccacgccgggagaggattcgggcaaagcggagctttcccgtgaggagaaaaagcgcgccgcggaactggcgcgagatataatctacggtaaaccgttttacgcggtaaacagcgaaatcggctattttgcttcttcgagagaaaaggcggagcagttcgctgaagcggcggaactcttttaccgggatattttcatatctcattacgatcgggaaggacgtctgctgataaacgcagaacaaagagatatcatacgcggatgcgccggggacttcacagcagaacagatgacgtcggcagcctcctgtgcggagactgcgcagagggatctgtcctatcacgtgagtccggcgcacgctctgaagtatatggcatttgacatacagaaaaagataaaggaatagacgaatatgcagacaggaggaactaaaatagagaagaaaaaaacatgcgcggagaacagaaatatgatcactgtagtcggcgtgagatttaaggcggcgggcaaaatctattattttgatccggaaaagctggatttggatatcggagactgtgtcatcgtcgagaccgcccgggggttggaatacggagaaatcgcctcgccgcccggcgaggtctgtgaaaaatccgtggttcagcctctcaagaaagtgattcggatcgcagacgagcaggataccgtcaaacacgaggaaaatctgaagaaaaaacagagcgcgctggatatctgtcagaaaaaaatcgacgccagaggtctggagatgaaactgatcgacgtcgaatatacgtttgacaataccaaggtgatcttttactttaccgcggacgggcgcgtggacttccgggaactcgttaaagatctggccagcgtttttaagatgcggatcgaactgcgtcagatcggcgtcagagatgaggcgaaaatgctgggcggcatcggtacctgcggcagaggactgtgctgccatacgtggcttccggattttgaaccggtatccatcaagatggcaaagacacaggggctatccctcaatcccgctaagatttcgggaatctgcggcagactcatgtgctgcctgaaatatgaaaatgaagcctacggcgcattgaaggccggtttgccggacaacggcgaacgggtgcgcacgccggatggtccgggtatcgtcgtagacaccaatgtgctcagagaacaggtgaaggtgcggctgtttctcgacaatgaaaagggccgctcttctgaggaggagaaactcagtccggacgtaaccacatataaaaaatcggaaatccgccgctcgggcaggagaaaaaacagcagaaagaaggaagaagaggatatttcggttcttcccgaagaagtgaaaaatctgctggaggactgagatggagcggatcgatgagatcggattcggcggtctgaagctgatacaggatacggagatgttctgttatggtgtggacgctgttttactggcccgcttcgcttcccggatttcccataaaaaggcggctgatctgggaaccaacaacggtgtcattccgattctgatgagttatatgggaggagcagagcatatcacgggagccgagatgcaggagcgtgcctgccgtcttgcggagagaaatatcgaaatcaacggactaaaagatcgcatcagcatctgtcatacggacatcttagacataacggcccatttttctccgggcagtttcgattgtgtcgtcaccaatccgccgtacacggcggcggggaccggcgtgatcaacggtcaggacagcctgaccgcggctcgtcacgagactaccgcttcgctgagcgactttatcgaaaaagcggcctggctcctttccgaccggggatatttttatatgatccaccgcccggcccgcatcgtagatatctgtgaggcctgcagacgatatcacttggagcctaaatatctgcagttcatctctccgaagcccggaacaaagccgaatctcatgctgatcgaatgcagaaagaacggaggaagagagctgaagctcctggatcctctgcatgtatacggagttgagggcggctactccgatgaaatccggcggatttacgggcgaaaattataaaattgcttttgtttgcaacggtgtataaattataaaactgcaaaatttaactacattctggaggatatcatggattacatgaaattagcggagcttctttttccgcatatcacaaagacgccggaggaatacgaggacatctaccctgacagaaaactgccggagggtgcgagagtaacccgtcttgcgccaagtcctaccggattcatacatctgggaaatctttacagcgcatttgtcaatgaaagactggcgcaccagagcggcggcacattttttctgagaatcgaagatacggatgacaagcgttatgtggaaggcgcagtggagacgatcgtcaacgtgctggattattttgaaatcggatttgacgaaggagcggccgtcgacggtgagcggggggattacggtccttatcatcagagtcagcgggcggaagtctaccagaccttcgtaaagcggctgatccagaggggtctggcctatccgtgtttcctgacggaagaggaattgtccgatatccggtcgaaacaggaagcggagaagctcaatccgggaatttacggaaaatgggcggtgagcagagatctctcctatgaggaaatcgaagagaagatcagggagggcaagccttatgtgattcgtctgaaatcctccggaaagacagacgttcctgcggaggaaatggatactatcaccgtggacgatgcgattcgcggtcccatcaccatgcctgcgaacaacatggacgtggttcttctgaaagccaccggaattccgacgtatcatttcgctcacgtcatcgacgatcacttcatgaggacgactcacgtggttcggggagaggaatggctgtcttctctgccgattcatatcgaacttttcgacgtgatgggatgggagcctcctgtctactgccatacggcgcacctgatgaagatcggcgaagaaggcaccaaaagaaagctgtccaagagaaaagatccggaactttctttggattattacagaaaagacggatattatccgctgtcggtaagagaatatctcatgacgattctgaattccaattttgaagaatggcggattgccaatccggaagcgccgctgaattcctttgaattcactacggaaaagatgagtaattccggagctctgtttgatctcaacaaactcagcgacgtgtgcaaagatgttctcgtaagagttcccgcttcggagctggttcgctttatgaaagcgtgggcggcggaattccgtcctgaaatcctttctctgtttgaaggaaaggaagatcagttggagaagattctggacctgggcaggacaggcagcaagcctcgtaaagatctggtctgcgcgtctcagatttttgaatttatcaaatatttcttcgatgattattttgaaatcgagggggagattccggagaatgtatcccgggaggatgcggatgctatcctggccgcgtatctggaaacctacgaccacgccgacgatcagtccgtctggtttgaaaagatcaggactctgggaagcgctctgggctatgcggcgaaaccgaaggattacaaaaagcacccggaggattacaagggccacgtgggcgatgtaagcacggtgatccgcctggcggtgaccggaagaacgcagtcgccggatgtatgggaaattcagcagattctgggagaggaacgcacgatttccagaataaaatcttacgccgcgagatagttcttgcagaggatgggtatttaaattaaaataaaaccatagtgtccgaggaaaacggacgccgaagatattgtccgtatttggcggaggaggggaattccttcggccgccgctggaagataaaggagaaaaatatcatggaagaattagtaaagcagagcatcgaagaaatcaagccgtttctcaaaagagacggtggagatatcgaattcgtggaactcacgccggagaatgtggtaaaagtacgtttaaagggcgcatgccacggttgtcccggcgcacagctcactctccagacgatcgtcgagagaatcgtaaaagaagctgttcctgaagtgacaggtatcgaagcagtttaagcagaatcggagaaagatacaggggcgcttgtttcaggcagcccctgttgttgtcagaagggatatggtatgagatcaggcagcggaaatacagcaaacagcagaaaaggaaccacaaaaatattgatcggacttctgatcatcgtcgttatcacggctttctcagcctgcggcgccggaggcggcggggaagatgacggaaaaggcggaggatttctgaaaaaatcggaagagcccgtggatatcagcatcctgtgcgtgggagatgtgatggcgcattccacgaatatcactgcggctctcagtgcgggcggcggaaacagttacagttttacagataattatgaatacgtgagatcctacatagaagatgcggatttggctttgtgcaatgtagagactacattccggggaggacagcctcacggctatccgacattcaacgctccggatgagctggcgtacgctctggcggatgtggggtttgatgtgggcataaccagcaacaaccacatgatggataccggttttgacgggatgcagcggactctcgaggtcctgagaaatcaggggatgaccacggtgggcagccgttatgcgggggaagatacctggtctcttatcgagaagaacggactgaagatcgggttggtagcttatacttacgaatctccgatgacggcctccggcgccgtttctatcaacggaaattatgtttccaaagaggcggcggagctgatcaattcttttaatgcagatgagatggaagacgatctcggaaagatcatcgccgatatcaaatccgccaaggaggcaggagcggatatcgtggtctgttatatgcactggggcaacgaataccagagagaaccgaacgacgatcagatccgcctggctcagtctctggcggacggcggagcggatatcatcttcgcctcgcatccccacgtccttcagaaagtggatacactgaacgccgcggacggaaggaatgttccggtattttattctatgggtaactttatctccaatcagcgcacagagacgcttccgtccatcgcgaataaacgatatacagaacaggggatgatggctgtagtagatctcagcgtcatgaaaagtacgggagagattatcgagcagacggtgagggtgattcctacctgggtggatcgttacggcagtccggtgaaatattcgattattcctctggatcagaagatggattccaatgaagttctgaagacttccggccacctggacagggcaagggaggctctgagcgatatcgagacgctgatcggcgcggattacctgaacggaaagagtatgccgggaacgagcgcagggaattcagagggagaggaagcggcataaaggtcacatctttgcgtttgcctcggacgtatctgcggtctctgttccgggcgagcgggtttgaaggccgccgtttcctgaaatttgcgggcggagacatgccgctgtctgtatgcgcatgacgcgaaggatgaagatagatcggagtagaaaatgagagaaaatgactattttaaaaaaatagacacttatagagaagagatgatcgccgatctgcagcagctcattcgaaaagagagcacgcctcagattccggaggaaggggctcctttcggccggggggtggcggaagcttatgcttttatgatgaaactggcggagagggagggattttccgtctttgatgcggacggttacggaggccatatcgacttcggttcttcggaggaagacggaatcatggggattctgtgtcatctcgatgtggtagcggcaggcggaggatggagccgcgatcctttcggaggagatgtggaagacggccggatgtacggccggggaacattggatgataaggggccgactatcgcggccttttatgcgatgaaagctttgaaagactgcggcattcggccggaaaagaagatacggatgattctcggcctcgatgaagagacagagagcgccggcatgcgatattacaaggaacgggtgcgcatgcccgatttcgctatcgtacccgattccgattttcccctggttaacggggaaaaggggatcctgattttcgatcttgcaaaaaagatcggaaaaccggaaaaaggcggcgtatcgctgaagcggctctggggcggagaggctcccaatatggtgccggacagtgcgtcggctgtgatcacgtgcgaaagcggctatgaggctatccgtgctgccggaaaaaaattcgaagaagatacgggggatacggtggcgatgaaaaaccgcggaagaagtctggaaatttcctgtgcgggaaaatcgggccacggagctatgccttggaaagggcggaacgctatttctgttctgatgtgttttctgggaagaatcgattttaactgtgccggcgtcaacgattttatttctttctataacgagcacatcggtttcgatctggagggaggcgcgatcggctgcgctatggaagatgaaatctccggccgtctggtgtggaattccggcagaatcctcatggaaaaagaggttctttctctgacggtcaacgtgagagcgccgatcagtttctgcgatgaagacgtctacggagccatgagaccggttctcgagaaatacgatatcggtgtggtcaagagtctgtacaaaccgccgctgtattatccggcggacagcgagatcgtacagacgcttctgtccgtttaccgcgaacacaccggagacgaaaaatctcagccgctggtgatcggcggaggaacttatgccagagagatggaaaatgctatcgcctatggggccctgtatcctggagatccggatgtcatgcacgaggcggacgaatttatccgcatcgaccggctaattctcacatcgaagatttatgccgacgcgatttatcgtctgaccgtgcggtgacggactgcagaggccgcggcaggacctgtccgcggtggaagactgcgcgcagacagacggagctgaaaaaatcgaagcgataacggaaaaaacgcaggagaaaatataacatgcttttgaagataaaaaatgaagacgagacagagaggttcggcagagccctggcggatcagctgatgcccggagacatcgtctgtctcgtgggggacctgggaacgggcaagactgccctgacgaaagctgtcgcggcgggactgggaatcgaagaacatatcgttagccctacgtttaatatcgtcaaggaatatcgttccggcagactgcccctgtaccatttcgatgtatatcgcttgggcagttcggaagagctctttgagatcggcgccagggattatttttacggacagggagtctgtgtcatcgaatgggcggatctcatcgcggaagagattccgccgggaagccgtctgatccggatttcctacggagaagaagacggacagcgcatttatgatataggtacgacagaatgaaaatattagcaatcgatacggcgggggcgacagcctccgtctctgtgataaatgaaaaaaaagaaatctttacggaattatccgatgacagaatgagtcatcttcagatgctcatgcctgtggcggagcgaacgatggagaaagccggcgtaaaaaaagaggagatcacccatgtcgcggtggcggtcggtccgggatcttttaccgggatccgcatcgggatggctgcagccatgactctggcccaggcctgggatctgccgatggcggcggtgtcttctctgtcctgttatacttatgctttctccgaagagagagccctgatctgtccgatgatcgacgcacgtcacggtcaggttttctgcggagcatttttgtctgcggatgcgcagaacggcgagggatttctgccaaagaccgtaaaagaggaaaagcttcggaacggagcggaatttgcagagcagatggtctgtgccggagaaacggaagtctgcggtgatgcggaattcgagcggattattttctgcggcgacgctgcggaaaaatatgcttctcctgcagtgaaactcacggaatccatttttgcgagggaatctccgactgccgggcaagaaccggaggcagagaacagagggcactgcgatgaggagcgggagagcctcgaaacgaaagtgacacgggcggcaagaagtgtgatttccgatccggatccggagcgctatgcccgcgcggtagcgctgtcggcgtttcatcaggttcaggcgggccgcctggtatcctgtgaaacaatccgcccggtctatctcagaaagtcagaggcggaacgcaaactggaagcgaaagaactgggcaggaagaaaaaggacagagcggcggaggacattatttttgaacttcctcctgcagacgaggaaatcacctatcgtccggcagcggccggcgatgccgcagatgcggcttcgctggacaggctctgttttcggacgccttggagcctgtcgtcttttgaaggggaattgagcggcggaaaggacgcgatttatatcacggcgcgaaatagccgggacgagatcgtcgggttcgccggaatcgcttatgtgatggacgaaggagaagtgaaccgggtagcggttcatcctctttaccgcgccagaggaatcgcagatcggatgatggagctgcttctgactgcagcggagcaaaaaggaataaagactcagtttctggaagtcagagaatccaaccgtcaggctatcgcattgtacaaaaatcacggcttttccgtcatcggcaaacgggacggctattatgcggagacgggggaaaatgcgctgatcatgcgccgtgaataaaaatttacagttcctgtaatactaaagacagaaccgtcgacgtcagggtattacaggaggtgattcgatgttggcagaaaacggcagagccgattatgaaaatttcgaaaataatgcgggtgtgttcgatcatcagggcggatatgatgtctcctgtcactgcaggaattattcgccgaaaagcagcgccagaacgataaacatgggggattacagcagctgtgacagctgtaaccatctccgaagcgacagaaagtgcgggatagcacagcagacgctgtcgtagcatcatatcgtttccgcttcgacgggcggaatgcttttccggtgtctcgtgagggacgctgtccttcacggagccgggggaggcaaatgttcagcgctgtgcggaaacggtctgcactctctgatcaggcggactcgccggagttccgcttcgatttggatgttccgccggacgacagctgaagcagataagcagatttccgcgagaggaagttatctgtttcgacaaagaaaaatggagaacgaaatatgaaaaacggcagatttctcactctcggcatagagagcagctgtgatgagacagcggctgcggtattagctgatggaagagaagtatattcgaatatcatatcgtcgcagatcgatattcacacgctgtacggcggcgtggtacctgagatcgcgtcgagaaagcatctggaaaatattacgccggtgatctcccgggcgctttcggaggcgggcgtgaagatcgatgatatcgatctgatcggcgttactcacgggccgggtctcgtgggagctctgattatcggcgtggctgcggccaaggcgctgtcttttgcgaaagatatcccgctggtaggagttcatcatctccacggccatatcagcgccaattacatagccgctccgcagcttgtccccccttttacggcggtggtcgtatctggcggcaatacggatatcgtcgacgtcagagggtacaatgatttggaacttctgggcgcgaccagagacgatgcggcgggggaagccatggataaggtggcccgggttttagacctcggttatcccggcggaccgaagatcgacaagcttgcgaaagaaggcgatcctcatgcctatgaattcaaaagagttctgttggaaaaaggcagttatgatttcagtttcagcgggttaaaaaccggcgtgctgaatcatatcaacggcatgaaacagcggggagaagcgattcgcagagcggatatcgccgccagttttcagctggcggtgatggaagtgatcgtgcagaaagcagtgactgccgctcttgaattcggcagggataaattggccctggccggcggtgtggcggccaacagtcttctccgtaccatgatgcggcaggagtgcgaaaagcacggcatcaatttctttcgtccggagccggtgctctgcaccgacaatgcggccatgatcgcctgcgcggcctattaccgctaccgtgaagggtattctgatgatctgacgctggacgcctgcccggtgctggatttttagtacgggaagcgcaggaatggagaaaaaacggcctggagggaatcgctttggaacgccgcggaaaatgaggcggaaaggataagtgtgaagtcggtaaaacggcggaaaaaacggaccggaaggaaatgccgcagcatttccttccggtccgttttatgtatctgtgatctgttttttcttttgaatgacggtactttcgcgtctctatttgtttgcgatctgttcttcgatgaaatgtacgatatcgccgatgttcgcgaacttctccgcttcttcatccggaatttcgatttcgtattcatcttcgatcgccatgatgatctctacggcgtcgagagaatccgcttccaggtcttttgtgagacttgtgtccggagtgatcgcggatccgtctacatctaactgatcgataatgatttctttgactttatcaaataccatgtgttaacctcctatggttcattttccgttaagtacacgcctattataaggggcttgcagggggattgcaatacttttttgcgtgtttctgcaaaaatattttgatagacaaatgaaattgtagaactcattcgctcaggacagcccattcttcataggcgccggcaagctgctcttttttatccgcgattatgtcggagagttcggtgagtttcccatagtcggtcatatattcttcgaggcacattttctgattcagctcttcaatttcctcctccagaccggatatcagctgttccagggcttcgatccggcgctcttttcgtctctgctcggcctgaagagctttatttctgcgccgttcgtccatacgctgctgtttttccgtcacggatttttctgaggagacgtcagaatcggaggaagcctctttgcccagattgttcatataggcgctggcagatatgactgcggcttttttttcattataatagtcgtaattaccgggatagacggtgatgccttctttcgtcagttcatagatcgatgtgggaaccttattgagaagataccggtcgtgggatacgatgacgcaggtgccggggaagtcgagaagtgcgtcttcaaagacttcctttgacgcgatatccagatggttggtgggttcgtccaggatgagcacattggccccggacagcatcagcttcaacagagcgagccgcgcccgctcgccgccggacagcgcgctgatctgtttgaacacatcgtcgtttttaaagagaaatctgcccagcagacccctcagctgagtgtcgctgtacagagaataggcgtcgcgcatttcctctaaaacggtggaggtttcattgagcatggactgctgctggtcgtaatatccgaagacaatgttgtgtcccactttgatgtgaccggaggtaggcgggatctccgacataatcattttgagcagtgtggtttttcccgtgccgttgggaccgatgatacagatacgttcgccccgcttgatatcaaaggagacgttggaaaagagtgtgcgcttctcttcccccgtgccataagtcttcgcaatttcgaaggcctgcagggtatc

SEQ ID NO: 3656 - DNA, 21824 bp, Unknown
  16S sequences of unknown bacteria
aacacctcgccgtgctgaaaggggctcatcgtgccggggtcgatattgatataggggtcgagtttctgcgacgcaaccttatagccgcgcattttcaaaagtctgccgagcgaggccgccgtaatgcctttgcccaagcccgaaactacgccgcccgtcacaaaaatgtactttgtcatgattcttttatgctcccgtatgtgtttttataccttggtttataaattttcataaatcgacctcgcccgtaaatacgagcgtcgccgtccccgtcatatacaccgtgtctttcgtccagcggacgattagatctccgccgcgaaggtgcacgacgatatcctcgtcccttgcggcgtacccgttgagcacggccgcgacggcagccgagcacgcgcccgtgccgcacgcccacgtttcgccgctgccccgttcccagacccgcattttgatctcgttgccgcccaggacctgcacgaattccgtattcgtcctgtcggggaaaagcgcggcggtttcaaatttcgggccgactttttcaatctcgatctccgcggggtcgccgccgaacaccacgcagtgcggattgcccatggaaacgcaggtgatcgcatacctgccccctgcaatctccgtttcccgaccgacgaccgccttgccgcccagccggacggggatttgttcgggcgaaagcgaaggcgcgcccatgtccactttcacgctttgcgttttgccgttttcgacgtttaaaaagagagtcttgacgccgctcaaagtttctattttcagcgtcgtcttattcgtcttttgaaaatcgtacaggtacttgccgaggcagcggatagcgttgccgcacattttcccctcgctgccgtccgcgttgaacatacgcattttcgcgtctgcaagagcgctcgggcagatcagtacaatgccgtccccgccgattccgaaatggcgatcggacagcttcaacgccgccgcttcgggattttccaggggcgtatccagacagtcgaaatagatataatcgttgccgatgccgtgcatcttataaaatttgcgaagcatttttataattccttaactccgcgccccgataggctgcggaaagcgcaacgcccttcgcccgcaatcctctgtcctttccgggaatcggattaaaatccttctttccgaacgttcgcggaaaaagcgttccgacggcgcaagccgcagacaagaacgccgttcccgagatcgttttaggtttgttttcaatacatttccacgtaggcttcgcgttccgcgccgaccgacacgtacttgatgcgacaatcgcacgccttttcgatgaacgcgatatagtcgagcgccgctttgggcagatcttcctttttgcggcactgcgaaatatcggtattccagcccttcaccgtcttaaagacgggtttgcattcgtcgaggacgtcggtaaacggaaaatcctccacgagcttgccattcagctcataatcggtgcatacctctatttcttcatactccgacaatacgtcgagtttggtgagcgcgatctctttggcgccctgacagcggataccgtagcgggaagccacgacgtcgaagggtccgactcttctcggtctgcccgtcgccgcgccgtactcgccgccgagttttctcagcgtttccgctttctcgccgaaatactcggcggtaaagggtccttcgcccacgcaggtggaatacgccttcatgatgccgatggaattgtcgagctgtaagttgggcacgcccgcgccgatgggcgcgtacgccgcgatcgtcgaggacgaggaggtatagggatagatgccgaaatcgatgtcgcggagcgcgccgagctgcgcctcgaacatgatgttcttgccctctttatgcgctttgtcgagatatacgcccacatcgcagatatagggaacgagctgtctgccgtactcctcgaaataagcgatcatatcctccgctttgacgggctccgcgccgtaaccgccgacgatggtcagatttttccattccacgatgtctttgacgcgcttgtaaagaagctccttatttaaaagttcgcccatgcggaacgcctttttcaaaaatttgtccgcgtagataggcgcgatgcctcggcgggtggagccgaattttttgcccgcaagacggtcttcttcgaggcagtcctgcatgacgttatagggcatggtgatgacggcgcggtcgctgattttcaaattttcgggagtgatctcgatgcccgcggcgcggagcttttccatttctccgcacagatgctttatgtcgatgaccatgccgttgcccatgacgttgactactttttcgcgcaaaatcccggagggcaggagattgaggacaaatttgccccgttcgtttatcaccgtgtgcccggcgttgtttccgccctgatagcggcagacgacgtcgaatttttcgcagagcaaatcgaccattcttcccttgccttcgtcgccccaattgataccgcaaatagatgtaagcattttctttctccttttgcattactcttcacagcgcatggaaaacacgaaaaacagagcatttccgattttcacggctcaatgcccgccttttcccttattaaccatacgccttattatacttcattttttttattatgtcaagcctgcgggcatacggaaaaacctttccgccaaaaattattttttcctgtttttgtcactccattctgtgccgtttcccgcggggtgcttttccagccattccgctctcgcgttttccaagcgctttttcttcttctttttgttccttttctcggtctttttttgttccttgtcgtctattgcgatcccctttttccgcaaaaacgctttcatttcttcatagccgaaataatcttcgttcgccttgaaaacgacctttccgcccttgtcgtatatttttattttttccaaattagacgcatagcgaacgctaagcgacgctctcgtaactccgcgccatattttcagggcggaaagttcttcatagcggtatgtttttttgcaaaataccgagcgtatttccgccttatccctgaaaaaagcgcggttgaacacgggataaatctcaaatcccccccatgcgaacaacggcagagaaataagataaatcatttccgcgcctttcgtgccgataaagaaaccgattactccgaaaacggacagcagcgccgcgagaagaagccaggcgccgcctatcaggaaaaagaactttccgccgcggcaaaacactgctttttcctctttggttttgcaaagacttatgcgggcggcggcgagcgctcctgcggaaagaaaaattatgacgacggatacgataagtcccaaaattccccgaaacatttttcacctctcccgatttttaaacgcactttccgcgacagcgatttaaggacggcaggttttattgacaagacttagccgcgcgccctttccgatccacgttttttatggatattttcacgacagaagtcgaaaaacagacaaaaaacaaaattcagcttttcgacatttgtcctctttattttatcatgcaccccctcaaaaagcaagtctttcgcctgtttttcacctgtcccaccgattattttcgtctacccccttgacaaatcgtgaaaaatgcggtatgataataggaaaataacggcggtctgtaaaacgccgtaaaggaggaatacctatgtattgtagacaatgcggagaaaaactcaccctcagattttgcgaaaacgagggattggtgccctattgcgacaaatgcgaagcgtatatatttcctcaattcaatgttgccgtgtcgatggttgtcaccaaccgcgctcaggataaaattttgcttgcaaaacacgttgaagacgaagatttcatactctttgcgggatatatcaaaaagggcgaaaacgcggaaaaaaccgtgccccgggaaatcaaggaagaactcggcttaaacgtcgtgaaggcgaagtatatgtcctcgcgctatcatgcgcagagggacgttctcatgctcaatttcatcgtcgtcgtcgaagacacccccatcaaactcaaagaggacgagatttcggaagcgagatggtgcacgcccgacgaggctttaaaactgatcagaaaaggcaccaccgccgaatttttcctcatcaacgccgtcaaggaattgaagagaaaaatttaaaagcgccctgtctgtcttttcgtaaacgcttcccttacgttctctttttccctatcggctttctatcgtatcgcggagatctttatggataaaaatagaaaaatcgcccgatttttgccctttattctgatgacaatcggtttagcgcttcttctcctctctttcttcggatgttcggcaaccgtggaaacggcggaggaaccgcggggcaatcacgagaaaacagttcgtttgtatatcgacgattcaaaaagtctttatagatttatagagggtaaagtgaccgtggagttttcaaccggcgaagttttttcggcggtagtcgccgcgaacagagtcaaccaaaaatatgtaaactatgacgcgacggtcgtcgccgcaaaaatcgaagacgcaaaatacgcgaacggaacgccgcgggcgttcggaatcggctgtatttgcttcggagtattttggctgatcaataataagctccttcaaaaatcgaaataaacggtatcttttaaagcggtacggcaatgcgcccgtaccgcttttttcttatattttattcaggagccttttccctatcctgcgctttgttttttcgcgcggagattcacacgccgtataaatacgttcttcccataatagacgggaggaattattatccctcccgtttcgtcttccgtcgtttttttcgtcgccctttctgtccctgcacgcttagtcggacgccgtcagcctgatattggagaacaccgtccccgcgacctccgaatacagtcccagaacgccgcccgcaagctgatggacgggaacgactttggcttcctccgttccgaccctcaaagtgaactccgtgccgtcgtaggcgagggtgtaatgcacggtcaagccctttgccatggtttctccgttttggatctgttgagcgttttcccaatcgaatcccacgcttccgtcgccgttcaagaatttggcgaacgtgacgaagatgccacccgcgtatcttcccgatacatagtataacgagctgtggatgtctactttttcggtcgaagcgccccatattaccccgcacagcgtcccgaaggcgtaattgtcgtcggacggcaccatcatgtcccattccagcgttcccgtcgtgaacgaaaggtctttaaacgtgagaacggcgcagtcggaaagcgctttataggacacgttttctcccgttttggaaaattcccactgcgtgccgttgcagacggtcacgcccgcgtatacgtacgttttaggcgtcaccgtaatattggaaaacgccgtgcccttcacttcgctgtaaagtcctatatattttcccgagctctccctctgcggctgaaaagacaccgtattgccgtcaaaggtgagggagagaatacggttgacgttatcccattccaggcggaaccgataagtgacgcccgcggtgcaggtgatgagcggcggcgacaacttggcgccgtcctcccagaagaattctccgtttcgcttgcagtagccgacgaattcgccggtgaacgctctgccgaagacgtaatagctgtccgtttcctccgagcttatcactcgttgattgggcgaggcgaacaggaggccgcaggttgtattatgtttataggtatccgtcggcacgttcatgtcccattcgataacgccgccttcgaattcccaatttttgaacatgagaatcgccgcttcttccgtccgggaagtatagactcccgccgccttgtcgagcgtccacccgtcttcgcccccgatcccgtacacggcgtccgcctttacggacccttcggtgtaaatcttgtcgggattcacctcctgacagcgggtacagatcccgtccacataatcgtgtcccagcttttctattttttccgtttccgtttcgcggcagcgcgaacattcccgttcccgttctccgtcttccgtacacgaagcctctttcgtcgccttccactccccgtagttgtgtccgagcgcggggatcaccctcgtatcgtactctccgcaggcgcagtcccgccgttcctcccccgcttccgtacacgccgcttccctgtatacgtaccaagctccgtacgcatgggtatgcgcggcggaagataccgagcttgacgcagattccgcttcgctgtccgaattttgcgagccgctcgcctgtccgccgcttgcggacgaaacgtttgggcttgacgcaaagcttccctccccgcccgacgcgccctgaccgttcccgcaggaataagccgtacagcacataaagaccgccgccgccaacgcgaatatttttaagattctcctcatcgtcttttcccctcctttttactccgaaacctttttactctttgaaaaaagccagtcgatcagttcttcttccgcatacatccaatttcccacgccgtgccccgcgccgcggcagacggtgaatttcatatccgccccgcccgcgtccccgtacgcggaaacgatcttacagatatcgtcatacgacaccaacggatcggcgtcgcccatgaacagccagacgggcacctccttgaatttgtacgccgaatcgggatctcccgccccgctgcatacgattgccgccgcgaatttttcaggcgtttgggagagcagataccacgacgccatcgtccccctcgaatatcccgtcagatagactttggattcgtccacccttaaatgcgcgatacattcgtccagcagcttttccgcggcgaggagatgcgcgctcggcgccgcgtcgtccatggaataactccgatagggatagacgacgttcgcgtcgttgggaacgatcagccagggcgagggcgcggcgggaacgatgacgatacattcgcctttctccaccaaagcgcggcgcaccgtcaccgcttcttcgccaagcaggatcttctccacgctctgtccgttagagccgtccccgtgcaggaacatcatcagcggatattttttcgcagcgtcgtaatcgtcgggaataaaaatctgaaagggcagagaagtcttgccgtccagatatctaaactcgttccatccgccttccaagacggattcctccgcggaaaacacttccgcttgcccgcccgcgggaggcagattatcgggatctttcatggcaaattctccttcattgtttttataggtcacgatttcctttctcgttaaggcgcggtcgaatatgtaaagatcgtcgatcccgcccgagaagcaaagaatcccgtccccgaatccgccgatatacaagggggaattttgaatgtctatcccctcgcaggaaacttcggcgacgaggacggcgttgagatacatggcatacgtttccccgtcgtaggtgagagccaaatgataccaatccttatccgcgcctttgggaatcggataaaaagtacagacgttgaaagacgtgacgcagagttgattatgatagatcatcagccgcgtatcgctgatgttttcgtaactgccccagcccgccgccacgtgttcgctctgcggcgtgatgccgccgtaatccagctttatccaggcgcagatgctgtgcgcggcgtttcctgtcggcagcttagcgggagcaaaggagaggaaggaggcgccgtccgaaagcgccagcgcgctgtcgtttttgcccgccgtccgctgcggttccccgtaagcatacgtcgctttcccgctcaccagatcgtaaaagttgccgtttgcgtccaagccgtcgaaagaaaaataggcgagcggcgcgtctttgtcgacctcggaagattgagattcccgcagggaatcgctccccgaaaggttctcccctccgctctcttttcccgccgcacagccgaacgcaaaaaacatcagagccgcggtcagaaaagagatcagcccttgtaaaaattttttttgtttcatctttatcctcctgagataagtatacatccctttcggatttttttctatcggcttttagctaacttttcctaaaaatgtccatttttaaaattttttgcaaaatataaaatgtagaaactgccgaaaaaaggaatttttctgtttttcggtctttaagaaaagggacaggaaaaggtttttgaaaaggaactctttttattccgatcttttaaaggcgcatacgcggctctcctgtccgcggcggatcacgcgggcacggcggccaagaaaaaaagaccttccgaaaggaaagtccccattaaagagccgcttcgagaatccgcggggcgctcatccgtttatttgcctctttcccggctcgcttttctgtaatttttcggcgacattcccacctcatgggaaaaggcggcgtaaaaactgcccgtggaattgaagcccgattcgaggcagatgtcgagaatgctcttatccgtcttttcgagaagctctttggcgttctccacccgaaaaagaagtttctgaccgttaaacgttctgccgtaaagcttttggcagatacggttgatctgcctgggacagaggaagaccttttccgaaagttccttcgcggaaatatccgtggtgtaatgatagaggagagcgttgccgatgacgtctttgacgtttttattttcgacggccccctgttctttggcgagagatagggaaagcctatccgcaagcctttcgaaaagataaaggacgatgttcgtaaaagccgcgcgctgacgatacgcgcttccccagcgtccgatcgaggaagcgaactgacggcagtaagcgcccaaaggcgaagcgccttcccggatctcgtagtccagcttgcccaaagcctgaaaaaacgtatcgtacatattatccgactcgccgcgttttttgatgaaggtaaagccgaatttaaaggcgcggcagttctctatgccgcgtaccttatgttcgcacgcgggcgtttcgatgataaatcctccgctttttatcgccctctcaaagccctccgtttcaaaaatcgcttctccgtcctcgatatagacgacttcgtaatagttgtgtctatggcggggcttgctctcttcctcgatatttttttcgggcagagggtaagaaacatagagcacaaaaaattccgcgtttccgatctggcacgtaaattccacgtccgcggtgttgacgatctcctttgtcctctctttcatctttttcccctttcgtaagttttcatcggcatacagaagcaatcgttccgcggaaaaatccttctccgcggaacgccaacgcatacctgcctgcccgcttttatcggagcgttcgataaaagccgcgccgagctttctgtaagctcttttccgcttattccttgtgctcggtgatctttttcaatttttccgtatcgaatttaggcgtacggtcgggatagagcaggccgttcacttcctgctgtacgtcggtgagctgggtatagcaaaatccctggaactccttagaagcatagatgccgtccatgagattgcgatagcgggagagaaactcctcctgcgtgcccgcgcccgtgttgtagccccagttgccgtccgtcgcttcgccgcgcatggcgatgccgccgaattccgtcaacagcacgggctgccccgcatacgcgcagccgtacgccatgagtttgcgtccctgcggatacagggcgtcgtagttttcaggctgatatttttcctcgaaacgcgagctgtcgtaggcatagtcgtgaatggctaaaatatcggtggcgtcgggattttcccagccgtcgttgccgctcaccaggcggcttggatccaccgtcttggtaagatagtacagcgtgcgcgcaaagttctgctgcgcgtcgtccacgagtatctttctgaccccccagctctcgttcaagggcacatagcagatagtggaggtgaaattgcgcgccacggcaaggatctcctgccactccttcgtgatcgccgccacttcgtccgcgttgaaattgtaagcggacggcatttcgcaccaggtcaaaaagcccagctcttccgcgtaataatagaagtacggatcttcgaatttctgatgttttctcgcgccgttatagcccatcgccttggaaagctcgatgtcctttttgagcgcctccgcggaagggggcgtgatcccgctctccttccaatacccctgatcgaggatcagccgctgatagaggcgcacgttgttgaggcagatctgtccgtccgcatccacggaaattttccgcattccgaaacgggtatgcgcttcgtccacgcgttttccgcccttatacagtctgaaatcgacatagaaaagattggggtgttcgggcgtccaataaaaggattcgtcgacaaaatccagttccatcagacggacggtgtagcgggtatgcagtccgtccaaagaaaaacgctgttttttgacggggttgctgcgataatacacgataatttccgcctcatccgcctcgccgtacagcgtcttgatctcgcccgagaaggaacaggtgtccacgtcggggatcagcgaatagctctcgatacagtccgcgccgaaaaattccagccagacgctctgccagatacccgtgttgggaagataccagcaggcgaagggcgatcccgtccagctttgcttgcctcgggggatcgtcggatcgagcggatcgaaacagcgcaccaccacgacgttttcgccgcgacgggtcaaacaatccgtgacgtcggcggaaaaaggagcaaacgcgcccgtatgcgaggcggcgtgaatgccgttcacccaaacgtccgtcacgtaatcgcagccgttaaaacacagcagcgcacgcctgcccttaaaattttccacggtaaatttgcggcggtaccaaacgacgccgtgcgcgctttcgtccgcaattccgctcgcttcgtattgataggaaaaaggcacgttgatgcgtttatcgaacgcctgtctgcccgtcggatatccttttttaatgcccgcgttttcgtcgtcgaaggcgaactcccattcgccgtttaagggaagccaatcgtcccgacggaattggggacggggatattccgttctctgatagtccatgataactccttttttctctctttttatatgtttttttaagcgcgtccgcatccgcggcaggcaggaatgtcgaggacgatttttcgtaagacaaggcgcgcgccgtcaaattcacaaagcgccgacgggcagcgaagcagtacggaaaatttgtcaaaagactcccctttcgcgttatgggaacacaccataaggttcgcgccgccttatccttcgacaagccgcgcatacagtggatatgcaccttaaaaattttaacattttcgataaaaaatgtctatctttttaaggtgcatacgctttctcaactgttattttcggtcatttcttttacctcaaagggtaaaaattccaatcttttattgcttgaaggaagaaatatccgtcgttgcggaatagttctgcacggtgacgcccgtcgtgaaggtgagcactgcggctacggaagaatccgattcgccgaaaccgcggacatccgtcaccgtaaagacaagctcgtcgttgacgtacagtttgaaagttttgccgtccctcaacataccgagtttaacgtatttcccgtccttatagctgccgaggttgacggccttttccgcatttaacgaagtgccccatccccaatcgccgttgttgttgcgggaaacatagccgacccgctgcgcggtgtaattgcccgaaccgtcgatatagaagaagaaggtgttgccgcccactctcgccgcaagtccgaacttaggatacgcgtcgccgagatctttcgtaacggtgatctccgtttcggtgtagaaagaggtgctgttgatgttcttgaaatacgcgtactgatcgcccgtagacgtctgtacggcaatcgggttttcgccgcggtcgttcgtgatgtcccagccgctggtggaagtaaagttgcccgctttgccgaacgtttcgcccgaaatgctgtccgcatatttacggctcatctcttcgatgaccgcttcgtccgccgtcgcggaataattcttgatcttcatcggcgtattgaaggaaaggaatccgaccgccgctttttgatctttatcgaaaatattgaaactgtcgtaatagatcgccactttatcgttgcagatgagatagaactcgttgccctttctcaaaacgcccattttcacgtaattgtcgttcgtgtacttaatcccgtccacggtgacgagctgttccgaagcgttccagtcccaattggtattatccagcgttctctgcgcgcatcccaccaccgtattggtgtagttcacggcgtctacatagtagaaaatggtattggtgtaatcgtcgtcgcagctcatcgcaatcccgaacttaggatatttatcccccgagaagggctgaccggaagtgacggtgatctccgcctccgcatagaaagaagtggaatatacgtccttgaaataagcgaactgatcggctacgcctttctgtaaaatataggcgtcgtccgttccgtcgtcgtgcaatacgtcatagccgtaattagtggagagctcggtgccgggcaccgttccgaagttctggctgtccacgacgatgtgggaagggccgtattcggcgttcgtataggaatacgccttaaattcgtccactccgtcgcagggcgcgtccttgccgagcacgatgatctctccgagcgccagatgctccgcgtcggtcgccgaactgacggtgatggtgatcgacttcacgggcatttcgttgaattccgcgatggcggctccgcccggacgcatgaactcgaaatcgagttcggcgttccaatcccagtcgaagggaaggttctcgatgacggcggtcgcggtcgagccgtccgctctcttgtattcgaattccactttggaaacgtccacaaacgtttccgcataatcgtaagagttatagatcatcagcccgcggaccgtcttgaaatcgtcccattcgagcttgatcgtagaagtgccgcccttggcggtatactcttccgcgaggtcgaactcctgatatttgatcatttcgtcggtgagcagtttgacgtcgctgtccgcgtcggtattgtccgccgtcaccgtcgcgtcgggcgcgatattcttatatcccgaaaggaattcgggaaggggctgcaccgaccacgtagggccgttcgtgtgcatgacgttctcgccctgagcgtttttcgtccacaccactctgtccacggccagcgctctgccgccgttgatgctgttgcggtccttaaaggtatgataagcgatgaacagctcgtcgccgcactgaatgaagctgtggtgtcccgcgctgacgatatggttccagttgcccgtatccgtggaaatgaccttgccgccgtcgtcgggagatactttcgtgaactctcccaaggggctgtccgcgatggcctgcttcacctgatagttagggtccgtatagccgtagacgctgatggtcatataatatttgccttcatgatagatcatgaaaggaccttcgttgacgccgccctcgttgaccttttggctgttctcgccatccatacccgcttttacggtgttatagccggggtaggtaagctccaccatcgtcgtataatcgggcgtaaaccagtctttcatcttcatgccgtaaacgaaagagccttcgccgtaatcgttgtaatagctaaaatacagatacttatctcccgatacgggatcgaggaacgggctcgcgtcgagagcgtgcgtgcgcgcaaagccgggattctttttctccatttccgcgatgacgggattgttcgtcgtcacgtcgaatacgggttttcccgcggagagcaggttgccgtcggcgtcctttcttccgtcgggggacacgaagggaccgtcgggcgtcgaagagtaagccaccgacaggcagagcctgttgttcgcatactgattataggcgttatagaacatataatacagcttcgcctcggcatcgtaaatgacttcgggcgcccaatagttattgacggcccacgccacttcgtaatcgggctggaaggcgatccccgtgcattcccaatgggaaagatccttggaacgccaggactgaatgccgtgacagccgatctcgtcgctcgtcccgtaggcatagaaatatccttcgtctttgccctccgaaacatagatgacggaagggtcggcaatctggaattcaagcgtattgacgtaaaagagattgctgttatagcccgcgcttacgttttcctctttgctcagcatttcggaattgtaggtatcttctttgagcgtcaccgttttcggctttttgtcgcggctgccgcaagaggaaaggatactgcccgtaaagctgagagcgaggagaagggaaagcactctgaattgttttctcataaagtcctccttaattgactgaatgattattgtttgattccgctggcagcaatcccttcgatgaagtaatcctgcgcgacgaaatagatgatgagggtaggcaccagcgcggcgaccgttcccgccatgacgacgttgggttcatccgcataagtgctggcaaacactttcagcgccacctgcaagttgtataaatcggaggattgcagataaatcaacggtccgaaatagtcgttatagccgccgataaatcccaaaagtccctgcgcgagcaacgcgggtacggaaagcggcaccatgattttgaagaaaatgccgataaagccgacgccgtccagtttggcggcttcgatgatgctgtcggggattcccgagaaaaactgccgcatgaagaacacgcacgccgccgcgccgaacatacccgggatcatcaacggaagcggagtatccacccagccgatggcgtcgtagatagagaactgaggcgcaatcgtgatggtgccgggaatcatcatcgtggcaagcagcaggctatacataatgccctttgcgcggaagcggagcttcgaaaaggcgtaagccgaaatcgaagaggcaaaaagccctatcagcgtcggaggaaggatatacatcagggtattcaaaaaactctgtatcaaagtagggagcgcattgtccatatttccccgatacgtgaatacctgtctgtatccgtccaagacgaatcccccttccgggatccactcgaaggtgagcgacgaggcgtcctgccacgtcttgaaagacgttaaaataatgatggagaagggaaagataatgacgatcgcatacagtatgagcaccgcatagacgcacactcttcccccgatgcgttttgccttggattttttaatattcgcagccatggtatcaggctgattattcatgattttctcagtcataattcacccactttttagatccccagaactggaacgccgtcacgagcataatcatgagcgccaaaatccaagcgctggcgctggcttcgcccatcgttcccacatagctgaacacgcggcggtagagatagaacacgatggtgatgccgtccccgttaggtccgccctcggtggcgaggacgttcgtgacagcaaacgactgcaaggctccgataacccccatcaccagcaaatagaagctcgtgggagaaatagagggaagcaccacgttccagaaggtgcggaacgcgccggcgccgtctatcttcgccgcttccaccatcgattgattgacgcccgtaagcgccgccgtatagaggatgatgccgaagcccatgcccgaccatacgctcataatgatgactgcccaggtgaaaaagtcggaatctcccagccaatcgatggcgttgtcgcccgtttttccgagcatctgattgatgatgccgtagtttgtgttaaacatatatttccacatcaacgtcaccgcgaccaccgagcagacgtagggaacgaaatagatcattctgaacgcttttttggcgcggatcggcttgctgaggaaataagcgataatcaaggcaagcacctgactgatgagcgtactcgtgcccatccacagggtgttcaccaccgagtcccaaaacatgggatcggtaagcacggttttaaagttttccaatcctgcccactccgctccttcgaagccgaagtcctgcattttcatgaatgccatcgccatcgccagcacgaggggcacaagaccgaaaatcaaaaatcctatcaggggtatggaagcgagagcggtgcccgctatctcttctttattagtgcgccttttcggaggctgtcttacgggaagagcgactctcgcctctcctccctgattttcagccgcggacgcaatgcgttccgaatccattccatcatcctcctttctttaaaaagccgcgaaaattatttctttgtataatttttaagaagttcccaggtcttcaaatacttcgaatctttttcaaagtcggaaagcgtcttattgccgtttctgacgtcgccgttcaaaacgcccgcccagtcgtcgatccacttcttatcttcgagataccaccagtcgccgggagtttcgtattccgccgcgcggacgaagacgatggagtttttgggattttgattgctctgcaagaatacttcgctgtttgcgagctctttctgggaagggatcgcaaagcccgattccgcctgcgcggtctgtcccgtcttgccgccgatgaattccgcgaatttccatgccgcgttcttcttcgtcgatttcgcgttgatgcaaagcgctacgctgcccgaatgtcccgcttcgatgccgtgaacgataatatctccgttttcgtcgtactctttatactgaggaaggggagccacgtcccaaaggtatttgccgtccatctgctttctgaaattgacgacgttccatctgccgtccaccagcataccgaggtttccctttgcgaaagcagccgtcttgcccgagtcgccgcccaaagaggtaggcgacgggcagatgccgtaacctttaagaccggattccacttccacggtggatttctgaccgatacggacgaattccacgaacgcttctctctgagaaggaagctcgttgagctttccgctttccgccgcggccttgacttccggacgtacagtctttttggaggctttggtatccaccagcttatccgcccagtcaatgatctcgcccgcgtcgtaatgattgccgtttacgtcgtagccggccgtattgtcgtcggcgacgatgtagtttttggtgttgtccatcagggtgaaatcccaatagccgccgttgtacgccgtgtcgtccgtttcgacgtattcgatacagtcgccgcccaccgaccagccgtaattgaaccaccattccgtaaagtagccgtaaatgttgtcgttcttatgcttcgtgcgcgcctcggtctgcaccagcgtggaaagagtaacgcactcgtcccagctcatggggacctggttgttaaaccatttcttgccgtccagctcgaaatagcccttttccttgacctcccccgtaattccgtaatccgctttggtctttccgcgggaatctttttcgccgttattaaagtcttcgagatcgtccgcagcaacgctgatgacagtcacacccgcctcgttaaaatacgtttcgttataatagatgacggtgggaccgatatccttggggattccccaataatgagagtcaggcccctcctgcgtcgtcgtgttgacgtcgtatttgaaacggttgacggaagtttcccacatatcctcgatgactacttcctgactcgtcgcaagatagttgtcgaggggttcgagatagccgagcttcgcataagctttaaagtcggcatcacctacgtacagaatatctactttcgccttgctctgacggagagccaaacgcgcgctttcgctgtaattgtcgttggatttcgtttcgtagtttactttgatgacgcccgcattcttagcgttgaattcttccaccaatttgcggaacacggaaatttcgttgtcgtcgccgtacccccagaaagtaatcgtcgtttctcctccggggccgggacgaatattgccggacgaatccaattcgatgtcgcctctgccgccgtcgccgccgcaggcggtaagccccgtcgatacgagaagcgcggagagcaacagagccgtaagtttagctgatttcctcataatctaactccttttatactggttttgaatttttctcccgctctcgccctttcggcaagggcgggagaaaacaaactcttattttttagccgatcgtaaattctttacgcctttctgttgatgacggtgttgcggacataatcctgccacgtatccgtcaccgcgccgtacagctgtccgcccatatcgagcttcatagaggcagtttcggaggtcacatttataaggtgttcgttggcgataaatacttctatcgtccaggtgtcttccgtttcgccgtccgcatagttcatcgccgcgtcggtgatataaccggtatgatacaggttgccgccgaacgtcatgactctcgccgcgcgcgtattgctgttctcatttgcaaagaattccaaattggtattcttccaccaatcgcctgccgtatttgttcctgttacatcgatggaagcttctttgacttccatggcaaaatacagaccgtcgttgccgaggaacgccgaataagtcgccgtaacacctgctttaacgtttgccgccgtaaaggtttcgtctttccagtcggaaatatcgccgtcgatcgtcttgatgctgcccgtcctgatgccgttcttcgtcacgataatgttaggcataccgggatccgcttccgcgccgtaccagaagtcgccgccgccccaagcgaagccggtttcaccgcccgtcttccaggcaaagcccataaacgtttgaaggtcgctcttatctaaaccgtcaatacaggaataagagataaagagttccgccttggtatggtgcttaccgttttccgttgtagaaataaatttagaagcattgatctgtcgggcagaaaattcccaacgggaattaagccccgccgcgtccgcgaaacgctgcaaattgtccttgaatttaagttcgagattggtgttgttaaaccattcgggcttatcggtaatatagctgttatgaattacgtcgtagaacacatagatgccgtcggactccatcgtcgcgtaaatggtgacgcttctgccgtcggttgcgggaatcacgtaaggattcgctttctgcgcgtccgtccagtcgcttatatcgccgtccacagtcttggtcgtttcgtaaatcttcatggaatcgagcttggtttttaaagcggcggcatccgtaatgacgagcccgtcttttgcatacatttccatattaaagttaaatacggatacggcggctttggtatcggctcccataacgcctataaggcaattgaccactttcccgtccgcaataaaccaaagatctgcccctactttggctatcgccatggttttaaagctgccgtccgtcttataatcgtagctgacgccgttcgcgtacttgtcgggatactgattgttataggtccattggaaagcgccgaaacaaccgccccagtcccaatctcttttgattgtgtccatacgattatagacctgcgaccagccgttgatatacttttctttattgtcgttcttattcgcgtcgagcgcccagaaccaagttccttccgtcgtgcgcactgccaatcccgctttggcaaaatcgtcgggggcagtcaatcccgccacggaaattttcacttccgcatagaagtccgcggcgtaaaggtcgctgaggaagatctgagattccgctttgcccgtattatgcgccgtgccttccgcgtcaaacgtccagccgccgctgtacgagaacgcgggagcgccctccgccgtcacgtcgccgagtccgttcttgctcgccgtgcgctgaatgccgagcgccttatagatctcgcggttgagcaccgcatagccgtccacgccgtaatgcagtccgtccgcattgaaccagctcatcgtggagcctttttcgttcgcggtgatatactgcgccatgtcgataaagttgagtttgggatcgtcctgggcaagcgccttcatgtgcgcgttaaccttgtcgtattccgcccatttgttctggaacatcatgttgtgcacgagtccgacatagtaaatattcgtttcggggaaagccgtctgataggcgtcgatcagcgcgtccaatctcccgatggtcgtttcgcccgtcgtattgccgtcgtcgatgtcgttgacgccgatgtggatgacgatgttcttgggatcgtacatctgctttatggtttccaccatgctcatccaataggaggtcttggttccgccgacgccctcgttcgcagccgaaagggtgccgaacacgttgtcgtaggtataccagaacgccgtgtcgatatagctgtcgccgaggaacagataatcttttgcttcggtgacgatcttatactcgtcgagtttagagggatccgtttccagcgagtattccttcacgtccatcgtaatgttgaaggaagcgagtccgagatacgcttcttcgtccgtcccgatgccgcaggataccatcttgacgagctgatcgttcgcatacagcttgtaaacgccgccctgacgatagatgccgagcgtgatatagccgctgcccgtatactgcgccgaagtgccgccgagggtgccgatgttagaccagttgccgtcccactttccgtccgtgcgggtattgaagccgagagaaacggaattttcattgaacgcctttccgtccgcgctcgccgcgtccacgtagaagaggaatccgtcctgaccgtccgccgacgtcatgataaggccgaacttaccccacttttcgccgttgagaagttctttgacgttgatcttcgcttccccgtagaacgtggtcttattggagccgtgcatatagatatagttgtccaaattgtccacgcccgtcatggaaatatgcgcgttttccgtgccgtcgtcgttttcgatattccatacggaggaggctttcagactgccgccgtcgccccataccatgccgtactgaacatagggattcgccgcataggtattgtccgccgtgatcgccataaaggtatggatattcttatagtccgtgtgataggtggtgtcgtagacggtcttcaaatccacggcgtttttcgcgttcgtgatgccgaggcagaccgccgcgtccttcttctccttcgtcgcttcgatcgcggcgtagggcacggaaatgttcagataatatccgtccacggcggtgcccgtgagggtaaacgccgtcgctttcgccgtaacgccggaatcggtcacctgcgcattggtagaaaggtttttcacctgaaagtcgcccgtagcgtccacgaccaccgagatcgtatgctcggaatatcccttcacccgctgcactttggtgagcaggagttccaccccgtcgttgttgtagagtccgccctgcgtatagatcgtcgcgtcctccacgtacacggtaaactccatcgcgttctcgccgtaaacggcaaaccagctcgctgtggcggtgg

SEQ ID NO: 3657 - DNA, 8934 bp, Unknown
  16S sequences of unknown bacteria
cttctcagggggattctcgccttcatacacataaccgcaaacagagcagacccattttttcataattgtttcctccttaaaaattctgtttcaaaatccattgtcaaagaaataagtatataatattcagagccgcagccaaatgctgccactcaaatatccttgtttttacagcgtgcacaaacgccgcggaaaagcatttcgctacgttggacggtacagccatactgctgctccagctcctggcggagatcatcacagggcgcatcgacatcgatcactgcgtcacattgttcgcagataaaatgcgcatgcggttccgtgacagcgtccagccgctccacaccgtgaactgtcgccacacagacgatctctccgctttcacggaaaagcgccaaattacggtacacagtgccgaggcttagatccggatgctccggtttcaactgcgtatagatccattccgccgagggatgcagatgactacggcgaatgcagctgagaattgcatcacgctttttgctgtgtcggcgcatggtcgacatggttgttctcctttcgtccataatcaataacaattatcgttatttatattatagctttatccggaaaaatgtcaaccccttttttcatttttttcgcacggattccagaggcgagaacggcacagcgctccgaaacacaaaagcgtccggagcactgtgccgttttactgcgccgcatggaacgcggcggccgaaagcagtcttttatgtctgctgaaataccatgccgtacggcaggccggggatcacaatcaccacgctgtccaccccgcttaaatcggtcagcatggccgtaaagccagggatgtcatcacattgcatgttgtaatacctatcttcctcatcgcttttgctttgattgaaactccacctgcattcataggccagatcgtcccctatttgcaacgtcgccgacccatctttgcggaattcgacgaagtagccggcgttgcgcggggcgatctgcgtgctttccgtgtcactgtcgtacaccgcatacatctcccagtggcctatcacaggctccgcctttgcgccaccacccagcagggcaagggccgcaatgcagataaccgccagcgccacaaccacagcggcgattacgatcccctttgtttttccggcgggaggcgcagaattcaccgacgcggccggcggcatctggtccgccaggacggggggcgccgcaggagcgggctgttccgccgcgggcggcgcttctgccccggcaggcgccgccgcaccggccggttctgccgctgcagaaacgtccgcaaccgccggctcttccgccacaggggcggttgccgcgccgcactttccgcaaaaagcggcatcgtccggcagcaaagcaccacattttttacaatacatttcaattctcctctctttttcaatcaatgaaaacgaccagctcagagaactgtgtcgcaatcaataatggatacggaacattcgcgaatccgataatcctctggaacggacaggcggaacgtcgccgattctcccggagccagtccctccgaccccaccgcataagtccagtcggtatccagcacggtatccgaactgtcccggaacgttcccttgagtttgacgaactcataggtataaacgcccacgttggtaactgttccggtggccaccgtgtagcttccccgctccgtgatacggacgttggagatctcgatctgcgcaggcagggaagccggatccacactccggtggatcgcgcagtacttcccgttggtacggcagttggtgcagccggcactcaggcagacgtgcgcgctgcaataacggccgtattccgcccggccggcgcagccggaaaccgcacagcgggcagtgttctgccacaacagcaccccggcgccgaacactatcaccaccgccagcgccgccgccagccaatagcgccgtagcaacgccagccccttttccgcagttccctcccagtccatgctcttccccgcagcactgctcccggtacgctccggcgggcggcacggatggccgcaacggtggcagaagcgcgccccgggggacaggcgtgcgccgcagcggcagcaaaaagaatccatcatacgccgcctttccggcggtcaaacatccgcccgatcgcacggcaagcaatcaaaatacctgtcaggaccatcagcacggacagaattctggccaggatccccagcagccggaccgcagcctgaatgcctccgtaggtataggtatagaaatccgcaccaaaggacgcgctatcaaccgaaatgccggaagcagcaaaaaaggaaagcccggccacaataaaaattgcgccgacaaccgcctcgatgccatcaaataccactggaccaaactgcagggactgcggcttctttgcgctttctgccgcagcctgttccagattcccctcctgcaccgcagcacagtcctgtgccgaagcctctgcggcttcacctcgcaccgccgtgccgcagagcgggcagaaatccgcctcggaaggcagctttgccccacactgtctgcattccataaaactctctccttctttcactatatttttatagttttgtatatactatataattatagtctattaaataaccgtctgtcaagctaaactaatagctacaaaacgaggtgacagcatggctaaggaaatcaaaatcacaaagaaagctgcacgccggggcgacgacggctacaaaatcgtttctgtccgcatgcgggacgagatgattgcgcgtctggacgcgctgtccagtgaaaccaaccgttcccgcaacgaattgatcaatttgttactggatgccgcactggacatcgttcaaatcgaaaactgaaaaaacaccggacgctgcaataatacagcgtccggtgttttacatccgaatctaacagtgttttttattcctcgtcgccctgcatctgcttggcttcagcaatggctttttcctgcacagcaggaggcgtatcttcatagcgcaggaatgcataggtgaacataccgcgaccttgcgtcatagagcgcaggtcaatggcataagtgcccatttcacccatgggaacctcggccacgatctcctgctcgccggcttccaccgggttcatacccatcacacgtccgcggcgcttgttgaggtctcccatcacgtcgccggtgtaagagtcgggaacgatgacgtgcagctctccaatgggttcgagcaacacgggattcgcctgagccagaccagccttgtatgccagagacgccgccgtcttaaaggccatttcagaggagtccacaggatgataggagccatccaccagagtggctttcagatacaccacaggataacctgccagcacgccgtgctgcacgctgtcgcgcaggcccttttccacagcggggaagaagttcttgggcacagaaccaccgaacacgttctcggcgaataccagctcttcgctgtcgcagggttcaaactcaatccacacgtcaccgtactgaccgtggccgccggactgcttcttgtgcttgccttccactttcacctttttgcggatcttttcacggtaaggcacgcgggccgggctgagggtaacctccacgccgaagcggtccttcagcttggcgcacagaacggaaagctggatgtcaccggtgccggtaagcaccatctggcgggtttcggcgttattgacgcagtggaacgtcatatcctcttccgacaggcgcaccaggccgttggccactttgtcctcctgtcccttggtcttgggtgcaatggccatggtatagttagccaccgggaatggaatggccgtcaggttcacagggtgcttgggatcgcacaggctgtcgttggtccgggtgtcggtcagcttggacacggcggcaatgtcgccgcagcaaacctcctgcacctcagtggccttcttgccgcacatggtatacaggtgacccagcttggtgatattgccagtgcgggcattgaccacagacatatcgggggtcaagcggccggaaatcactttaatgtaagaataacggccgtactgatccgaagtcgttttaaaaacgaaagcatagggcgcgccgtcttctgtgatgtcgatttccactttattgccgtgcatatccgtacccttgcggttggggatctccacagggttggggaacagcttgatgatgcagtccagcagcgtcagggttcccaggcccgtgaacgccgaaccgcacaccacagggcacaatgtcagatccttgacgccgttgtgcaggccctgaatgacctcttcctgcgtaaacggctcgccggaaaaatacttttccataaactcttcgctggtttcagccacggactcgcacagctggtcgtacagctcatccaccacgtcctgcttgtcggcagggatgggcacttccttgcggcgctttccctcgagctgataggcccggcggtagacgatgtccagcagcgtttcaatgtgcttttcctcatcccacagcggcatcatcaccgggcacacgctgcggccgaatttttcgcgcagcgtctgccaggcgccgttgaagtcgccgttttcctcatcggtcttggcaatgtagattgcgcggggcatattgcgctcctgcagatatttccacgctttttccgtgcccacggaaagacctcccttggcactgccgacgataatgccggcatccgccacgcgcagcccttccatcacctcgccggaaaagtcaaaataacccggagtgtccagtacgttgattttgcagcctttaaatttaaccggcgccacagccagagagatcgaaatctgtctctttgcttcttcgggatcgctgtcgcagacggtgttgccttctgtccccttgccgagccggtcaatgctgccggtcatgtacagcatgctctccaccagggaggtcttaccggtgccgctgtgtcccagcagacagacattacgaatatcttttgcagtgtagctcatgttgctctctccttatactgtgatctttggcccgcacttcggaaacacacagccatacagtttcgtttgctgtccttctccatcgaaagtgttctaccaattatgctgattatacaacagagcatcaaaatgcacaagtgaaatctgtcaaaaagcaccaaaatctttcagaggcagaccgcagctgccgttgtttttggcagattgttcagagatgccaaccaactttaggcaaaacagacaaaaaaggcggctgtgcgctggcttcagcgtactttccgataccataagagaggaacaccgttccatggtgccatcggagcgaacatgacaaagaagcgcgggagaacggccgttctcccgcgcttctttgtcttttcgtgcagttttcctgtttaatattgcgttacccaaccgttgaccagaaccgtcggcacactccaaagcagctggaacgccagcaacggcgccggtgaaagcacctgaaagccgctggcaaaagcaaggtaaaacgccaggattgtgccgcagatgctgccgatcagcgcccaggcacagtttttccgcaccgcgccgtacatccgcttaccgcccaccaccgtttcggcataaggcatcagcccttcgcgaaacagcagcgctgccggccggccgctgctctcgtgctcctcttcggaaaacgccaaccggtcagaaagctccggatacaaacagcgctttttggtattaaccttgaacttacgcttgatgagcgcaggcgtgatattgaaatcccgcacggcaaacaccgggcagataccgttgtgcagcactgcctgcagcgccgcgtccacgttgtccgaagccatatatttaatggcaaataccgccaccagctcccgatccaccgccaaaaacacgccagtgggcagtttgatctcccggggcaggcgcacacccatctgcgccataaagtcagaacggcccaggatgacactttctccccggatcgtgccggccacgccgccttcctgataaaagctgaaatcttccacaggatacgtatgggcaccctggctgcggcacaagtcgccgaacacctgacgcaggccgctgccggaagcgttcaccatactggcggcataccccactgcctgaatagcatcgtgcgcatagactttcatgccgttcataaatacagttcccggagggaaaagatcgttgtccgtcagaatcatactgcccttgcggctcatcgcctgagcgccgctgtaaccggaaaccgcacagccgtcccgctgcagccggcgggccagtttgcccagcggcgtgccgaaggccgccgtaaacgcaaaagaggaagccgcccccagaatggccgaccagtaccacaggaaattggccgtatcgaaccggttgaacgctgtgagcagcgcaaacaccactgtggccgtcaagatcacaggcagcagcacatgataccagcccagctgctcgctttcccgctccgtcatccccacaaacccatcggtggaacattcctgcttgcggtaaccgcccttcacgctggaaaccacataaggcgactgatcataagtcgccatatggcaacaatcccgcaggccccgcaggcgaagcatttcgccgcgcagcgtaaaatacagcgccaccaccgccaccaagcaaaacggctgctgcatgccgcggccgtccatcagccagacagacgcgccgtcagcggcggaaactgcagcaaacagcgccaccagcaattccggcgtacagtgccgccgcaccagctccgccacggcccggacataaaccggcagacagatcaccatctgcaccgccagaagcgtcagaccgaccgcggcaaactgctcagccgaaacatatggctccgccgcgccgctgtactgcacagccgtcaatataccgctcagcagcgcagccaacagcgccgggcggccgcggcggcgcagttttttatagcgccggtgatagtccgccgacgccgcgccgctgtcgcgttccggaagatcgtcgaagtcgtcttcctcctccggctcttccacataggattcgccctcgtctgaaagcggctctgtctccgcaggcacataaaccggttccgtatcttcaaagcgccgcagctttctggaaaagagcccccgccgaaccaccggctgcgccacttggcgccgggactcttcttcctccatcaccgcgtccaccacctgcgccattacgtcctccagagggacgccctgcgcacgttcggatcccgccttggcttccggttcatacagcgcctgtggctccggatcccatccggcagtttgctccgacgcttccggctccggcggcgcaggcgcgtttacagccttggcctgcccctctgccgccgcagcgacaaacggcgcctgctcttctttcggtgccgctttttcctcccgggcgtggacaggtttcagacggtatccttcattgacccacacttcgtcgctctccgcttccggcaagtcctttaggtgcccccgtttcccatattcggccagaatttcctccaggtcgatttcctccgccacattggaaagatccacgccttccagcagtttgcgggtgtcaaaagcgtcgcttcgctctatgaatttgtccaagtcgttcttttccatggaagcgctttccttttttgtttctttcctcgctcagcccatacgctggcgcaccgcctcatacagtaaaatcgccgctgcggcggacgcgttcagcgaagagatgttccctttcatcggaatgctgaccaaaaagtcgcagccctgagccaccagacggctcatcccgtcgccctcgctgccaatcacgatggctgcgggacccttcagatctgcgtggtacagatccgtatttccatccgcagcggtgccgaacacccaaatgccctgtttctgcagatctttcagcagcgccggaaggttggccacccgcgccacagggagataggacaccgcaccggcactggtttttgccaccaccgccgtcaggcccgcgctgcggcgcttcggaataatgacgccgtgagcgccggcgcactccgccgtacggatcaccgcccccaggttatgtggatcgctcagctcatcgcatataacaagcagaggcgcttcccctctttcctccgcaacacgcaggatttcttccaccgaagcatattcccgcaccgccgccactgcaatcacgccctgatgggcatgggttcggctcatggcgtcaagcttgcggtggtccgtgtcggccaccacaattcccgactgtttggccagtgccacaatcttggaaagcgtacggtccgtatcaccgcgggatacataaattttgtcaatcggagcgccagcgcgcaaggcctctgtaacagcgttgcgtccttcgatcaacccgtccgccaaactttcctgaccggcctcttcttccctgccgggccgctcctgcgcagcgctgtaccgttgttccaacaccgcgcccactctttttcttccgcagcgctgacttctttctccagccttttgccggtctctcttttccataaatcgactctcctgcaatccatgtttccatggataaatttctgctaattatacagcatagagtatagcacaaactgccggaggaaaaaagactattaacagaaattttacaactgccgcgtcagtaaaacttgtgtcccggcataaattgtgctagtatatattaatattaactgtattctctgtagttttttcaatccgcagcgcgcctatgttctgttctgatttttacaacaagattaaaggaggcactttatgccgtccaacgacaagaaaaacaaaaaacgaaaaaacagtaatatgaccggtttggtcacgctgatcgcctgggccttgtttttgac

SEQ ID NO: 3658 - DNA, 10186 bp, Unknown
  16S sequences of unknown bacteria
tgggagaggtctccgctcgcgacaaagactgccttgcggcccagcttttcgacgcattcgttgatgagctggccaaactggtagtgcttgatgctgtcgaagcccgaaagcccgatgcgcaccgcacggtagtcggtgtagaacttgtcgataaaccacagcgggatatacgtcgcatggtcgagtgaggcatcacgctcgccagccgttcccgccggaaactcctgattctcggcctcggcgcagagcgtggacacatattcggtgtcgtaatccaccgcgagcgtggtgtcgtatgcgcggaactgcgagaggtcgcccgacgcgcgcgtgccgggggagacgtggaaccagtcgcggtaggcgggcgcatggggcgaggttacgatgacgagctcgggctcgagcgcggcgatgcggcgtgcaacctcgtcgtaggcgtcgatggtctgctggatctccgcctcgcgcccgtggccgacggcggggatgatgagcggcggatgaggaacgataaacgcggcttcgatactcatggttgacctcccgaaccgaacaagcggtacggttacatcctagcgcgcgtgcgacagcacgcaggcagatttccgggccaagatgccgcgaggggttgatgcgcgatcgcctcgatcgagcgcatggcatatacaagagagggctacttgggatctttggggatgtgccatctgcccgtgtcgagcgtgggcagcgtcgcgaccgtctgcttctggaacagcgcaccgtcttcggtggcgatgttcttgccggtgcgcgcctcgtagtaggtgacgaagacgccctgcaacgtcgcgatgatggggatggacagcagcatgcccgccacgccgccaagcgcgccgccgatgaggatggcgatgaggatgagcgctgggtggacgttgacagaacttttcataagcttaggcgagatgatgttgccgacgacgttggtgatgatgacattgaccacgatggagccgatgcacacgagcggcgagacgaacagtgcgacgacggcaacaatcgcggcagagaccatggggccgatgtagggcacgaagtaggcgatgccgcagagaaagccgagcatgccggaatacgggatgcccatgatccagaagacgactccgctgcatacgccggtgatgacggcgcagacgagtgtggactttgcccacccgtagaccgcgttgcggaacgcgtccgcaaagatgtcgatgtcgtcttggtacttgtcggcaaacagcgacctgacctcgcgcgatattttggggaggtcgagcaagatccagaatgcgcacacgaacgagatgaagccgatgacgacaacgttgccaatgccgacgatgcttccgacgaggccgtcggcgagggtgctggcgagcttcgtgccctggttgcggatccagttgcttgcgtcgtcgagcagctctgagatggtgaagcccccgatggtcgtatcttcatcgaagttagatgatatccaggtgtggagttccgagatatggcttggcagcgcgccgatgaagttcgagatctgcgtcacgagcgccgggataaacgcgagcacgcatccgacgatgattgccgagacgaccacgaagcagatggtagtgccgagcgcgcgcggaatgccgtgatgctccatgcggttgacgaggccgtgcagcagaaagatcgcaagtgcggtgacgacgatggtggcgacggcttgccacaggatgttgcagatgtagagcacgacgccggcgaggatgcagaagccgacgagcgtccaggtcttgtatgcgcgacccttccacttgtagtacttgtcttgtttatctgcttccaagggaatcctaagtgtatctggcggaggaggagggattcgaaccctcgtacccggggataccgggtaaacggttttcgagaccgccgcattcaaccactctgccacccctccgcgaggcagcccagtcgggcgtgagcacgattataacgcaggcagcaccaagaagtgccgacttcttttagccattgcaaataccttctgacatgcgggtcaatcggccctttcgtctgataggtgggcttgccggggcgcctggagcgcgctttggtgggtatactttgctgctgaacaagttgcacgtaccgctgaccaacaggaggccgcatggctgatcaggaaaacctcgagctcgacgaggtcctcgagaaaatcaccttctactgcttcgatgaggcgcgtaagaaaatcgaggcgggagaggaatgcgtcccgttcacgtgcgtggtgtccggcgagcagatgttcgtcgagagctacccgggcgaggatgtgacgatgtgccgcaaaaacgccgaggccaatgtcaagtcctcgagcagcttttcgagctgctacgcgttttgctatgacggctttctgatgaccgacgacgggcagctcgacgccatcttggtcgaatgcgcccagagggacatggagagctcctacgtcatcgggctgctgtacaagaaggagggcgaccagctgcagtttgccgagacgccggcgtttatccaggcgggcgagacgttctacgatgccgccgcggtccaggctgcggaagagcaggagcgcgttctcggggcagacgccgacgagatgtctgcagcccaaaaggcaatcaacagccatctcaacatgggcgtagacgaggagtaagcatgcccatcgaagtagactggcgccaggcgtggatcgacgcgctgaaagcgcggcgccgcgctgacgattccgcatactgggacaagcgcgccccaagctttgccaagacctgcgggacctcgccgtatgcgcgcgcgttcatcgagcgcgcgcagctggaggggggcgagaccgtgttcgacatgggatgcggctcggggacgctcgccgttccgctcgccctggccggccacgaggtgtatgccgccgatttctcgcccgcgatgatcgagctcatgatgcgcagggcgcgcgtggagggcgtcgaggagctcatccacccaatcgagatgtcgtgggatgaagaatggaaggcggcacctgtgtgcgacgtggcgtttgcctcgcgctcgatcgccacgcaagatatggcggccgcccttctcaaacttgacgcgcatgctcgccgccgcgtgtgcatcacgcttgccaccgacacctcgccgcgcgccgacgaggtgctgcttcaggcggtggggcgtaccaaggactacgcatccgattacgtgtacgggatgaacatcctgtggcagctcggcttccaaccggacttgagctacatccgcagcaagcgcgcgagcgacttcacgagcttcgaggaggccgtcgacacgacgtgcgagatcatcgaggcgaccccagaagagcgagaccggctgatcgagtactcgcgcgtgcatctccacgagggcgtgaacgagcagggcgaggcggtgtggagctacgaccacgtacgcgtgacgtcgtgggcttttatatcttgggaaaatagccctgtttacgtgaaatgacgcttgagggcgattgtttttatggcataatgtgcaaactgcttgtccccatcgtctagcggtcttggacgccgccccttcaaggcggagatcgcgggttcgaatcccgctgggggcaccatcaactgcaagaagagccgtcatgaatccatggcggctcttttcattatgatagagacccgcccaagagcaggcggcgttgattcgaggagtagtcatggaacctgtttgcacagtcgagaacgtgaaagaggcggcagaggtcattcgcgccgccgcaccgggattcaagccgagcgtggcactggtgctcgggtccgggttgggcgggttggcggacgccatcgaaagcccgacggtcgtcgactactgtgacgtgccgcatatggccaagtccactgccccgatgcacaaggggcagttcgtcatcggcaccctcgaaggaaagcaggtcatctgcatgcaggggcgtctgcacgcctacgagggctggagcgccgaccagattgcctttcccatctacgtcatgcacgagctcggtgccgaggtgctcgtcgtcaccaacgccgccggcggggtggacgcgtcgtacggcatcgacgacctcatgatcatcgaagaccaggtcaacctgctcggcatggacccgtgcatcgggcccgaccagccggacctgcgcccccgcttcttcgacatgaccaacgcatacgaccccgagctgcgcgcgtctgccgacgccgctgcccgcgagctcggcatttccgtgcaacacggcgtgtatgccgccgagctcggcccctcgttcgagacgccagcagagatccgcgcgtatcgcgcgatgggcatcgacgccatcggcatgtccacggtgctcgaggtcatcgccgcgcgctcctgcgcgatgcgcgtgcttggcatctcgctcatctcgaaccctgcggccggcgtctgcgacgaaccgctgcagatggacgacgtcgccaaggcagctgccgcggcggcggacaagatcgaggcgctcgtcgtgaaagttatcgggacgctgtagaggttatcacggttcggtaacggcacccgttccctgaaaaacagggcggggcagtccattagcatggcgaatagctataatcgagtcgagagcagtaccgcgctctcggacttctgtgttgaaggaggtgcgcacgtatgatcaaggtcaacatcgagtcccttgtcgtcggtatcatgcccatgccttccgtgatcacgctgaggcctgctgaggtgcgcgacgatatccctcgagacaacgtgctgcccatctggatcgggtcgatggaatcctcttccatcgccgcctcgcttggcagcaacacgcacgagcgcccgctcacacacaagctcatgagcgacgtcatcacggcaatgggcggctcggtcagccgcgtcgtcatcgaccgcgtagagggtacgacgtttttctcgacaatctacctgcgcttggcaaacggcatgttcacgcgcatcgatgcgcgtccgagcgacgccatcgcgctggcggtccgctccaaggcgccgctgttcgtggaagagaccgtgttccagtccgcagggtgcccgcgttcgttcaggccggggcaagacgaccagatcgtcatcgaggagttcgacaagttcatcgaaagcgtcaatccagaagatttcatcactcacgaaggtcatggcgattccaagtaacaatcgcatgtcagggcgtgtatagtgaaaccataagagagcctgctcgtggtcaccgcgccgagccggctctcttgctttttgggcgcgtcagcagcggaaacctcgtctgatccttcttggaaggtacgataaaccgccagcccgtagtatgcttgtcaaacgattgtgtttgggatgtgttggcgttcgcgcggggagaggcgcaatgagggcagaagaggaagattatctgactggcttgcccgcgcggcgcggctttgtccgctgctttggccagcttcccgccgattcgcgggtcacgattttctgcatcgacctcgacaacttcaagaccgtgaacgatgtgtacgggcacaacgtgggcgataacgtgctgcgttcggttgcccgcctgttcgcgcaccggcccgacatcgcgtttgccgcgcgcatgggcggagacgagttcgcgctcgtctcgacgacgattctgcagcgcgcgcaggcagagcatctcatgggtggcctgttcgcgagcatcaggggattgcaagaagcggacgaggcctttggcgtcatcacgatcagcgccggcatcctgctgaacacgcctgcctcaaccgagctcgagaccctgctgcgtcagggcgatgccgcgatgtacgaggcaaagcgcaagggcaagaactgctacgtgttctacgaagatgtcgaggaacgtgtgcgcgtcgagcacgagatgatcgaagaagtggtctctgcactcgacgaggagcgcttcgagatgctgatgcagcccgtcctcgacatcgcgacgggcaaggcggtccagacggaggtgcactttgtctggcagtttcgcgatggagagaagtactacgcacaccagttcagggcggtgatggagcgcaacggctttatccgcagcctcgacctgcggctgttcgaacaactctgccgcgcaatcgcgcagaaccgcgagctggtcgagggcatgccgcgcttcagcctgattttctcggcgcagtcgctgttcgacgacaggatctgcgagacgctgatggagataatccgccggcatgggctctctccagagatgttcgactgcgcgctgtacgagactattttcgggcggcgcgaagtgcagacgattatcgagcggacgcacgagctcgccgaacttggcttcagcatctcgctctgcgcgtttggagagaccttccacagtaccaagtacctgcgggaactccccgtggggattctcaagatctatcccgagtactacaagacgcttctggcaggtgacgagaaggacaaggggctgctgcggctgatcatcgggtccatggcgtcgctgggcacctatgtctcgtgcggcgagctcgacgatgccgagctcatcctcgtgttacaggacatggggtgccgcggctgcgagggtccggcggtcgtgccgccgacaacgctcgacaagtacaaggagcagctcgcactcggcaagaagcgtttggcgaatatcgtgctctgggggcggctgcactctcctccgcgttgcgccaaaaacgtggcagtgccacgtttctcgtgcggggttcgcgcgggggagttcccgcgcgggaaggggttgtgttaggaggggcggccggggtcctgggtcgcgagaatctccgcgatctcttccgtcgtcgcctcgcggatatcggtcgtgggcatcgcattcaggaacgacttgccatagcctttcgtcttcacccgtgcatccgccaagacgagccaaccgctgtcggtcgaggtgcggatgaggcgccccgccgcctgcttaaggtccatgatcgcctcgggcagagagtagcgtccccacgccgcgcggctctcacgcgcctcgcgctcctgcgcgatggggtcggtgggccgtccaaagggcagcttggggatgaccacgcagcgcagggtctcgcccggcgcgtcgaacccttcccaaaacgacttgagcgcgaacaggcacagggcctcgtcctgcaaaaaccggtcgcgcaggtttttcgtgctcgttccgcgcgtctgcgcgatcaactcgatgccctcggccttgagctgcggcttgagctcgtggtacagcgattccatctcgcgccggttggtgaacagcgtgagcaccgagccgcccatggcggtgtgcactgccagcagcagcttcttgagcgcgccgcggtaggcggcctggttgggctcgggcatgtcgtcgggcagcaagacgctcatgtggtgctcgaagtcgtagctcgagttgagctggcgcgtgcgcacgcgctgcttgtctaccagggcaagccccgacgtgcgcaggaaatgtgcgaacggcttgtcggagccgccggtccccagcgtcgccgaggtgaagacaaccgtcttttgctcggagtagaaatcgttcgcgagcgtctcgccgatatcgagcttggcggccgtgagtgcctctgccacgcgttccgggtcgcggtcgagctcggcggaatacacgtacgagtcgtcctcgccctcgagcaccaggttgagcgcgaagagcatctcgtcgaggttggacgtcgtcttggacaggtcggcctgcgtcgcgtcgaaggcgccctcgaactgctcgagcatggacatgaggtcgcgtagccgcttggtcagcccctcgagcttgtccatgagcgagcggccgggcccgtagaggtttgcccagctgccgctttgcctgagcgcagggctgatccacagcgtcgtcctgctgtaggcgctgttgctcttctcgccgctctcgagctccttcacgtacgcgaaaaacgagcccgacaccgcgcgcagcgtgtcgacgcggtcgtcgacgtctgcggtgacaccgtagagcacgttgccgccctcgagctgcgaggcggcgcggcgaatcttcgcgatgagcccgccgtgcgcgccggtgagccggttgaacgcgagctcgaggtcgcgggcgctcacggaatgcgacagctgcttgcgtgcctcggactccatggtgtgtgcctcgtcgatgacccaatggcggatgggcggcaggatgccgttgtccatctgcacgctgcgaaacagcagcgcgtggttggtgacgacgatgtctgccgatttggcgaagcgacgggccccgtgcaggtagcagcgcgagtagaaggggcatcgctgcttgaggcagtcgttgaggttggcgcgtaccgcatcgcgcggcaggccgtaccagtggatgttcagcgcatcgaggtcgccccaggtggtctggctcacgaaatggtacagcgtggcgatcatctgcaggacctcgacgggcttttcctcgtcctcgcgcgcgaagcgctcgagcttgcgcaggcacgggtagtggtcgtagcccttgagcgcgatgtaggtaaggccgccgagcgcgtccgaaaggcgcggcagctcgtggtagacgagctggtccatgagggcattcgtcttggtggcgacgccgatagtgatggcgttgccctttgccgcgcgcgccgcgggcagcaggtacgccatggacttgcccacgccggtgccggcctcgagcacgctgaacagctcgtctctgaacgcatgctgcacctcgagcgccatctcgacctgctcggcgcgcggctcgtagcccggggacatgcgccctgcaatgccgtctgccgcaaacgcctgctccacctgctcgtctttgtcgaagaacagcgggacctcgttcgcgtcgtatttggtgtgcagcccctcgagctcggtgcgctcgcggcgtgcgacgcgcagcgagaagcccacacccggctgtgcgccggccgcctgggcaaacagcttgcgcagcggccagtccgtctcgggcgagagctccgcgatgaagccggcgaggcccgcgggcatgctctggagcgccgcgacgaggatgcgccagagcgcggcgagcgcctcggtgtcgtcggttgcgcggtgggtcgatggatgcgcgccaaaggcggcagcgaggtccacgagccggtggctcttcagacgcggcagcagaatctgggacagcgcgagcgtgtcaatccatgcgccgggaagcgctcccggctcggcgcgccgcatgacgaagccgcgatcgaacggcgcgttgtgcgcgacgaggtcgcacccttccgcgaactgcgcgaacgccgccacggcctcccgcggagatggggcgtctgcgatgtcggcgttcgtgatgccggtgagctcggtgatctcttcggggatggagcacccggggttcacgaaggtctggaagcgctccacgatattggggccgttcatgcgcagtgccgcaatctcgatgagcgagcagtatgcggggtcgagccccgtggtctcggtatcgacgactacaacgtcgtcttctatgagcgaaagcgtcgcgtcgtgggaggcttcggcaagcgcatggtagcgtgcgcggacgtcgtcgtccgtgcccgggatgagcagcgcgtcgagcgcggcgcgcgatggtgtgtgttcgtctgcgtgtgacatatgcgaagcctaccattatgcagcgacagggaatgggtcatgtgtaatgttttggcaaccaagccgcccgcggcgcccgcgcggtgttacccttctgacaaatttgaacacaggagccaccatgccaaaaaacgacatcgcctactacgccacctactgcaagctcgacgagacgagcggagattccggcatcatcgtcgacggcaacatgatgagcgtcggcaccgagctcgagctcaccccgcagctccacgtgaccgagcgcggaaaggagatcccgcgcgtcgtgctgggaaagggcaagcgcgcggccggcttcatccccgacaacgtgttcaaggcgcatgtcaaagacgcgctcgacaacggctggaccgtgcgggccgtcgcc

SEQ ID NO: 3659 - DNA, 4800 bp, Unknown
  16S sequences of unknown bacteria
tctggtgttctggaacccattctcatcggcgtacttttgcaggataagtttttgagacgagatttgtcaagggcattttacccatattgtaaagacaaataaatttgctaatgattctgcgaaacgccaagcaagccgactgtattattgcagtcggcttgcaggttactcaatattaaaatatcggcggcttacataatagcaaacatttatacgctccagccaaggctttcctgctgaatggtatacagccttttgtaaagcccattttgctccatcagttcactgtgtgttccttgctctatgactttgccatcgtccagcacgatgattttgtcggcctttgcaatggtacggagtctgtgtgcaataacaagaacggttttcccctgtattaagcggccgatcgcctgctgaatacaggattcactttccggatcaaggctggctgttgcttcatccaaaagtacgatcggagcgtcctttagtaaagctcttgcaatggacaggcgctgccgttcaccgccggaaagggtacttccgttttctcccagaacagtctgataaccatccggcattttgtcaataaactcatcacagcgcgcagcctttgccgccgcaagcacctgttcttcggttgcgttcatatttcctattttaatgttattgtagacagtgtcgttgaaaagtaccacatcctgaaatacaaaggacatgtattccatcaagtgttccggatcaagctctttcacgtcaatgccgccgatttccacctgtcctttattgacatcccaaaagcgtgcaatcagacgggaaagcgtgctcttgccgcttccgctggggccaaccagagccgtgattgcgcctgctggaatcgtaacattcacattttttatggtttcctcgccctgcggattataacggaaggtgatatttttcagttcgatatcgtattcctttactggtttttcagtatcgccttccatcggctgaatattcatcagggttctcattctgcggatggcaatctgatgatagaatagctccggcagcagagtcagttctgtaataatcggcccgtaaattcgggtgacgatcagcaggcaaagcagcattgggacaagctcaattttgccgttcaggagcagagaagttcccgcaaacacggtaagcccgatgccggattgcacgagcatctgcgcgcctgtcacaaaaacccccgaaccaaattcaaatttaattgcaaggtttttcatggtgcgcagcgctttttccagagcctgaaactgctgactgtccagattgcaggctttcaccaccttgattccctcaatgtattcctgaacctgttcggaagcttccagttttgcctgcgcatgcttttttccaagccgctcctgaatccgtctgctcgcaaaaataatgagaaaagcaaccggcacggaaataaaaatagcgagtgccatacgccagtcatagaaggcaaacatactgcagacaaccgtaatcgtgatcacattggagataatctgcggatacacatgactcagtacatgttcggaagtggctacatcgcccatgagatttgtcgtaagctccgaaaggtttttggaattaaacacgctcataggcagtttgcggatgtgttctgccaaagcaatccttgtattttcgctttccatgtaagaggctacataggtctttttatagtcgtttttgttgcagagaaatacgattactgcgccgatgatgccgagtccgaaataaatccacatatttgtccatgagatgctcccgccggtaaacggttttagaagttccatgacgacctgaagcatcaccatagctggaataaacatggagaaatttgtcagcgtgcaggcggcaatcgctttttttaagtcccgatagcctttgtctgtcagcatcagcgcatcctgaacggttgattttttcttacccattgaccggcacctccttttccattgtccaactggctgtttcattgtaggttttccacatagatgcgtaccgtccgcctttttgcaggagggcgtcatggctgccttcttccgctacacgcccgttatccatcacaatgatatgatcggcgttacgaactgtggaaaggcggtgtgcgatgatgattaccgttttcccctgcatcaatttttcaaacgccttttgaatcaaatgctcattttcaggatcggcaaaggcggttgcctcgtccagcactatcacaggggcatcctttacaatggcacgggcgatagcaatccgctgctgctcgccgccgcttaaatggataccctgttctccgatgaccgtatcatagccatttggcagcgccatgataaagtcgtggcattgggcggctttcgcggccgcctggatctgttcatcgctggcattctggttcccaagcctgatattatcacggatactctgtttgaacagatagacatcctgaaatacgaagctgacctgttccatcagatatcggctttccatctgccggatatccaccgagccaatggaaacagtaccctgatccacatcgaagaatcgtggaatgagatgggcaatcgtactttttccgccgccggaaggtcctacaatcgctgttacttcgccctgccgtgcatggaagctcacattggaaatcgcctgtttttctttgtctttctcataggagaatgacacattttcaaacttgacatcatagcgatccgttgttttaggaaccggcggctgtttcagttccggctcagccagaatctgatccattgcctctacaccgttggcaatccgcatggcatcggagttgacatacatgattttggaaagaatgcccgcaatggacggtacgaataccagataaaaaataaagcgtgaagcaaaatccttaaaatccccggtattcatgccgatcaaaatccctaccggtaaaaggagaagataaatatggttgataatcgtcataaaagcggacatcatgttttcccagctcagcgtatatggaatgaccacagaagtatattctttgatggtctcgtgcagccggtgaaaggaataaacagtctgcttgaatgctttgacgactgaaattccacggatgtactctactgcggcgttgttcatgttttccaacgagtgctggtactcatccatcatttttctggcgccttcccggccgtaggcgatactctgaatgataaaagcaataattactccaacaattgaggccaggccgagccgccagtccacactcaacagaatcacagccatcacaacaggagaaacaaatgcggctacaataatctggtattttcaagatgtccttatgaggagtcgcccttttgtcttcctctttttttatcgtatacaaaagagcaggttaaaacagcaaaagacgaactgccaatgcactcataaaaaaacctacgatatctgcggtaagagcagatggcagagtatgtcgggttttttgcacccctgtagcaccgtaatatactgcgatagtgtaaaaagtagtttcagtcgatccctgcattacactggcgacccgtcctacaaaactatcgggaccgtattgctgcaaaatatcctgaaagataactagagctccgctaccggagatgggacgaagaatcgccagcgggataacttcctgaggtagatgaagaagatttgccacaggacgcaatgaataggttatcacatccagtgcgccggaggctttaaacatacctactgcggtaatcaaagcaatcaaagcagggagaatctgaactgatgaggtaagcccttccttggcgccttccaaaaagcagtcgaaaaccggaacttttttgaagatcccatatcctacaatgaggacgataacggcgggtaaaatgtaatgagaaatttgattcatagtatccgtctccttcaacgaaacctgctggataaaaatttagcggttaagataccggcaagaatagataccgacgatgccagccaaactgctggaagaatttccataggcgcggtgcttccattggaaagacgcagcgcagcggtagtggtaggaatcaattgaagagaggcggtatttaaaactaccagcatagccatttcgtttgaagcaatcccttttcgaggagaaattttttctaactctttcatagcagaaattcccaagggagtggctgcgttgcctagtccaagcaagtttgcagttaaattcattacaatggcttttgccgcttttgaatcgactggaagatgacgaaatagcaatgtcatcacaggacggaacaggcggcttaactttcccgtaagatcagaggcttctgcaatgcgcataagtccgctccaaagacacattacgccggtcagttggataaccagcgtaactgcattggaacagtcatttacagcggaaatggaaacctgctccatacgaccgtttaaaatgccaaaaagaaaagataaaacgagcatacctgtaaaaagccaggacatcataccaattccccctttgtcctatatgtatcgtgagagaaaacaaaatatgattccaaaaaaaatgatagaaatctgttagttttaacaaagcaaacatggtaaaatgcataaaaataaaatagaaattatcaatattttgagaaaaaagctaattttatttgacaaattttgcgaaattgtatatgatatttcacagaactgtttgaacaaaaataaaataaggggaaatacagatgaaagcgacaggcattgtgagaaaagtggatgagctgggccgtgttgtcc

SEQ ID NO: 3660 - DNA, 8594 bp, Unknown
  16S sequences of unknown bacteria
ccggcttgagcagacgctcctgataagagaggacggcgccgtccagctcatcgaacagctggtatcgcgcctgcagggagcgcgcggaatcctcgctcaggttagagatgatgtagatgccatagccgcgcttgcggcagtctgcacgaaaggcgttcatctcgctgatgggatgaaggacctgcgtccagtgatccagcatgtaacaaatggcctgctggtgctggggatgcgcctggacatacgcctgacgcagatcatccagcgtacatgcgccgcggtcatattcctgccatctggcggaacgaaaaaggagggaacacagctcttcatgatggcgcagatcatggaagaagcgttggggctgccagtgcatcagcacgttcccgatatcaaatactatatgtttgatcatattcttcaccgcactcattataacaaaaagagagacagggaaaccggacatgtgcggaaaatgacgaaaattatgatataatgttggggttgaaggaggaggagactgatgaaccgacggcgttcgcgaagacggcgccgcagcagcaggaggaaaaacggtctgtggatcgcgctggccgccgcagcggccgcgttgtttttgtccgtgcagccgggacagcagctcgtccgcttcctcactgatctgatcgatccgccagaatggatcatcgtgctcgatgccgggcacggcgggtatgacccgggaagcgtggcggaagatggtaccatggagaaggacatcacgctgcagatcacgctgaagaccggtgcgatcctggagcgcgaggacggcgtgcgtgtggtctatacccgaaacagcgatgcactcagctggccgccgcaggaagcagaggaccttgccgcaagggtgcgcatcgcgcagcaggcccgcgcggacatgttgatctcgatccatctgaacgccgcagaggatgcgtctgcgtctggctatgagacgtatatccgtgccgacagcgagatgatgttcgatatggcgcagcaggtccatgcggaatttgctgagcgcggctggagccatgagcgcgggatcaagagcacggtgaacgccccgctctatgtggtcgatgccagtggcatggacgccatgctggtggaggcgggcttcatcaccaatgcggctgagcttgccctcctgcgcagcgaggacggtcagcagatgctggcggaatgcatcgcacaggggatcctgtcgcagctgcaggcgcaaaatacggaagaatgagcgggagaaaggcaccgtaaaatcaggatcaggtaaaaaaattgtataaaatcgcaatttttgaatgatatttttcgcaatatgcgatacaatttatattgctggggactcattcgttcaaaggtaatcatccggaaaacgggaatggaggaatacgatatgtataatgataacgacgaaatgtttgaagtcagtgattttgatgatgatattcatcgccgggaggcactgatcgaagaagccagaagcattccggtgtcttcagactggaatgaagtgatgcatcaggtaagcgatctgcgcagacgctggagacgtatccagttctgggattctgcttatgaagaaacgctggctcaggaatttgacagcatcatcgataagttttacgcaaagcgccgcgagctgtatcagaattcacagaacctgaagcaggagctgatcaagcgcgccaaggagctttcgacatcagaggaatggaacaagacgaccgaagagatgaatgatcttatgctgcagtggaaagcagcgggcacagcaggcaaggagacggacgacgcgctctgggaagagttcagaaatgcgcggcagacgttctttgaccgccgcagggatcactggaagaatctgcgcgagaagtttgacagcgcgcgcaagatcaagcaggatctgatccagcaggctgccgccctggaagattcccaggaatggcagaagacgagcgagcgtttccgttcgctgatggatcagtggaaagcggcaggcagtgcaggccgcgagcatgaggaccagctgtggagccagttcaatgcgagccgccagaagttctacgaagcgcgcaaccgccattatgacgaactgcatgaggaacaggcaaagcattatgcggtgaagaaggatctcaccgcgcaggcacgcgccatcgccgatgcgaaggaatacacccgtgagaacacggagaagatgaagcagctgggcgtggactggaagcaggccggatcctgcggcagagagaaggaagatcagatctggaaggaattccgtgccgcgatggacgactatttcaacagcctgaaggagtggaacgaggagcgtcatcagcagtggcgtcagcgcatgagcgatgcgcgcggccgcaagcaggagctcatcgcgaaccagaagcgccagatccgccgcatgcaggatgagatggtcggattgctcggacagcgcgccatcgatgagatgcaggagcagatcgaagaaaaggaagcgttcatcgctcagctggaagctgagctcgaggatatcgataagacgcttgcggaagaagactaaaaggacaaggagaccgtgcggagcgaacaggccgcgcggtttttttgcggccatgtgtgcctggcgcatatcttggctttgtggaaagctgacaaatcaggagaagtataaagtaagtgtttacatcatgcttttttgctgtttataataagagaagaagggccagctgcataagaaaggaggagaaagatgcacagggccggacataaggaaaaaggaggaaagcatgaataagctatggaagtgcattttatcatttctgatggcagcattgctgctgccggtctcaccgcagccgatacaggctgaaacggatacgttcatcaacgattttgatatcggtatgggcatcgatcaagtgacttatatcggcgagtggaatacggatcagaattatccggatctgttctatggcggcgatgatcattggatcgcgtttgagacagatcattttgacggcgcactggagatcgtcttttatggcacggcgatcaagctgtatggcaatttggagccgatgggcggcatccagcgcgtcctcatcgatggtcaggaaatagccgaggtggatgcctacgcgccacaaaaacagatgggcgtctgcttgtttgacagcgcggagcatgtgagccttgcggcagacaagcatgtgctgcgctatgagccgacacagacgaaaaatgaagcgtcgagcggttacaatatgcagttcgactatgcgcgggcaagcgcgccgcaggatggtgagctgcaatacgcacagctgcgtcaggagagcatgagcgtggaagcaggggagcagcagcaagttcagctgcagctgttcccggccaatgccgacgcgcaggtccgctgggaaagcagcgatccgcagatcgccgcggtcgatgcaaacggaatggtcagcggactggcagaaggcgattgcatgatcagcgctgcgctgccgcagatcgatgccgagcttttctgttcgctcagcgtggttcctgccgccgccgaccttgaagagaccatcgtcaacgacgatgaagtgggcacagagatgttccagttcagctttgaaggaccatgggtgcatgaaggcggattcccggatcgcttcgtgggcggcgatgagcattggatcaccagcgcgcagttcggggatgccttgccggcatacagcttccgtttctatggctcgaaagtcgagctgtacggacataaggtgccagccggcgctatggccgatgtgctgatcgatggcgaactggtcgggacgatcgatcattacttgccttcacgcgctgagcagcagcttttgtttgccagtgcggagatggaagaaggcgagcatgtcatcacggtcaggctgaatgggcaaagcaacccatccagtacgggcacctttgaggcagctgtcgattatgcgaaattctatcacacggagcgtgagttttatccgaccgcgatccagctggaggacagcgagatcatgctggaggaaggcatgacatatcagccgtccgcaaagatcctgcctgcttatgcgagcgtcttgccggagatcatctggtcgagcagcgatccgcaggtcgcgtcggccgatccgcaaagcggcgcggtccgcgcgctgcgtgccggcgaagcgacgatcaccgcgcgtctggatggcatggatatcgaagcgtcattcaaagtggaggtccgcccttgcaaagaacgcttcgcggcgatggtaaaggacaataacctgcatgcttatgaggatgagtacctgacttatgtggaacagacttatgaggaagggacaagcggcatgcgcagctggagcggcacggcatggcgcaacgatgtggtcaccagccggatcgatctgttgacgaaggcagaaagctatgaggatgtcacgctgagcagcagcgacttcatcagtgattccggcagtgtcatcgccagtgagcatatcgcgatgaccttcatgcgatcctcgctggcatacaccaatgaacggcagatcacggacatcatcactgatgagcgggtcatggatctgcaggcacagaagctctacagcgtatgggtggcgatcaatgtgcctgagcaggcccagccgggagagtatcatggcacattgcgcatcagctgcgatgatacggtgctggccgaatttgcgtatacgctgcatgtcatcgatctggtgcagccagacgcgcaggaagatgagatgcagctggagctgtggatgtacccttacagctcgaaccgctattattccggcaagagcacggttgaatacttcggtgacagcgtagaggatctgtatgccgtgcatctggatccccagtatcaggacgggctggaaagccagctggagctgtatcgaaaagctggcggcgacgccatcacggtgaccgtggtggaagacccatggaattcgcagaccccggatccatatccttccatggtcaagtggatccgccacagcgatggcacgttctcatttgattataccgatctggattactggatctcattgaacctggcgcagggcatcgatggccagatcaagagcttctcgatgtcatgctggggtaaccgcatcacgtattatgatgaagcgagcggtcaggtcgtcagtgaggcgccagcgaccggcagcgcgcgctgggaagagctgtggcgcgcgttcatggaagattatgtggcgcacatggaggaaaaaggctggttcgatatgacctatatggccatggatgagcgtccgctcgcagagatcgaaccggtgcttgatctggtggaatcagtgacgaacagcaaaggtgaatcgatgaagatgtcgctggcagtctatgactatggtgccgaaagcatcttcgatcgcatcgatgatctttctctggcgtatcagctgggctcttccaaggtcaaggagatcgcggaacaccggcaggagctgggactgctgacgaccatgtatacgtgcggcgcgcaaaactctgcgttgctcaatgagccaggagaaggcgcttattcgatctatcatgcggccaagtatggcaccgacggcttcctgcgctgggcgctggatgctttcaatgatgacccgctggtcagcagcgcgcatcgcatcctggcagccggcgacatctatctgatctatccggatgagaaagacgatgccgagatgcaggcacactcttcggtccgctttgaaaagctgatggaaggcgtacgggacatggcaaagctgaaggtgctgcgtgagcagtatccgcagctggaggaaaaagtcgcagacctgctcgattcgatcggcatgaatacgatgccggccgaagtgaaccgcgtccgtgcggagatcttccgtctgtcagaagaagcgctctatggtgagatcgaagggggcatccagatcgaagaaggcgatctgcggatggaacagggcgaaacacgtcagctgcatctgcgctacacgccggctgagctggaacagaatgtcagaactgtgacgtatctcaatgatatggatccgcagatcacgtattctggcagctggatcgaagaaagcggttatgacgatctgttctatggcggcgatgatcattactgcgcgccgcaggatggcgaggacgcgatgaatcatggttattcgtttacgttcagcggggacagctttgcgatcatcggtaaccgggaaccgatggctggtaagttcgatgtctatatcgacggcgaatatgcagccactgtggatccatatgacagtgccaagctgcggcatcaggctatttacacgagcccgctgctggagaataccgcccatgaagtgcaggtcgtcggcaatggcgaaaagcatgcgcaggcaagcggatacaacatgcagctcgatgtgatcgagacgtatgtgcatgcgcaggtgcgatggacctcttctgatccgcagatcgtatcggtcagcgcggcaggcgagatcaaggcactgcgcgcgggcacggcgatgatcagcgtgtcttatggcgaatacaccgacagcatccaggtcagcgttgccacgtcagtgtcgacagacgatgagggacaaaaggcggatgatgccgatactgcggcagtgtctgcacggctattgatcatgctgcttctgtctggcagcgcgatcggcttgctcctcatgtggaaaaaacgccgatcttcataaaaaaacaggcttccggtctttgccgtgaagcctttgattcgttattcagcatccagatgcagcaggtgccgcaatcgtcttcccagcatgtctgccatcaggatcttgatcacatccggaatgatgaatgggacgacacacacgcccaggatagcggcgatgctcaggggatcatgggaattcatgctcagaaacaggaaccacagcgtgccgaacatgtagcagatgagcagcgcggcaaaggcgcaaagcaggaaacgaggacggcttttgctccaccagcgctcagtgagccaaagcagcagcgtgctcagcagaaacccgagcaggtatccgccggtcaggtcgaacatgacgctgatgccgccgcggaaccccgaaaagaccggcaggccgatcgcaccgcaaagcagatagcagcaaacgcacagtgtggcgttgcgaccgcctaacagccggccgagcaggaataccgcaaatgtctgcaaggtgaaaggtatcggaaaggggatggatatccaggaacaaacagcgagcagggcagtgcagcagccgcagtaagcgagttcgcgtatatgagtatgcatgatcatcctccaatcagtcaggagcattataccacaagcactttgaaattcaaaataaaaaggcggccatcggaatggcagctcaacaggtcggacagtgtattcggtaaccatatgacgacactttattgactttgtcagcttacttcattgaaaagtgtcaagtcaccaaaacgacggcaaagaaaaagacgctgtcatttttcccgggaaaaagacagcgtcagctatatcatgacagattacgatgcttcagcactgtgtgaacggccatggcggcgatgacaccgacgacggcttccgcgatggagttgacgccgaccgtcgtcatcagcagcgcaacgatcgtattgcccagcacggcctcatagggctctttgaagaagatccagatgccgcccagcacgccgatggtattgatgagcgcaccgctcagtccgctcagggctgcggcagtacggccattcttgcttttgagccgctcatagatcgcgccggccccatagcccagggcgatgcgcgggatgaaggcgatcagcaggctggtccagtttccttccacgccgcccatggagaagaaaggcgtgaagcagaagctggtgatcgtcggcgagaaggtcgcgttgtaaaatgagcagaagcccatgacgaacccgagcgccgcaccgtatttcttgccaagcgccatcgcgcagatgatgaccggaatgtgcagcatcgtcacgctgagcagtccgatccgcaaaaagccaagcggggtgaaggacatgacgacttcgatcgcaagcagcatcgagaagatgaccatgtttgtcgtttttttgtttttcattgatgttctccctttctacttccgttcctgtgggatacggtgtatgctctggcaggagggaagcccgtatgcggcttcggcatgtgtgatggcccggacgatcgcctggctcatggcctgtacggcgaatgcgccgactgcatcgggcatcgcatcacactcgccggtggacatcacgaagacggtatcgccgtcgctcatcgtgtgcaccgggaagatggtgcgggcataggcgttgtgcgtgatcgatgcgatcttgttgcactgggccttgctcagccgggcattggtgatgacgcagccgatggtcgtgttgccctgcggcagatcgcgcacatcatctgccatctgatcgaagatcgtcagcggatcagcgatgtttcccccatcgtatacgccggccaacgctcttcc

SEQ ID NO: 3661 - DNA, 32759 bp, Unknown
  16S sequences of unknown bacteria
cggctcaacaggactctcgggataacgatactgatggtcctgcacgacctgaacctcgcggcgaggtattcggatatactcgcggcgataaaggatggcggcgttttcacggtcggaagcccggacgaggtgctgacaagagagaatatctcggcgctgttcggaatagagtcagaggtcatgcgcgacgaggcgcacgactgcccgttctttatcccaaaatgatatctaccgcttatgcggatgatataaatgttccattaagaaaggaaagcaaatacccatgaaaaaattcataacgctcatgctctccgcgagcctcgtgctcgggacgctcctgacctcctgcggcggcaccgccgggaacgatgagacgacgccgtccgagtcgacgagcgcgaacaccaactccggagatacaagcgccgatacggacgccgatacaagcgctgacaccagcgcggctgacacaaccgcgccggagaacacgaccgccgccgacgcccttcgcgcgtccttcctcgagaaggcggacgaggtcgtcgtgaacgatgacagcgtgaccttcaccgacgcgtccggcaaggagagcgtcacgatcgcgaaggacccgaagtatgttgtcaacctctacgcaagcttcacgaccctctggtatgaggcgggcggaaccgtttccggctgcatcggcggcgattcctcggtcgcgctctatgaagagtacataggcagggatatcaccgcggacgacggcgtcactacggtcgccacctcgtcctccggaaagaagtgggacacagagacgatcatcgctctcgagcccgacctcatcatttgctcgaccgctatgagcgggtacaagacgatagaggctcccgccgaagccgccggtattccggtcatcgcgatgagctacaacgatttcgccgattacctcaagtggttcaaggtcttctcgaacctgaccggacatccggagctctatgaggaggtcgcgctgaaggctcttgacgacgtggtcgacgtgcttctcgaatgcccgacagaagacaatccgaccgtattctgcatgttctcgtccgctgacacccttcaggccaacacctccggcacggtcgtaggcggcatgatcagcgccatgaacgcgaagaacatcgtcgacgcgtgggatggagccgccgacgcggagagactcgacatcaaccttgagaccgttttcgccgccgacccggacatcattctcgttcagtgccacgcgggcaccgatgacgctatggcgcttgtcgaaaccctttacggcgacaacccggtctggcagtcgctgagcgcggttaagaacggcaaggtcttctacctcgagaagagcctcttccacaacaagccgaacagccgcttcgccgaggcttacaaggtgcttgctcagtatctctatccggacgctgaattctgatccggacaatatataactgaaaaaccgccgtggacgaaagcccgcggcagtttttgtttttagttgtcagaccgacggtgtaattcagatattgcgaattgtcagtactggcgctctgaggatgccctcgtcgcgcaggcggtactcgtagcaccacttgtcgcctgttgtgcgccagatagcgggtcctacccatctttcgctctggtcggtgttgtgcagcgctccgaacgcgttgtagcgcgtgccgtagcagcggagagttatggtgtgttctcccgctgtcacatgaccgagatcgagcgtgaacgggtcaaacgcgatgactcccttgtcctcgccgtcgaggaatacgcggacgagcgctccgcggtattcggagaccttgaccgtgatgtcgcagtccggcgtcgttatcttctggtcgtattcgatgtttccggtgtagaagggaagcccctgagacgttaccgacgaatatccgagcttttccggaagagcggtgatcttcttctcggtgccagcgacgctgacgccgaaagctccgaggaggtagcaccactcgaccttcgtgcggatgccgatcggcgtgcggatgaggatggtgttcacgccttttctgatcttcgggagctttatcttctctatagattcatcgacgaaccatccgtcgatatccccggctttctcaccgttcagaagaacctcgcagagcggcgcgttctctatcgcgagacagcagccgtcgacctcaacatccgacgtgaacgtgtagcgcagatcgacgtgatgcgtgagaatttccggcggttcggtccacggctgggcgccgttgtacgccgggagaccggcttccttcgccgcggcgttgttcaggcggagcgtctcctcatacggatgccagtctccattggcggtgagactgtctgaatcgactctccactccgcgccgtcgataagcagcgcgttcggctcctcgaggcggtaatcaacggttccgcggcagaacacctcggagatgaccggtttcacggcagagacaggtgtcccggcggcggactgctcacctttcccaagacgcaggagcagactgtcatacgcgtagaaggacgcgtcgatgatcgtattgccgttctcgatgcggtaatctatcggcgtgacctttccgtcgagtgtgttccagacagtcggagagaagattccctttacggtgatccggattctcgccgcggtatggtaggacgctccgcggtcaaacggctcgcggccatggcagatgaacagccagtcgcagtcgctgtcatggcggtaattgtagatcatgtcgccggtcatgtttccgcccatgtcgcgcataccgataatcctgtacggttcgagggcgtttatcagcgaatcgcggtcgaagccgatgacggtgctctccgcgaagagctcatgcgccgcgtcggacttcacggcgtcgatatatttcggctcgtcgcccatgaatatgacagttccgcccgcttttctgaactcctcaagcattttcagcgtcgacgcgcgcattgtctcgcagcccggaacgactactaccttatacttcatctcgccgaccttcatcccgccgttctcagagcctttgtagagctccggaacaaggctctcgctgataaaatcgaagtcaagcccggagaagaggagccagtcggtcgtgtcgttgaagcgcttttcgattccggcgcgtatgcttccggtattctgtgaaggaccccagtggagccagtagctctctattgggtgaatcacagcgatattgacagcgggctttccgcgtgtcagcgccgtgttcagtctcgcgaaatgatcctctatgtacggatactccttgtaccatggtgactgatagaatatcgacgccgggtaatcgcgcttagcctcgccgtacatcgacatccatgagaggtgcggcacacgcacggttactccgagcgccgcctgccagtcgccgtgatgcttatgaccgcggaagtcgaaatcccagtcggtaacgccgtagagctccgagagcattccttcgcgcccgtactgatgaaccgcggactggcactgcttggctgttgcgtaattatgtgatccgcagagcatatctatacccggaagctggaaacggcggtaggagcgcatagcctccccgagcgcgccggtctggcttctcagcgaatcctcctgcatcatatggccggtcatcgaaatgccgttcttcccgcaccagtcgccgcagttgtcagcgaatgactcggtgaacagctcgcatacgaaatcatggtagagatatctcggtttcgatatctcgccgcccggcttgtcccagaagagctccggcagggtatcctcaattctttcgccgtagcgctcagcgtacttctcgtcgagctttggcgtccacggaagaatgacgtccatgtcgctgttcgcgaacgcgaaagtccccttctcggcgaactgcggctcgtcggtgaatattgccggaacagtctcgccgaagtcgccgccgacgacctccttgtatctctcatgcgttatctcgatgaacttatcgatcgcctctttggacagcgtgtcgacgtaagtctggttattgaaccacccgcgctccgctacgcactcacagtaggtgaaccatttctttccctttgccggctcgtccggagcgataagacggtagctttcaagctcgcccttatcgttcagcacgacgtcataagcatggaagaaataaggcgttccgttctcaaccgccgtctccttgtcgtcaagagttgacacgatatccttagtcgtcatcctgagtatcctctgacggaatctcttagttttagtgacaagaccgccagccgcgccggacgcccatctgtcctcatcataaagccaagccagagtcccgagcttcttcgaatcctcgacgcacctctttatcagcgccatgaactcatcagaaagataaggcacatccataccggtccgcgaatgcatatgatatccgccgaaccccatctccttaaggatagcggtctgtctgtcaacaatatcctcagtaaccttacaattccaagcccagaacggcgccccgcggtactcactggtaggtctctcaaacaacccgcgatcaagcgcccccgccgaattcttcttataaagcataaagccctcccgaataaaaaaacttacacctctactataccacatcccccccgatttgtcaacaactcccctaaaaaacccaaatccataacgcaaaaaaacaaatccacaacggaaatcgtcaagcggggaagcccccgcgggcaaactcgcggatataaaaagtgcgaacatccaccacgcgaccgcgtctcctacgtcggcggggagcccccgcgggcaaactcgcggatgaaaaatgtgcgaacatccaccacgcgtacgcgtctcctacgtcgacttactctgtgcgtaggataggttgcgtggtggatgttcgtttttttatggaatggggaggaatacgtcgtttaccaagtcgtagacatatgagactgtcggggtgaaggtgtcgccggagacacgaccgagactcagaaccgcccgcggagcgtctccgaccgcgctcagggtatccgtagcctcgtcgtaaccgaaatagcgcacctctatgccgaacacgtagtcatccggagagtaacccttctgtttcataaactgcctgaagctcttcaccgcctcagccgcgtgcatcggagagatacagctccgcagctctgattccgaatggtctccgatccagacgatatcgccgttccgtatgcccgtcatgttctggtcaaagaaataactcagagtgcaggaaatgccctcgatggtatctatatagaaatagaactcgacatacatcgtgaaatcctcgtacccgccggagaaataataagtcagagtgccgtattccggatactcaagcttatcgtcaagactgaaccccgcgtcgacgagcgcgcgcatcacgtcaaacacctcagcctcctgctcctcactcagaggcgagaacacaatgacattcagatcgccggaaaggtcggtttccggtgtcgatatctcttccattcccgagaggggagttttgtcaagctcgaagacgcggtcggatgacggcgcgtcgtccggagccgaagtttcaggggcttttgtcgtttcgtgaacctttgtcgtatcaggcttctttgtctccgccggttctgtcaccggctcagtctctttttctgtcgtttcggcttcacggatggtctccacggtcgactcgtccatgttgtcgtcgtcctcattgtactcagacgcgaagctgtcggtcgtgaagataatatcgaaacggtcgatcacgccgccgaagctgtcggcggacccggacgggagcgtcatcacaccgagacgcctgccgttctccgacgctatcagcatactcccgtcagagaagacgcacctgagcgtcctgccctttatcgaaagcgattcataaccgtctgtgtcgacaaggtcatacacgccgagcgaatcgtcggaaatcctctcaaacgagatctccgccgatatcaccgacctgccttccgacacgtacagtattccgtcgtcccctccgtcgcccatcgatggcgcggtgaagtccgccgggagagatatcatacacccctcgcggtcgatgaagtgactgacgaactcggtcgtgtctgttccgccagccggaacaatgtcaagcatatcagtcagcccggaatagctctcggtcagctccttgtcgtagtacattcttgccgcgaccgccgtttttccggagagtacggctacggtcgtgacatattcactgtcgccggggttcgggtcaaagtcgcgcaccctgccgtccctgtctatctccccgcccggatactcggcgagtatgtcgtcaaccgagccgtagctgcccggaagagctgtcagctgtatatacgccccggacgccggatcggtgaagatcgtgtcgtcggattttgccctcgcgagcgtgaagatgtccgggtagtacagcgtaacaccgagctcctcgtcataatacgagacctttttcgcggtcagcgttccgctctttttccgcttttctcgggactttttcgcggcttcgttcacgtagtcgggatcaaggtccttcgacttccagacgccgtttccgacgaaatcgcactttatgagctctcttaagtcgtcgaacacgaaggagtacttattctcgtatttcagagtcgcctcgacgatatattcgttcccgagcccgcagtatgtatattccgtgtgctttttagtctttgtctcggcggtgtaccagtcatagccgagcgcgagcagggtgttcgacggagagttcttcatgaaagcttcgatctcgtcgatgctcgagtagttgttcttcgacagagtaacggtcagaaccgctccgctccgcttgtcggtaatcctgagcgacccgtcgtccttctcgctgaaaacgccgagcgcggacgggtagctgaatacgcactccgcctttccgaaataccagagcgacgcggaggtcgaccagtcgtcggcgcccttttcgtacccctctttcatcacgagctttgccgcggtctctgccgccttcgccgcggaggctccggagggattgtcctttacctttgcctcgactgttccggcggaggtctttatgcggattacggttccggcgtccgccttgtccgtcggagagcctgttatcgtgtatttcgtgccgtcctctgtctcgccctctatgccgctcacgtcatcgtcgtcgaccggagtcaggacgagggacagctccggcgtgtcgactatcagatcgtcgccgtctgtcgtcagtccgcgcccgtaaaagccgatgacgccccggctcccggcgaggtattcgctcgtctcctctccgtcgggcgagagaagtatcagaactattcccgcagccatcaggagaatgattccggagagcacgcagacgagcacgcggagaaccttattctgcttcatcagtccaccgccgatacaagcactatcgcggcgagcacgtaaagcacaccgagcagagcgacaagcccggagattatcgcgagcgcgaccctcgccccgccgcggagctttaaaagcgacaggataagcccaatgatgcctataacggcgagaaccgccgccatccagaccttcatatcacaactcccccgttcactgcgcgtcgatgagtagccatatttcctcaccgtcggtcaggtttccgtcttcccatctgagcccttcgacatacgaggcgtcttcgtcgagaagaaaatccgagtcggagtcgctccacctgtagacgtagagatattcagagccggtgtcgtcggaccacggaatgagaatatcagtgtgcccgttcttgtcgacgtcggcgaatatcagaccctcggtcgattttgaaaggtcagtcagcggagcgggaaggtcgaaggacgcgtaagtctcaggcgaatcctcggtgctgttgtctatgacggcgtagaagtatttctccccgagctcatacgcgagcgggacgtcgtttccgtcgtcattaacggtcgcgaacgaccacgcgcgccatgtgtgccagtcgcctccgacctcgtcgtcagccggagtatcgccgcaggacgcgagaagagcggtcgacgccgcgagaatcattgttataagaagttttttcatggtatatgtcctttcttgattatttgtttatgccaaggaaaacactgatttaaggttgttttcgcagaaaaaatcccataaatccaaggcttttttctgcgaaaacccgatttattcagtgtattccaagattaatcttcacgtcgtcgcgctttatggcgtccgcctcgaagaagggctgcgcgccgtagtgcgccgcggacgcgataaggctcgcaggaaatctcactcggagctgattgaacgccgagacgttcatgttgtacacccgtctcgccgcctgaagatgatcctccgcgtcgagaatcgcgtcctcgagcacgcggtagttctcgctcgagcgcagctccgggtacgcctcggcgatcacgcggagagattccgacgcgccgtcgagcttccggctgcaatccgccttctcggcgacgctcatgccctgccgcaactctatcgttttctgtatcgtgtcgacctcgtgcttcgcgtatgccctgacgacgtccatcatctttgtcagtgtgtcatagcgctttgtcagcgcgacgtctatcccggagtccgcctcctttatccggacgagcattgtcctgaactcgttcgacgtgctgacgagccagacgactatcgcggcggcgattatcgcgattccgataagaacgtaacctgtcgtgttcatgatatatcctcctgaatattattggtccgattttcccgcgccgtcagcaccggatggcttcgcgcggttctttatgatggcgcttatgtagatgttgtcgacgacggataagatgtcctgcatctcggtctttatccgctcacgctgttcgtttatcgtgcgggtcccggtctcgtttgcctcgagcgtgtcgccgttcgcgagggttatgtacagcttatcgttcctgaacgccgcctcgagcggacatttcagcttttcggacgcgtttatgaagccctcgagcaccggcggggtcagtatcctgagtgccgataccgcgtccttcgcgtctattctgaacagcttgttgaacgcgtctgactctgtaaggatgtcattttttccgggctttccggagcgccgcctgaccgcgaccggctcgccggagaacgcgtcgaagtccatcatcatcagcgttccggagaagacgaccaccttttcggtcgttgtgaccccgccgttctccgggtcgcccatgacctcacgctcgtcaagcatcgtgacgttcgactgcgtgaaggacaaatccctgtatttcgcctttatgaggtcgtttccgctgcactcggtgtgggccgggaagagccttgacgcgaggatgtcgggatacgggatcgattcggtcggtctgtagtcgaggtcgctcaggaattcctcaagcgcgggctttacgaccgcgtccttgaaggacagcttgtaatcgtcgaccataggctttatcgtcaccttgtagatcagcgcgattacggcgagcactatgacagcgacgacaccgatcatcgccgccccgcttataaacgcgacggcgcacgctatcgacgtcagaccctcgagaagctttatgatatttccgatagtctgcgcctttatgcgctttctctcgagctcacccgtgccgtccgcgtccgcctcggcgagagccctgaactgcacgcgcgcccgcacgatgccgagtatcgccgtggtcagcagcgagagcgcgccgaacacgagggcgtaaacgataatcgcgagcaccgcgccgatgaacgacggtgaattctcgaaaaacagcagagcgttcatcgcgggcagcagcgcgacgaaggcgatcacgacgcgcgacagcttgagaagcggcgagtcactgtcgagcgcgaacatttttctgaacatctgagaattgtcctttcttaatttctgatacaattataccacaaaaaaacgccctccggacgaaactgccttttttgtcaggttcgtccggagaacatgatattcagttgtctgccgaaatttccagacagtatccctcgccgcggaactgcgtgataaacaccccgtgaccctcgtcgagcttcgcgcggagccgcgacatctgcttccagagcgcgccgcagtcgtccgtgagcggctgtttccacaccgtctcgtagaggtattcgttcgagagtatcttcccctcgccgcgcacaaggagcagcagcagcgcgaactgcttcggcgtcagatacagatcctccccgcggaggaacgcctgcgacgagagtatgtcgagcttcagcgcgccgcgctctatgatatctccggaccgctcggcgcggttcatcccggagcgccgcatcagagccttcactctcgcgagcagaacctcatagtcatacggcttcggcagataatcgtcgccgcccgccgacagcccgcgcacgacgtccggattgctcccgagaccggtcaggatgagcaccggcatcccggagaacgccgggttggtcgaggcgcggagctccgagagaaggtcgagcccgttcccgtccgggagcatgagatcgaggatcatgagacgcggcgtctcttccccgataatttctttcgcgcccgcgatcgtttccgcggcggcgcaggtgtatcctgccttttcgagaaaatagcggtttccgtcaagtatgtgtctgttgtcttcgacgaggagtatgtctttcatatggttccttccttaatggtcagacctgaccggcgtagaccggcacggtgaaggttatcgcggcgccgccttcgggctggttttccgctgttacggttccaccgttcgcctcgattatcattttcacgatatacagcccgtagccggttccgccgctccctgagacgccgcgcgcgaagatgtcgggcaggagcttttccggtatgccctcgccggtgtcggagacggtcgtttttatcatgccgccgtcacggacggcttttatttgtatttcgcctccggaggtgtgccggttcgcgttctcgaaaaggttcgacaggacctcggcgaacaagtccgggtcgcagaataccggtggaagcccgggctcggtcaggtcggtgagggaattgtttttcttcgccgtcagggtagaccacgcctgcaccgtgtggcgtatcagggcagagtagtcggttttctgccttgagacgctttccctgaccgacgcgaggcttaaaagaccgttcacgagtctcgcgaggcgcattatttcgtcctgtgctccggcgaggagttctttcgtttccggggagctttcgcccgccatgtcggcggcgcgctggatgtctaccgagacgacggtcagcggggtgcgcatttcgtgcgacatatcggcgagcatcgcggttttgcggcggttcatctcggcgagcaggaggttgcgctcgtcgaggactttctgctgttttttgtacagccgtaagaggaagtatacggtcgagccgaggacgagcgcgacgacggcgaagcctgcgtagacgtccgagaggtacgcggcttcgctctcaagaggggtgatgagcgacgggcggagatacgccgtgaagatgcaggcggagtagacggcgagctcgagcccggcgaaaatgaacatctttgccccgtcgagcatgcagacggtgaagattacagcgaagagaaagaagcagggcattccgcttctgtatccgccgccgatgaagaacatcacggggaaggtgatgaggaagacggtgatggcggtgagggtgtagccgagctggcatctgccgcttatgttggtgagggcggtgaggagcagcgcgccggttccggcggcggcgttcatgagtgccatcatggcggttccgccctgaaagaccgtgattattgccatcatgtagctgatgatgatcccgccgagggcgagcatgttgaatatcctgagcctgaattcgagcttttcgtcgaacagcctgcttataagtcgttttatcatgacccctcctttggtttatctctgataatattgtaccgcagaattgcggcaatgtcaagagtataaagcttttgaaaggggtgcagggggaaacttttctccgaaaagtttccccctgcgttacttacacatggcagtatttgtcttttttgctctcgggaatgattctgaattctgtcgtccccgtgaatctcttgtgcgtgaatccgtcgtcgaactgccagcctgcttcgagggcaatttcggcttttgcgccttcggggagggtgacggagtagaggatttcgtcgtcgtcgcgtttccagctgattctgacttcgccggcaggagcgttgtaggtggcttcggcgtggtcgagggcggcgatgaatttcggcgcgaggaggaattcgttggggtttcttctgtaggggttgacgttcagaccgatgagattcttcatgaaccatgagatgtagtcgcagaagaagtggtggttgcgggagttcggggcgtcatctacacggcggaagtcttcccagatcgaggtggcgccgtttgctatctggtagccgtaggacgggaattcttctttggtgatcattttgtaggcgaggtcggtgtgaccgtaggcggagaggacgtggaagatgactctgagaccgaggatgccgcagtcgaaggagtcgttttcgccatggatgaggtcgatgagcttttcgacggcgcgcggcttctcggcgtcggagaagatgtcgtagaagactgccattgcctgggtcgtttggcatctgccgagggcggtcgcggtgctgtggtcgatgaggtggagtctcgcggaggcgcggagttctccggcgacggtttcagcgaaggtctgctgtaccttcatgcccattgcttcatacattctggcggctttgtcgcagatgtctatgcagatgacggtgtcggtgaactcgagcggggctatgtagtgtccgtcgcgcgcggtcgggcaccagtcgccgagacctatgtgtatgagtccgttttcgtcgcggcgggtcgttatgtagtttatgtagcggagcatatttgccgcgcactcgcgcattatcgtctgatcgccggtgtagatccacgtgaaatacggaatgttgaagaggacgatgtcccacgcgggtccgttgccccacgcgtagccccatccggaggtcgggatgattccgggcagttcgccggagagcttcatcgatttgcagatgttgcggagccattcgcgccagttgcgctcgggggtgagagccatcgtcatctgctccgcagagagagccgcgtctccggtccagccgttcttttcgcggtgcgggcagtcggtcgggaagtggaagaagttcgcgcagtcggagactattgccgcgtcccacagcttgttcgccatctcgtccgagcagcggaaggtcgagcgggtcttaaatgacgtgttcatgacgacatatgtcagaaggtcgggggtcgcctgcgcttcgtcgatgccggtgacgagaacgtactcgaagccgtgataggtgaaggacggcatccatgtctcgtctccgccgcggcatatatatatgtcgcggtgattgtatctcctcggcaggaagggcattccgcgcatatcgagcccgccgtcctcagtcagcgtctccccgaactggagaacgatcttctgacccgggcgcgcgttcttgatatggagacggcagagtccggcggcgttcacgccgaaatcgtagatgaaaccattctcaggcttctcgtcctcaggatattcaaacatgatctcgtcggagagcggagcgagcagcgcctgcttccattcgaagttcttcgagattctgccgggctttatcgagacgggcttaatctcacgcgtcgggaggatcgggtcgcagtcgcagatacggcactctccgcgcggggtttcggcggggatcgtctctctccacgcggacgcgtcgaagcccggcctgttccagcccggaatttcacgccttgcgtcatagaactcgccgacacgcagatcgtcaaggtaaacgggagactcggtgcagacgaaaccgtcagccgcgtcgaactcagtctttgtgccgtcctctgagacagactcgaaggtcagcgcgaatttcggcgcgcttctgaatctcgccttctcgaactcccagacctgaccgccgaagcagtcgatcatgccgtttccgagctgtacaccgatgacgttctcgccctcggtgaggtacggcgtcaggtcgtaattgtcatagtagaggatatcgtccgggttcgcgatgtaggacgagagcagcccgcgggtgatccgctgtccgtttatgaagagctcatagaacccgagcccgcagatcgtcacctcggcggacgagacctttccgggtgtgaacgactttctgaaatacggcgagggaatctgcttctcgaaagtcgagtactcgcgggtcgccgagacgaatctggttgaaaatttcatgttctggtttcctttctgaatggacatgatttataattacattatacacgaccatcggtcgtttgtcaagcaccacgagaaaaaagataattctgataacggatttcgacaaataatgaccggtttttgacaacaatcgcggagccggaaacgaaaaaggagccgcggacggctccctcgtgattattcggttttcgcttcagcggtctctggtttcgcttcttccggcgccatgacaccggttctcgcgctcgagaacatacgcgagagaacatagagaccgatcgccgcctcagccgcgcgcacgagataactgtcggtgttaccgatcagcagcttcgacgggaagagcagctccggaatcgtcgcggtcagcagcatcacgaccgctaccggagccgacgcgtagaacagcgccgccgacgtacgaccaagctgaaaacgcgactcagacaggaaatacaccattcccgcgagaagcgcgagctcgtgcatcgtctttcccgggctcgtcgtcaggagcgaagtgtcgaaataagtatttatgagatctgtcgccatgaacgccgtcgggaagaaggacgcgattgtcatcgccgcaggggatctgtcaccacttttgacgttcgcgaggaaatacagtaccgagccgagaccgaagactatcgtcaggatcccgattgcgtcggcggacgcttttttcgtcacgatattcatgaccgagatgatgatgtctgccgcgatgagaaacgccgatatgcaggacgcgaaaaccgacagatccccgaccttggggatttcgggtactccgagcttctttctcatcgcgagcgggatcacgatgaacgcgaggcagaccagcgcgagaattatatgataaatagtcggaagcactttgccgcgcttgtagactccgtacttaacgtcaagatcggtcagcgtgagtataatccgcacggcgattgatatgagcgccgtcacggcggcagccgccggaaggataaaggcacgggatttcttttccataattatatatataccacccggcacataccgggacttcctttcagaaaccgaaatataagatatacaaaaatattataaaccatatatatgaacgtgctgttaagattcgccggtttttataataatttccggctctgagcggtttatgaaccgccggaaaaggaaaagaaaacggtgtttgtgatatatgcacaaaaattgcctcgaaagtttggcgaatattttcacgtgaaaatcgaaaaaaattatcccggggtattgattttttccggagtttggtgtataatataggagttgacgtgcgttttatggtgaaaggttgcagcacatcactgagcggttctgccgcgcggcgatacgctgggaatttccaccggagtatgtccgatatctaaccgggcgttgtcaattcggagtcctgcaccggatattttgaaagctctcttccgtagaatctacggattttatgattggggcaaagaaacacccgacgcagtgttccgaaataaaccgccctccaagtcaaagtaaggaggcaaaaacaatggcagtcaaggaaaaaatcagaattcgtctgaaaagctacgacagcaccctggtcgatcaggcagctgagaagatcgttgagaccgcaaagcgcaatgacgcggcagtttccggtccgattccgctcccgaccgaaaaggagatcatcacgatccttcgtgcggtccacaagtacaaggacagccgcgagcagttcgaaatgagaactcataagagactgatcgacgtgctgaagccctcgcagaagacagtcgaagctctgatgggactcgaattacccgccggcgtagagatagagatcaagctttaatctcacgcggcaaaccaaggtcatgttggcgtacaggcttcattaaaacctgaatctaaagcgtcaaccaataatcatgggaggaaaacaaaatgaaaaaaggcattatcggaaagaaagtcggtatgacccagatctttgacgagatcggaaacgtcattccggtgactgttatcgaggctggtccctgcgtcgtcgtccagaagaagacggtcgacaacgacggctacgatgcagtgcagctcggcttcggcggcgctaaggaaaagcacctcacgaaggctgatctcggccacttcaagaaggccggatgcgagaacaagaagcatctgaaggaattccgtcttgaggacgccgcttcgatgaatgtcggtgacacgattaccgccgataccttcgccgctggcgagaaggtcgatgtaaccggtacatccaagggtcacggatattcgggcgccgtcaagagatggggtcatcacattcttcgcatgactcacggtaccggtcctatccaccgtcaggtcggttccatgggcgcgaactccactccttcgagagtgttcaagaacaagaagatggcaggtcagtacggtaacgtcaagtctaccgttctgaacctcgaagttgtcaaagtagacgcggaaaagaatctcatcgcggtcaagggcgcagttcccggatcccgcggcaacatcgtattcctccgcgactctgtaaaagcataagcggaaggaggaaatcactatgcctaacatgaaggttatggatatggccggcaaggaagtcggcgagatcaccttatctgacgccgtattcggcagagaggtaaacggtgcggttctccatatcgctgtaaagtcgtacctcgcaaatcagagacagggcactcagtccacaaagacccgtaccgaggtctccggcggcggaaagaagccgtggaagcagaagggcaccggtcacgcaagacaggggtcgacccgttctcctcagtggactcacggcggcgtggctctcggcccgaagcccagaagctaccgcttcgagataaacaagaaggtcaagagaatcgctcttcagagcgcgttctcctctaaggtcgagaccggcgacatgatcgtcgtcgacgctatcaagaccgaggagtacaagaccaagaccatggctaatatgctgaaggctctcggcagcgacaagaaggctctcgtagtcctcgctgacaacgatgccaaggtcgttaagagcatggcaaatatccccggcgtaaagaccgcacttgtcaacacggtcaacgtgtatgacgtccttaactgcgataagttcatcgtggtcaagagcgcggcagaaaaaatggaggaggtgtacgcataatgaaaacggtgcacgatatcattgtaaagccgatcattaccgaagacagcatggcgagaaccgctgacaagaaatacaccttcgaggtaatgtccggagcaacgaagcccgagatcgctaaggcggtcgaggagctgttcaaggtcgacgtattatgcgtcaacactgtcagcatgaagaagaagccgaagagactcggatatcatcagggttacacctctgaatggaaaaaggctatcgtcactctgaagccggattccaagccgatcgagttcttcgaaggcatgatgtaatcgaggaggagtgaaaaatgtctactactttcaagcccacgactccgtcgagaagacacatgagcgacccgtccttcgctgagatcacaaaattcagccctgagaagaagctcactgtcattctcaagaagactgccggacgcaacagctacggcaagatcaccgtccgtcacatcggcggcggcaacaagaagaagtacagaatcatcgatttcaagcgcatggaggctggaaagcccgctaccgtcatcggaatcgagtacgatcctaacagaaccgcgtatatcgctctcattgagtatgagaacggcgagagaagctacattctggctcctgcgggtctgaaggacggcgacgtcatttactccggcgctgattctgatataaagaccggcaactcgcttcctatcgcgaatatcccggttggtaccttcatccacaacattgagctttatccgggcaagggcgcacagctcgtccgctccgctggcgctgccgcacagctgatggctaaggagaacggaatggctcaggtcagacttccttccggtgaagtccgcctcgtcagacttgactgtgtcgcgacgatcggtcaggtcggcaatatcgaacacgagaacgtcaagctcggcaaggccggcaagacccgccacagaggcatccgtcctcatgtccgcggttcggtcatgaacccgtgcgaccacccgcatggtggtggtgagggccgcgctcctatcggtcgtccgtctcctgtaactccttggggcaagcctaccaacggttataagacgagaaacaagaaggcacgcaccaataagttcatcgtgaagtccagaaacggcaagtaagagagaaggaggcaccattaaatgagcagaagtcttaaaaaaggacctttcgtcgaaaagaagctctttgacagaatcgaagccatgaacgagaagaacgagaagaaggttctgaagacatggtcgcgcgcttctacgatcttcccggaattcgtcggtcacacgatcgccgttcacgacggtcacaagcacgttccggtatatgttaccgaggatatggtcgggcataagctcggcgagttcgctcccacgaggaccttcaagggccacgccggatccaagacctcgaacaacggcaactgatctaagaattctaaaactgaacccgccgctggccgtcatggtgtgacggcacagaccggcgcatcgcttttagcgaagggaggataacgaaacaatggaagcaagagaagccaaggcatacctcaagtatgtcagaatatctcctcgcaaggtgaaggtcgttctcgatctcatcagaggcaaggacgcagctaccgctatgggtatcattaagaacaccccgaagagcgcgtccgaatatctcgagaagctgcttaagagcgcggtcgccaacgccgagaacaacttcggcatggacgcgtccaagctttatgtttccgaatgctttgtctgcccgggaccgactctcaagcgcatcatgccgagagcacagggaagagcattcagaatactcaagagaaccagccacatcaccctggcagtcaaggaaaaagaataatccgaaaaggaggtcaatgccaaaatgggtcagaaagtcaatccccacggtttacgcgtgggcgttataaagaactgggattccagatggtacgtccgtgacgaagaattcagcgacacgctcgtttccgactacaatctcagaaagtatctcaaagagaagctccaggcagccggcgttccgaagatcgagatcgagcgcgacagccagaaggtaagagtcttcattcactgcgcaaagcccggcaccatcatcggtaagggcggcacggagatcgagaagctcagactcgagatcgagcagatcgtcaagaagccggtttcggtcaacgtcgtcgaggtaagaagccccgacctcaacgctcagctcgtcgctgagaacatcgcgagccagctcgagcgccgtatcggtttcagacgcgctatgaagcagtgcatcggcagaaccatcaagctcggcgcgaagggcatcaagatcagctgcggcggccgtctcggcggcgcggaaatcgctcgtaccgagcactaccatgagggtaccattccgcttcagactctccgcgcagacatcgactacggtttcgcagaggcaaacaccacctacggtaagatcggcataaaggtctggatctacaagggtgaggtcctcaacggcgcgaaggcaagagttgaagtcgagcagccgaaggctccgagagcaaacgacagaaacgacagaggcgacagacgtgatcgccgtgaccgtcgtccgcgcggtgacagaccggcgcgccgcgacaacaattccgacagaaaggagcagtaatcaccatgttaatgcctaagagagtgaaatacagacgcgtacagcgcggaagaatgaagggcaaggcttcccgcggtaacgtcataagcaacggcacctatggtcttgttgctcttgagccggcatggatcaccagcaaccagatcgaggcggctcgtatcgcaatgacccgttacatcaagcgtggcggtcaggtctggataaagatcttcccggataagccggtaaccgaaaagccggctgagacccgaatgggttccggtaaaggttcgcctgagtactgggtcgcagtcgtcaagccgggcagagtactgttcgagatggacggcatcgatgaggctaccgcgcgtgaggcaatgcgtctcgcgggccacaagcttccgataaagaccaagttcatgatgaaagaaaccgcagaagcagcgacaagcgaaggggaggaataagccgtgaaagcaaaagagttacgggatatgaccggcgatgagctcaacgctaagctgaaagagctcaagaacgagcttttcaatctccgcttccagcacgcgatcaatcagcttgacaacccccacaagatcgtggacgtcaagaaagacatcgctcgcgtaatgacgattcttcaagagaagaatgcgtaagttaaggaaggagaaaagtcatgagtgaagcagcagagcgcaatctcagaaagacccgccagggcgtcgtcgtcagcgataagatggacaagacccgcgtggtcgctatccttgacaacgtgaagcaccctgtctatggcaaggtcgtcaagcgtaccgtcaagatccatgtccgcgacgagaagaacgagacctgcataggcgataaggtaagcgttatggaaacaagacctctctccaagactgtgagatggcgtcttgtcgagatagtcgaaaaggcaaaataattaggcttataaataagtaggcacgtcgttgcgtgccgaagcaaggaggataagcacagtgatacagcaacagacacttatgaaggttgccgataacaccggtgcaaaggagctcatgtgcatccgagtcatcggcggcactgctcgcagatacgccaacatcggcgatatcgtgatttgcgctgttaaaaaagcaacgcccggcggcgttgtcaagaagggcgaggtcgtcaaggctgtcgttgtgagaagcgtcaagggtctgagaagagccgacggttcctacatcaagtttgacgagaacgccgcggtaatcatcaaggacgataagaccccgaagggaacccgtatttttggcccggtggcaagagagcttcgcgaaggcgactacctgaagatcctctccctcgctcccgaagtattataataggaggtatcttaaaatgaataaacaggttcacgttaagaaagacgataccgttattgtaatttccggcgacgacaagggcaagaagggcaaggtcctcgaggtctccccgaaggaaggcaaggtaatcgttcagggaatcaacatcgtgacgaagcacgcaaagccgcgccgtcagggcgagcagggcggaatcgtcaaggttgagggcgctatgtacgccgacaaggttcagctctactgcgcaaagtgcggcaagggcgtccgtgccaagaccaagatggacggcgacaagaaagtccgcgtttgcgcaaaatgcggcgaaaatctgtgagtggaggagaaatagatcatggcaagactgaaagatttatacaagaatgacgttgctcccgcgctcatgaagaagttcgcttacaagagcccgatgcagatcccgaagctcgacaagatcgtggtcaacgtcggtaccggcgacgccaaggacaacgcgaaggtcatcgacaccgttatctccgagatcactatgatcaccggacagaaggcagttccgacctacgcaaagaagtcggtcgctaacttcaagctccgtcagggcatgaagatcggcgtgaaggtaactcttcgcggcgacagaatgtatgagttcatggacagactcttcaacttctctctcccgagagtccgtgacttcaagggtatcaacccgaacgctttcgacggccgcggcaactattcgctcggtctgaaggagcagctgatcttcccggaaatcgagtacgataagatcgagaagatccgtggtatggacatcgcgttcgtaaccaccgccaacaccgatgaggaagcaagagagctgctcactctgatgggcgctcccttcgcaaagtaaggagaagacaaatggcaaagaaatcaatgattctgaagcagcagaagccgcagaaattctccacccgtgaatacaaccgctgcaagatctgcggtcgtccgcacgcgtacctcagaaagtacggaatctgccgtatctgcttccgtgagctcgcatacaagggcgagatcccgggtgtcagaaaggcttcctggtaattcgtcggtaataccggctgattacaggcgacgtgagatcgcctgaataaaaatcgctccaatcttaccggaaggaagaagcagatatcgctccggcggcatctgctgtcttaaccaccggttgcaggccgggtgacaccggcagcaagggttatagcgtacttgcataaaggaggataaaacaatgcaaatctctgacgttatcgcggatatgctcacaagaatccgcaacgcaaacgacgccaagcatcagaccgtcgacgttccggcttccaacatgaagaagtcgatcgccgatatactcgtgaacgagggctacatcaagtcctatcaggtcatcgaggacggcaagcagggcgttatccgtatcaccctgaagtatggccagaacaagtccaaggtcatcaagggtcttcgccgtgtttccaagcccggtctccgcatctactcgaactgcgaggatatgccgaaggtcatgaacggactcggaatcgcaatcatctctacctccaagggcatcatgaccgacaaggcggctcgcgccaacaatgtcggcggtgaagttctcgcctttgtatggtaatcggcaggaggagaatataatgtctagaataggaagaaagccgatcgccattcccgcaggtgtcgatgtcaccatcgcggacggaaacgttgtcaccgtcaagggaccgaagggtaccctcaccgagaccttcaacggtcgtatgaccatcacgaaggaaggcaacgagattcacgtcacccgtcccaccgacgagaaggaagatcgcgcgattcacggactcacccgtactcttatccacaatatggtcgagggcgtaacgaacggcttctccaagaagctcgagatcaacggtgtcggttatcgtgcccagaaggcaggaaagaccctcactctcaacctcggttattcgcacgtgatcaccttcgacgagttcgacgacatcaagtttgatgttccgtcgcagaccgagatcatcgtttcgggcatcaacaagcagactgtcggccagattgccgctcagatccgcgagaagagaccgcctgagccctacctcggaaaaggtatcagatacactggcgagcatattcgccgcaaggccggtaagaccggtaagtaatgaaaggagtggacttgcatggtatcgagaaaggacagtaatatacagcgccttaagagacacaagagagtcagagccaagatttccggcactgaagctcgtccgcgtctctgcgtatatcgttcgctcaacaacatctcggctcaggttatcgatgatgttaagggcgtgactcttgcagccgctacctcccaggaaaagtctttcggcggtaatggcggaaacaaggaagccgcaaagcaggtcggcaagctgattgccgagcgcgcagcggcaaagggtatcaccgaggtcgtcttcgaccgcggcggatacgtttaccacggtcgtgtattggagcttgcggaaggcgcaagagaaggcggactcaagttctgagtccggcaaaaccgaagcgagggacatttattgtctttcgctctggttaagaccagtttatacacggtttgaatgaattttcatccaaatttaataacagagaggaaaacaggttataatcgacagagattattataaaaacctgtgtggcaaacaaaaatggcaaaacagaattttgatccggcaactctcgatcttcaggaaaccgccgttgcgataaagcgcgtttcgaagaccgtcaagggcggccgcgtcatgagattcaccgcgctgatggtcgtcggcgacggcaacggtcacgtaggctacggcctcggtaaggctgccgaagttccggacgctatccgcaagggtatcgaggacgcaaagaagaacatgatcgaggtttccctcaagggcagcaccatcccgcacgaagtgctcggcatctacggcgcaggtaaggtccttctgaagccggctgctcccggtaccggcgttatcgccggaggcgcagtccgtgcggtcgttgagaaggcgggcattggcaacatcagaaccaagtgcctccgttccaacaacccggtcaacgtcatcaaagctacgttcgagggtctgaagtcgctccgcaccgctgaagaggtcgcggctatgcgcggaatcagcgtcgagaacgtgacgaaataaggaggctttataagatggcaaacgcaaagatcacacttgtaaagagccttatcggagcaaagcccaatcagaaggctaccgcggcttccctcggcctcaagaaggtcggcgacgtcgcaattcatgccgataatgaagttctcggcggcaaggttaaggttatttctcaccttgtaaagaaggaagaggcgtaagccccaaaggcttcgcgagtcttaaattcaaaagcaacttaaatttctatataaggaggaaaaaccaatgaagctccatgaactttcgcccgcagcaggctcggtaactccggcttggcgcaagggcagaggcaccggctccggaaacggcaagaccgccggtaagggtcataagggtcagaacgctcgctccggcggcggtgtaagacctggtttcgagggcggtcagatcccgctttacagaaaacttccgaagagaggcttccataacaagttcgcaaagaactatgctatcgtgaacgtttcggcgcttaacgtctttgaagacggcgcgaccgttaacctcgcagctcttatggaaaagggcattattcgtaacgcgtatgatggactcaaagtgttaggcaacggagaaatcgcaaagaagcttaccgttgaagcatcggtcttttcagcaactgcgaaagaaaagatagaagcagcgggcggaaagaccgaggtgatctaagttgttcaaaacacttagaaacgctttctcgcttcccgagcttcgcaagaagattctctatgtcatcttcatcatcgttctgtatcgtataggcgcggcaataccgatcccgtacatcaacgcttcgatgatggatacgataaagggtctcggaaacggttctatccttcagtatatgagtatactgtcgggtaccgcgttctcccgtgcgacactgttcgcactctccatctccccgtatatcaacgcgtcgatcatcatccagctcctctgcaccgccattcccgcactcgagaatatggcgaaggaagaggacggcagaaacaagatcacgcagatcacccgttatgtgaccgtcggtctcgcgcttatcacggcttacggttactacatgatgctccgcaattacggtcttatcatcaataagagcgtattctcggctatcgttatcatcgcttgctacaccgcgggctcctgccttatcatgtggctcggcgagaagatcaacgagaacggcatcggcaacggtatttcgatcatacttttcgtcaacatcgtctcctccatgccctctgttttcggtatgcttatcagctacttcaagaacggcatcggcggaatcatcaccgcaatcgtcactatcatcatcgcggtcttcatggttgtgttcatcatattcatgaccaactctgaaagacgtctgccgatccagtacgctaagcgcgtcgtcggcagaaagatgtacggcggtcagagctccactctcccgctgaagctgaacatggccggcgtcatgccgatcatcttcgcgaactccattctggcgcttccgagcaccatcgcgatgttcttcccgactcctaaagagggcaccttctggtatggtttccagagactgttctcctatacgtcgtggctgtacgccgtggtgttcatggtgctgatcgtcttcttctcctacttctacatcgcgatctcgttcaacccgatcgaggtgtcaaacaacctgaagaagaacggcggcttcatccccggaatccgccctggcaagccgactgccgattacatcacgaaggtcctcaataaggtaactcttatgggcgcattcttcctcggtgtcatcgcggttcttccgcttgccgctaacatcatctcgggcaacagaatctccggcatcgctttcgcgggcacttcgatcataattgtggtcggcgtcgcgctcgagaccgctcgtgagatcgaggctcagatgaccatgcgtcactacaagggcttccttgaataagatcgattacttccgcttcggtgagaccggtaacccggcttcaccgtccgggagaccgatcgcaacttaaaacatggagaattgattaatgaacatgattttccttggcgcacccggcgccggcaaaggcactcaggctgagatcgtttccgaaaagtactcgatccccgctgtttccacgggcgcgatcatccgagaagcaatcaagaatcagaccgaaatgggcaaggctgcaagggagtacaccgaaaaaggcgcgctcgtcccggacgaggtcgtcatcgggatcatcaaggaccgtctcgcggcggatgactgcaagaacggcttcatccttgacggtttcccccgcaccgttcctcaggcggaagcgcttgataagatgggcgtgaacatcgaccttgtcatcgacattgaagttccggacgaaaagataatcgagagaatgaccggcagacgcgtctgcgcgaagtgcggagcttcctatcacacggtatacaacccgtcgaaggattcgaagaactgcgacaagtgcggcgaggagctgaccatccgcaaggatgacgctccggaggtcgtcaagtcccgtctcgcaacctaccacgaacagaccgagccgctcaaggagtactactcgaagaccggcaagctcgcggtggtggtcggacaggaagaggtcgccgatactacggcgctcactctcggtctcatcgaagagaaaaaaggcagtaaataatgatatcggtaaaaaactctgatcagataaaactgatgaaggaggccggcaggatcaccggtgagtcgattctgctcgcggccgaggccatccgccccggcgttaccacgaagcagctcgataccatcatcagacggcatatcgagagtcagggcgcaaagccctccttcctcggttacggcggattccccggaagcgcctgcatcagtatcaacgatcaggtgattcacggtatccccggtccccgcgtcatcgacgagggagacattgtcaagatcgacgtcggagctttctataagggcttccacggcgacagcgcgaacactttcccctgcggaaggataagcgccgaggcacagcgcctcattgacgtaacgagagagagcttctggaggggcatcgccgaggcgaagccaggaaaccgtgtcggcgatataggtcacgcggttcagtcctatgttgaggagaacggcttctccgttgtcagacgctatgtcggacacggagtcggcgaggagcttcacatggagccggatgttccgaatttcggtacgaagggacgcggagtacggctttacgccggaatgaccatcgcggtcgagcctatggttaacatcggtggaccggatgtcagagagcttcgcgacaagtggacggtggtcactgaggacgggacgctgtcggctcactacgagcattcgatagcgatcacgaacgacggacctatcgttctgacaaaagtcgattgaacaggagggattattctgccgaaggacgacgttgtagaattcgagggtacggtaattgaggcactgcctaacgccgtattcaaggtggagctgtccaatgggcatatcatcactgcccacatatccggtaagctccgtatgaactatatcaagatcctccccggagacaaggtcacggttgaagtcagcgtgtatgaccttacgaagggcaggataacctggagagcgaagtaatctccggggccgtatacgaaatcacgtattgtgagaaaggcatggtgaacacaatgaaagtgaaaccgtccgttaagaagatctgcgagaagtgcaagatcatcaagagaaaaggtcacgttatggtcatctgcgaaaacccgaagcacaagcagagacagggctgagttttcagtctaaaaccacaaccaactaactaaaaggggtgaattaacgaatggcacgtattgccggtgttgatattccaaacaacaagagagttgaaatcgctctcacctacatttacggtatcggactcaagagctcgaaggacattctgaagattaccgggatcgatcccgataagagagcgaaggatctcaccgaggaagagaccgcgaagctcagagaagagatcgaaaagaactaccacgttgaaggtgacctccgccgtgacgtcgctctcaacatcaagcgcatgatcgagatcaactgctaccgcggaatcagacacagaaagggtctgcccgtaagaggccagaggaccaagaccaacgcgcgtaccagaaagggtcccgcaaagaccatcgcgaataagaagaagtaaggagtgactaaagatggctaaagtacaggctgcagctaaaaaggtagtcaagaaacgccgtgagcgcaagaacatcgaaaagggttcggctcatatccgcgctaccttcaacaatacgatcgtaaccattaccgacgtagcaggaaatgccgtgtcgtgggcttccgccggagagcttggtttcaagggctccagaaaatccactccttacgcggctcagatggctgctgaaacggctgccaaggctgctatggatcacggtatgaagaccgttgaggttttcgtcaagggccccggcgcaggacgcgaatccgcaatccgcgcgcttcaggcgaccggtcttgacatcagcctcatcaaggacgtgacgccgatacctcacaacggctgccgtccgcctaaacgccgccgcgtttaactctgacaggaggataaaagaatcatggctaaaaacaaccagcctatcgcaaagcgctgcaagactctcggaatctctccggcagtcatgggttacgacaagaagaacaccacccgcaacagcgccgcaaagccccgtaagaagggtgagtacgcaactcagcttcaggagaagcagaaggcaaagttcatctacggcgtcatggagaagcagttccacaactactatctcaaggccgagaagatggccggcaagaccggtgagaaccttctctcgcttcttgagcgccgcctcgacaacgtcgtcttccgtatgggactcgcaaagacccgccgcgaagcacgtcttctcgtgagccacgctcattacaccgtcaacggcaagaagtgcaacattccgtcctacctcgtttcggtcggcgacgttatcgcagtcagcgagaacagccgcggatccgagaagttcaagggtctcatcgagggcatggattcggttatcgcaccgaagtggcttgagcttgacaaggcgaatggcgcagcgaaggtcaccgcgctccctgtgcgcgacgacatcgacttcccgttcgaagagcagctcatcgtcgaattgtattccaagtaataacagcctcctatatacccagtacacaaaggctgtgtttataatcaaaggagggttattgaatgatagaaatagagaagcccaatattgcgaccgttaatctgagcgaagacggcaagagcggtaagttcattatcgagcctctggagcgcggatacggaataactctcggaaattcgctgagaagagtacttttaagctcacttccgggcgttgcggtggtaagcatcaagatcgacggcgttctgcacgagatatccacgatcccgggtgtcaaggaagacgtcaccgagatcgtcctcaatgtcaagggcataacggctaagctgcataccagcggacccaagacggttactatcgacgtcaacggacaggcgaacgttaccgcgggcgatatcaagcaggatgcggacatcgaaatcctcaaccctgagcatcatatcgcgacagtcagcgaggggacccgcttctacatggagctgaccttcgatcacggcagaggatatgtctctcaggagaagaacaagcagaataacccctctgtgatcggactgatctataccgattcgatatacacgcccgtatacaatgtgaactatacggtcgagaatacccgcgtcggaagcaacaccgattacgacaagcttacgcttgaggtattgactaacggtacaatttcggctaaggaagctatctcacttggcgccaagatactcaacgagcatctcaacctctttgtcgatctttcggatgaggcaaagaaggcggaaatcatggttgagcgcgaagagacaatcaaggaaaaagttcttgagatgaccattgaggagcttgacatgtcggtcagaagcttcaactgcttgaagcgcgccggcatcgatacggttgaagatcttaccaaccgcaccgaggaggacatgataaaggtccgcaacctcggaaagaaatcgctcgaagaggtaattcagaagttacactctctcggccttgatctgaagaaggaagaggaataattccgaagagcgtcggtcggcggcgatattgccgtctgaccgcgcccggaatcgttcgctcgcccgacatactttactgatccacaaaaggagggaattccaatgcccggaaccagaaagctcggcagaaccaccgcgcatagaaaagcaatgctcagaggcatggtgacttatctgcttgagaacggttgtatagagaccacccttacacgtgctaaggaggtccgcagcctcgcagagaagatgatcactctcggcaaggaaaatacactcgcatcccgccgcgaggctcttgccttcatcacgaaggaagacgtcgtaaagaagctgtttgacgtgatcgctcccgattacgcagacgtaaatggcggttacacccagatatacaagctcggtccgcgccgcggcgacgcagctgagatggctctcatcaagctgaccaagtttgacaatatcaagaagccggaagaaaagtccgctaagaaggcagacaaggcgccggcagcggctgacgctgaataagcgaaagctcaccgagatgaccgttctatgagttatcattgatcggatcgcttgaaaaaacatacccgttgtcccaaaagaccggagccgcaaggcgcaggtctccggacggcgggttttgtttttatcattcaaggtggaagattccggaggtttccgcgtctttataagtgaaggggtgaggggactttatgaaacgtgctctgataggctgtatgacagtcgttttcatgctcatcgtgtcttgcggcggcgggggaaagacgctgtctatgcgagacgaatactttttccggaacgcggaggggcttccgctcggggaagtcgataccggctgcccttataaagtgaattaccgcaccggagctgtcacgcctgtctgcgtcgatccgctctgcgggcatgacgatggcggatgtccgttctatgaggcggagcagtgtgtgccgtccggtaacactatgttcttcatccgcggagagatgtctgtcgacaaaaatacaggggagcgctccgggaaggtcgcgctctgcgcgtatgatatgctgaacggagacacgaaggaaatcggagcgtttgaggacgcgctgtcaatcatcgcggcggcggagggcagagtgtatttctacaggctcattccggatagtgacggagctcgcgcgaagtatcatt

SEQ ID NO: 3662 - DNA, 5771 bp, Unknown
  16S sequences of unknown bacteria
gcttcatcgccgccgttgcggatgccgcggcggagttcacgccgccggatccctgacaagcaaagacctcctgtttcggtacatcggtaccgcggcaggaggtcttatatttttttacttatttgcacggaaaatgcggcattttcactttttgccgaatattcctttcgggtccttaaaaacaagaacaataagccatgcgataaatccgatgacaaccgccgcaagtccgagaatcaaatcattcagcacttccgacggctcgggtgaaaagtaatcggctctaagctctatgtattcggcaataaaatccacaaaccacataagtgttgcgccccagaaaataagcgaaagggtgccgagacgataaagatttctgttttcgttcatgtaccaaacaaccgtcgaaacggcggctgccgcggcagttacaagcatcgtcatttaacgttcctccggttaagcctttgagcaagcggtgtctttttcggattttttcagctttgcgtcgacaaaaagacaggcagcgccccaaacggccgttacaagagctgccatggaaacgccgaccgtggccatttcataaagcatttcccttgtgtcgtcggggctcatcattgccgtcaaaaacggcgggaagggctgaatttctccgtgccaaatatgctcgaaaacgaggagcaaaacaccgccccacaaaagtcccacaagccaagaaagctttcttgaaaaggaaacccttgaagatttttcctttacggtatctgtctttacgtctcctttaaattcaattttcttttctcttttctttgccgctgcgtacaaagcggtgacaacgaccgcctctgccgcaggaaccaatacacaagccatatttttctcctttaattgttccaagaatttatctgttctctgagccagtttgcaaaagcctctgttccctctcccgtttttgcgcttataaaaaatatttcgcacttggggttgagctttttaatgcgctcggtgaccttgtcgaaatcaaagtcaaacacgctcaccgtgtcgattttatttatgagaacgcagtcgcacaccgaaaacatcagcggatatttcagcggtttgtcgtctccctcgggaaccgacaaaatcatcgcgttcttgcttgctcccgtgtcaaattctgcggggcaaaccaaatttcccacattttcgagcacaacaaaatcaaactcgtcggcgccgaagctgtcaagcccttgctttgtcatacctgcgtcaagatggcacattccgccggtgtgcagctgaatcgagcgcacacccgcctgcgaaatggccgccgcgtcaacatcgctgtcgatgtcggcctccataacccccattttatactcgtcccgaagcgcctcggcaattcttttgagggtcgtggtctttccgctgccgggagacgacataagattcaaaagaaaggttttgtcctttttcagcctttctctgagcttgtcggcctcgcggtcgttgttttcaaagaccgagcgtttgatttctattaccttgtaatccttcatgatatttccgtccaatcctgtaatcggtgattatttgccctcggaaacggctctttccatggcaagcttgtagtctttctgatatgtaaatatctcgtttttatacggatttgtctttgtttcaatcgctctcttataaatcattgcgagcacgacaacattaaccgcaagggcaagaatcgcaataataccctgtgctctcgggtcggctccggcgggggcgacggcggaattcatgacatacccatcgggataaaccgacggataaaccgaaaatttgttgcttaacataaagcccgggacgatctgagcaaacatacaccaaagcgcgagtgtgttggcgcggttttgaatccatccgcccttgttccaaagagcatttgcaaaggtgggcgcaagaagcagcgcaaggccgcaataccaactgtgggtgggaagattgttgtatgtatattcgaaattccaaatgtcataggcaagtatatagcaccatgtcatgtcgggccaaagcatatcttttttgtccttcgactgataaatgccccaccagccggtcatacacagaatgtttattatgcccgcaatgccgttgacccagttccaccagccgccgtatatccatactccctcgttcgaaaaccaccacgcggagccggtttcccgaagagccgcagcgccctttatggcagattcgaaatcggaggcgacggcaataagaatatttatcgcaacaattaaaaacgggaaaaccttaaaccaatcggtttttccgataccccatttatatttaaggagcatgaagccgatacatccgattgtggccgcatagagcttggcataatggaaccagccgttcatgtgcagataggtcggattgttaagcgcccactcggcgccgttttgaaccccgatggcaatggcggcaaaatataccgtcaaagctgccggcacgacaataaagcagaaaattccacccgccttgctgcgtctcgcgatctcattaagcaaaatgagacccataaacaccaaaaaccaaccgagcagctgagtaacagccgcgtcaccgtaaatgtgataaaacatttttcgtttctccctcaattttttcgactcaaatcgagtcctttagtatagtagcatttaaatatgacatagtcaacattaaattttaacaaaccgttgacatttttcacatcggtatgtagaatataatagaaaaatgtcaaaggagaactgtgtcatgcccaaaagatatgaatatgttacacctccgagcttaggtgaaaaaaatccccgccccaaggttttggcggtcggcaaaaaaatcaccgacgtcataaaacataaaatcaaaggcgttacgtccgacgacgccgaatattggggtctttcggaaattttgaccgacgatatgtgcgacgtggttttggccatggatcttcgcaagcccatgacctttgacaaaatcgcaaaaaagactccgcagttttcaaaagaaaagcttcagcagcttctcgacgaattgagctatgtgggaattctcgaatatgactacggttatcactatgaccacaacggcagaaccgctccccaaagcgagagaagatatattctgcccatgtttgttccgggatctgccgagcttttaaacatacacgagctgcccccgaacggcgaaaacaagcggcttgaagatcaccccgagcttgcctcgttttttgagcgcatgacctttgttccccttgccggaatcacacatatggttcctcagggaggagcgggcgtcggaatgcacgttattcccgttgagaaagccatttccatggaaaacggcgtcatggatattgaacagctttcctattggcttaaaaaatacgaaggccacataggcgtggcccgctgttcctgccgcgcctcccgagccgctcttgacgagggatgtgccgacgacgactacggctggtgcatcggagtaggcgattttgccgattactgccgcgaaacccacaaggggcacgacataacctatgacgaagccatggaaattctcagaaacgccgaaaagaacggctttgttcatcaaatcaccaacattgacggcgaaaacaaaattttcggcatatgcaactgcaatgtaaacatctgcaacgctctgagaacatctcagctattcaacacgcccaatctctcccgttcggcttataccgcaaaggttgaggcaaaggactgcgttgcctgcggaaaatgcgtcgaatactgtcccgccggtgcggtcagactcggtcaaaagctatgtacaaagcagggcgaggttgtctatccgaggagaaccctgcccgagcagtcctctctcaaagaatatctgaattggaaggaagataagtgggaagaggaataccgcgacaaaaacagaatcaattgttatgacaccggaacggcgccgtgcaaaacggcctgtcccgcccacattgcagttcagggatatttgaaaatggctgctcagggcagatacaaagacgctctcgcgcttataaaaaaggataaccccttccccgccatttgcggcagggtgtgcaaccataaatgcgaggatgcctgtatgcgcggtaccgtggatcgcgccgtttccatcgatgcggtgaagaaattcattgccgaacaggatttgaaggccgaaacaagatatgttcccgaggttgttatagcctcaaacagatatgatcattgggaacagaaaatcgccgttatcggtgccggcccggccggactttcctgcgcctattaccttgcgaccaagggatataaacccacggtttttgaaaaaaacgaaaagcccggcggaatgatgagatacggtatcccgtcctataagcttgaaaaggatgttatagacgccgaaatcgacatcataaaggaactcggagtcgaaataaaatgcggcattgaggtaggtcgcgacattacgctcggcgagctgagaaagcagggctttaaggccttctacattgccgtcggctgccagggcggcagaatggcaggcgtttgcggtgaggacgccgcgggccttgacatcgcggtaaacttcctccacgacgccattgaacacaacgacagaaaaatcgacggggacgccgttgtcataggcggcggaaacgttgccgtcgactgtgcgaggacggctcaccgtttcggggcgtcaaaggtttccatggtatgtctcgaatcgagagagaccatgcccgcctccaaggaagaaatcgacgagacccttgaagaaaacattgagatcgtcaacggtttcggccccaaggaggttctcaaggacgaaaacggaaatgtcaaagccgttgtgttcaaaaaatgtattcggacaattgaccccgaatcaggtaagttttctcctctctatgacgaaaacgatacgctggaaattcccgcaaagagggttatatacgcaatcgggcagtcggttgaatggggcgatatgctaaaggacgaaaatgtggaattccaccacggaaactatccccttgccgacgggctcaccttccagacctctcagcccgacgtttttgtgggaggcgatgtttacaccggtccgaaatttgtaatcaacgccatcgaggcgggaaaatgcgccgccgaatcgcttcacagatacgtccacccccatgcaagtctcacaataggcagaaaccgcagggatttcatcgagcttgacaaggaaaacgcggttgtggaaagctatgacaacgctccccgtcagcaggcgggatttgacgaaagcatcgaccgcacaacatccttcagagacgcccacaagactctcaccgaagagcaggtcaaaatcgaaacggcccgctgtctcggctgcggcgcttcggttgtcgatcccaacagatgtctcggctgcggcgtgtgcaccacaaaatgcgaatttgacgcaatacaccttcacagagatcatcccgatgcctcaaaaatggttgttgccgaggacaaaatgaaacacattttgccctattttgccggcaatgtggcaaagctgacggtcaaaaagattccaaaagaggtaaaagaatacgaaaagaagtatgttgaattccgcaaatcgatcggaaaagataccgggaaattttaagaggtaaaccatgcacgaactcggcgttgtattttacgtcatagacgatgttaaaaaggttgccgcggaaaacgatg

SEQ ID NO: 3663 - DNA, 1732 bp, Unknown
  16S sequences of unknown bacteria
gcccttgatctccgaagtggtgctgttgcggcattttctctttgcctcccagatgacgtctcccgtgcgcacgccgtattttttcgcctcttcgctcttggcgagcacgatgccgtggcgcgccttttcgtcgccgcacacggcgagcggcttattcttaaattcgggaaagaggatacattccgccgatgcgtaaaaattattcagatcggaatgaaggatcactcggtcgggcatatttatctccgcgcgctcaaaagttgtacggcgcggttgagttcggcgccgtccgcgccgcagggaatgcacagttcgcccgacgcaagcccgataaagagtttcgccgtcgccgcgacgacggctcccttaccctcggcgctttcgcctaccgggcgcgtttcgcgcacggcgcgcgcgcagacgatatcgcggtagcagacctccgccacttcttcgcgcgcatatcgcctgatgaccgaaaacaagtacgagtacagaaaaatgcggtctgagccgaaatacaggtgcgtgacgcagtaattggaactgacggcgctcccctttttcctgtcggtgccgacaagacaggggatcttggaaatttcgccgtattcgaaagaggacaagaccacctgctcgagttcggaaacgaaagaggcgatgcccgtccgttcgaccgcgcggcgcttgatgtccagtccctcgagtacgtcgcccagcaatttgcagtatttttccgattcgcccctctttatgtatttttcagcaaggcgcgcgtttttgccgtcgggcgccgtatcgctatgtttcttcatgatcattttctccttttattttttatctgcaacgggccgccgtaaaatatcccccgcgcgtagcagataaggacagcctatacgtagcgtctgctgcacgagtttcgcgtcttctacgggatttccctccgcgtcgcacagtgaatccacgacaaatttttgattacacgtatccgtcggcgacagaatttccagcgtttcgccgacgcggaaacggttgcgcatttccacgagcgcagaacattcgccgccctctttgacttccgcgacgaaatcgcacgtcccctttgtctgtgaatcggcgtaattgacggtcttttcgttttcgcccagcgcgtaggctgtcgtaaaatcgcggtgcgcgcattttttcagttccccgaagatatccgcatcggaaaaagcggacggcttgcccgccaacctgtcgaaggcgcggcggtaagcgttcaccacggttgcgagatagtacgcgctcttcatgcgcccctctattttaaaggaatcgacgcccgcctcggaaagttctttgagatgtccgatgagattgaggtctttgctgttaaagatataggtgccgcgcgcgtcctcttccacgggacaagacgcgccttccgcccgcacctcgtatttccagcggcatgcctgcacgcattcgccgcggttggaatcgcgccccgcgagataattgctcaaaaggcaccgcccgctgtacgagatgcacatggcgccgtgcacgaaggcttccaactgcagttcggggcagaaatcgcgtatctccgatatctccgcgacggacagttcgcgcgcgagcacgacgcgctccgcgccctctccgtaccagaatttcgccgcgtatttattggtggtgttcgcctgcgtggaaaggtgcagtttgagcgcgggcgcggcggctc

SEQ ID NO: 3664 - DNA, 25238 bp, Unknown
  16S sequences of unknown bacteria
cccggcggcggagccgccgacacgggcgcagcccgtgtgcccgccgggacggcgggcgacctgcggcccgatcctgttccttgcggaaatttttgaaggggaataacagtgcggcagcacttaatggcagtgagccggccttacagcaggaaggccagcgaggtggtcagcaggatgaggttccacaccagggtggcagtgtgggcggcggtgggccagcgccgggtaaagcgggccagcagcgggcttaccgcgccactgcataggaacacgctggcggccagcaatagccagtgggtctgcaaaaggtacaggcagctttggttggcggcagcggccccgcccagccccagcatcacccgcagggaagcggccgaagccgccaggctatcgccgcagtaccagcagaaggaaatgagtatggcaatgaaggtatacatccggcacaggtagggtgggatcttttccacatggcgctcgatgtacagcacctcgaagatgatgaacagccccaaaaaggcaccccacaccaggtaattaaggttgataccataccacaggcccatcagcatagtgatgagcaggatattgaccgaggtggaaaggggaccgttatcctccgcgcccagcgcctggtaaacatacttgcgcacaaagcgattggcggagatattgaaccggccaaagaaatccgccaccgagtagctttgcagcgggtgatggaagttttccggcagatccagcccaaagacggcaccggtgccccgggccatatcgctgtaaccggaaagggtaaagtagatgtagaagatgtagcacaagacatgcagccaggtgcccaggatggtgacctccagcgaaagcagcgtttcccactgggtgatgagctcctgcagggaaccggccagaatgacgatcttggcgaggccccgcagatactgtaccattccccgggtaatgccctcggcggtcatttggggatcatccagttgggggacgaaccgctgcgccgaaacgatggggccgatatacagcttgccgaagaagctgcagaataccccgtagcggatgggatcatcgatggggtcacattcaccgtggtacaggtcgatgaggtagcccaccgaggtgaaggcggcgatggaaatacccaccgggaggatgagcttatccagttcggtaaggatagagcagaccactgccagagagatgtccttgatgacgcagcccagcaggatggaccgggcccgtgggtgggccatggcgatataccgggccagcaggtaatccggtaccataacggccagcagcaacagcaggcacaatggggaaagcagccccacaaaaagcagggaataccccagcaggaaccgccgccgaccggccccgcgcaggaaatagtagatgaggccgccgaccggcagcaatacaaacaaaaaccccagcgatgtaagttgcatggcagcagcctcctttccttggtatggtgggtgcaggatcctggctccggggcgccccgcagccccctgcgggggctggcgggcgaacgcccgtaccggcgccttcggcgccgggcggggcgccccaaaccggattcccgcgaaaattcaaaaatcaattgcccgcgggagcgttacaggccagccgcaagcgtttccaattcctccgggctgaccaaccgggccagcacgcccggcagggcgttggcactcagcccctgtggtaaattaagtttacggcacagggcccggcgcttttcggcgctgcccggtccgccgctcaggcccagccggtacaggtcggccttggtaatggcggcagggcaggggacttcactatcctccagcagcccggcctgttccaaaatgttcagcaatatttcgggcggcatgccctctacccccagcttgccctcggcactgggggctgtcttacgccgctccttgccgtatatttcggggatatatacctggatcagccgctccggaggaatggccccggccaggtgcccccggatggaaaagcctgcccggtcgctgtcggtcagtaccgccaccgggccgttttgggccagctgccggagaagcgaaagcatttctttgtttttgtagatgtggaagccgtcggtgaggaggatctccccctccaccaaattactgagggtcgctttatcgtattttccctccacgataagaggatacttcaaccgccgcttcatgcccgttccctccgcagcagttctatcagccgcagaatggtgacctccagtacggtgcggccatcggcagcgctttgcttcatgcgggcatcagcatccgccagaatctccagcgagccttccaatgcggggcggctcagccggccgcattgctccagtgctttggtaaagcggtagctgccgccgtagcccagctccttgcgggcggtggcatccgctaccccggcccggcgtaccgcggccgcccggtagtaatccacaaaggacatggtaagaatggtgagaatactttccggccgctcctgcaaaaagagcagatcatccacgattgccatagccccgttaaaatccccgcgcagcaccttatcccccagctggaatacattcgcatccacggtgggggccaccagcgcctcgatgtcctccttgaggatcttgccggtgtagccgtggtaggctgccagcttttccacctcctgccgcagccgcaggctgtccagattgcaataatccgccagcagggcggcttcctccggttccagtacgcagcccagccgcagcgcggtctgccgcgcgaattttcccacatcgccgcgggtcatggcggcaaagcggcacacgccgcccgccttatcgcacaggttcagcagcttggtggccgccgcttcctttttggcaaattgcctggcgctgccccgcactgtcaggatcagcaccccgtcctccgtcggttgggccagcagctccgagagcttgctcatgccggtgctgcccaggccggagggattcaggtcatccaccacggcgcacttgcgcccgggggtaaagctcatcgaccatagcaggtcggcaatgccgtcccagtctacctcgccgccgctgccgtcgcagcgcagcaggttcatgctgtccccctccggtacgatggttttcaccagccggtcccgtgccgcttcgatctgccggttttcttcgccgtacagcagatagaccggcagcagggctccggccttgatatgggtatccagcgcgcgcagatcgggaaagatcacagggcagcgtcctcctttggcagggtgatggtcagctctccgccccggtacagctgccagcggcagccgggggccagccacaggcggccctcccggtctatcacggcggtgatatcggcggggatgtcctctgcggttattatatcatagcctgcccaacatttcagcactttttgcgtgccgaattgcaatactgttcctacgccgtccaggctataaagtgtataattcgacaatatattacgaactgtatcataattcggcagcaggatgacattttccgggagctgtgcttcgcccaaaagcgccgtttcctcgctgcacagcatcagctccggctccagcaggcgggcaaggcgcagctcggcggaaaggtcatgctgttcctccggctgtaccagcaccgtgatgcgcgggctgccgcaccgctgcaaaaaccgccccagcatctggagctcgtagccatcctgcaccccgctgatcagcaggccttcgccattcttttgtactaggacgctgccggtggcggcatcggtggtcaaggtcagggcgctttgcagggtcagggcactgcccagcagtactattccagcggcgcatcccaaaagcagcagacgcagtcgggcccgtttggtgcgcagcagcgcggctgcaagcagcagtaccgcgaaaatagccggcacggtccattgccaaggagccacacagggcagcaccgcgccgggcagcccggcgataccgcgggccaaggccgctatgccgcccgcaaagcacctggcaacggtaaagggatagacccccacacccagcagcaggcaggggagggtgagaaaggcgaacaccatgacgccatacaccagcggcagcaccagcaggttgctaagcaggctgtacgcgggcagataaccgaagctgagcgccgtgatgggcagggtgcccagctgcgccgccagtgaaacgcaggcgctttcccacagcaggctgccccaccggcggcggcgggcggcaggccacaggcgggccaatggccgggccagcagcaggatacccagggtagccccgcaggagagcagaaagctcagctcccacacggcggcggggttgcacagcagcagaatcgctgccgcaaagcccagtccggtcagaccatcgccccggcggccccgcaggggcgcgcccagtgccaagccggccatcagggcggcacgcagcacgctggcgctaaacccagccaaaacgatcatggtaagacagcacagtccgctgtaaagggctttctttttacggctccacagcagcaggtcgcccagtttaccgcataccgccagcagaatggaaagatgcagccccgaaaccgccagcaggtgactgatgcccgccctagaaagggcggtgcgcagcccagccggcagatcagcggtatcggcagtcagcatggcggcgaccaaagcggcgctttcgccctcgcccagtgcatttagttgttcgatggtttggcggcgcagccgcagcagccaccccaaaggggagaagctttcttccgccggctctgcggtcagctgccgggcctttagcgccactccgccggaaagcagcagggtgtctccctcgctttccgccccggtaatggtcagtgtgccggcaatgtgctccccggccaagggggtctcctcctccggcaggtaggcggtcaggtcgatgacacggtgctgcccgcccacccgggcatagatggtgctgcgatgggcggtgtaggggcttacctccagcacggttccggtgaagggcaattcgcagccggtcagctgctccgcggcggtataccgccaggcgtaaaggccgcccatcagtgctgcggccagcagcccgcacagcagggaccgccacagcgggcgcagggctttgatgagccccagggcaaggcaaagccccagcaaaacagccagtgctgtgccgcctgcccgcaggaataccgcaagccccacggtcagcgctgccgcgccgatggccaggtaccgccggatgaccatttttttgccccctgtcactttttgtcgataccatcattatacaagatagagggaccattggcaatttgttttgctgccgcatagcatgaaacaccgcattttattagatctgcccgctccccgcagggaatccgggcgggcacccctctgctatggctgggccgttcctccgcttctctgcgggcggccctccccacgcgccggggcgcccgcccgcctggcggactggggcaggacgaaagggaggaaaacccatgatctgtgatgccacccttatttttcagctttccactgcccgcagcgcgctgccggtgcagggggccagtgtccttgtcaccgatcccatcaccgggcgcaatacccgcctgaccaccgaccaaagcggccgtacccatgtgctgtgtgtcaccgctccgcccctttcctggagccaaagcccgggaaatgacggccggccgtacagcatctatcacgccgatattcgggcggagggctatgtgccggtgcgcctgacggggattcaggtctttgccgggcagcagtcgctgcaaacggtagagatggtcccctgcgagggggggaagagcatgaccaatacgccggaggagaccattggggagccgggggacccgctgaaaagcgagcagcccggccgctttgcccaaagcccgcaggaggatgaccagccgccaggatccctgcagggggcggagccgggccgcaggcccagcggcgaagccgccgacacgggcgaagcccgtgtgcccgccgttccggcgggcggcctgcggcccgaaccagcctccgccgcgaatttgcccgaagcggagccatccaccgccgatttggcggctctgcccgatgcgcgggagctggccctgccccgcgctatcccggttctggcggcagccggggaggacgatgagagtgataatgacgatgagctcaccgccccgcctgtcacccgcaacctggcggaagagagcggcaacacccgcgccgccgaggtgttgaccggcccccgggccgcttcgcaggtatatgtgccggaatacatcaccgtgcacctgggggctcccaatgatacctccgcccgcaatgtcactgtcagcttccgggattacatcaagaatgtcgcctccagcgagatctatcccacctggccggaggccgccctgcgggccaatatcctggcgcagatcacctttgcccagaaccgcatttttaccgaatggtaccccagccgcggctacaatttcaatatcaccaataataccgcctacgaccagtacttcgtctacgggcgcaatatctttaccaatatcagccgcctggtggatgaactgttcgatcagtacatcagccgccgcggcgcggtcaaccccatcttcgcgcagtactgcaatggcactaccgtcacctgcgggggcctttcccagtggggcaccgttgccctggccaataacggctacacgccgctgggcattctgcgttattactacggcgatgacatcgtcattgataccgccacggtacagcgccgcatcacctcgtcctatccggggtcgccgcttaccgttggcagcaggggagaggatgtccgcaccatccgcacctggctcaaccgcatccgccgcaattatccggccattcccaccatcagtaccagcggcgatacctacaatgccgaaatgcagcgttcggtgcaggccttccagcgcatcttcaatctgacccccgatggcatcgtcggccccgccacctggaataagatcgcctatatctatgtagcggtcatgcgcctggcggagctgggcggcgaggatattcccctcccggccgagcgtcccagcggcaccctgcgccggggcagcagcggagaaatggtgcgcctggcgcagtacttcctgcgggtcattgccctgtacgatgatgagatccctcccatcaccatcgatggctcctatggcccggccaccgaaaacgccgtgcgcgccttccaaaagatgcagggccttaccgtggatggcatcattggccccgccacctggaatgccctgtacgagcgcttcctcggcatcacccaaaccaccggtctggccgttacctaccccggcaccccgttgaaaagcggcagccgaggggataatgtccgggtggtgcaggagtacctgaataccctggcccgtgcttatccgctgccccgtgttgccgtggatagcatctacggccccgcgaccgaaaacgccgtgcaggccttccagcggctctttggcctcaccgccgatggcattgtgggtccccgcacctgggaacgcctggtggggatccgcctgctgctgcggtaggtttcagcagggtccggggtcagggcccgcagggcgccccggcgaagccggggctgggggcttcgccccctacggccgtcccccttacaggggacggccggccctgcgggccccatctcgcacctcgcgctttcccgcaaagaccaccaaaaaggcccgctgcaaaccacagcgagccttgtctttatatcattcagttttcttcggtgggcgtttcctcggctgccgcggccgccagctgcgccgccagccggtgggtcatgcggcgcagccgccgccccgccaggaagcagaggcccaataccagcaccgccagcgccgctatccccgcgatgccgaagctcgcgccctccacaaagagcaaactcagcggattggcggtattacacagggtgttaaattcccccgcgccgtaggtcgccgcgtccatggccttggccgccgctgtaaagagataagtcagcagtgtgccgctgtacagcatgacaatggcgctgatgagcccggtcaccaaactgcgcagcaggcagccgccgctcatcgccgtcacaaagatcatcaggtacagcagcatggccacatcgccctggggcagcaccaggttgcccggcagtaccgccgccagcgccaccgtcaccggcaccagtatgatggccgaaagcagcgtagtggcattggcggtgcccactacggcgttcaccgccacattcagcggcagccgaccgtgacaggtctttctggccgtcagcggctccagcaccgaggccgccgcgcgtccgaatacccgcagcaggcggggcagggcaaataggcacccggcggctaccagcgcaaaggagaccgcgtcgtagaggggcagcccagccgccatgcccatgataaagcccaggatcaggccccacaggctcggctccagcaggaagttcccccggcgggattgctccagcgaaacacgccggtcccgcagaccggggatcagattgatgagaaaattgcaaagccacgccaatggggccgtccccacggcaaagctttgggtaaaggtgatgtgggatgtcccggtcagccggctcaccggtgcggtaaagacatccgccaggatgatctgcagcacaaccatcagcagggcggccgtcaggccgcaccacatttcgccggtcagctgctgcaccagtacccccgcaaaggccgcctgccacaggctccacaggtccatattcagcacacgggtcacccggcaggccagcatcagcaggttcagcagcacggcgcccggcagcacccagtacaggatatcactgttcagtgtcacctcggccgctttctgccagtgcaggttggccgccccggtggaaagggaataggtatcgatcatggtattcaccagcgtcactagctggccgctcagtgtgctgatgagcagctggatggccacggtgctgcccagcaccgccagcgcgcactggccggagcgctgaacgcccgcacggctggccagccccagcaaaaagaagaataccggaatgagcagaaagctgcccagcccgcttacgatatcataaagggaatggagtatatccaaggttgtacctcctttgggggaatgcccgtcccaaccattataaccggggaatgtgacgatagtatgaagaaaaagcataaaaacccaatatattagcctacttattttcccataccggcggcgtaaagtcaagcatcgcattgcactggctggcgatttatggtatcataaaagaaaaaactagaggaggaaccatcatggaagaactcattctgaacaatatccttgaaacactgagggagatccaaagagagatggagcgccagaccgagctgctgcagcgcatcgagcagaacacaagagactgacccccgccccggcgggcggccggaaccgcaaaagggagcccccgaaaagaggctctcgcttttctttttttcagccctgcgccgccatctcccgcagcaggtcatacagcgcggcatccttcccgctgtaccggtggttccccaccgtcagccacagcgtgccgtcctccatgcagtacaggatggtctgtgccttccggtcatcaaagaacacggtgatgtgctccatgtataaggtggtggagccggaggcccggatattgaacttcaccccggccagccgttcggcaagggcatcgctttccccggcggtcatcgggcggctgcccccgtcccattgcagggactccgcccggctgtgcggcagcccggtatgggggagggaaatcaccccgaagaagataagagccgcagccagaatgaaaattgcaggcagccattttttcatgtgttttctcctttgtgcttatttatgatgcagcagccagccgaaatagcgaacgatcagacagatcatcatcggaccgaaccggaaaaagccaagcggctgcgctttctcttcggatatttttttgacctgccgaaaccagacctccgaaagtcctgccagcagtacgcctgctgcccagtaccaaaccgttccgcgaagatcatgggtaatcatcccccacgcagtaaaggtaacgaagctcaatacaaaaaagatagtgtatcgggttgcttcagacatgttgttttctccccttttgcaaagtgcttttttgctgcttccattatagcagggaaccgtgcaccccgccattggcgacttccacatttttcccgccctgcgtttggcagtaatgccttcaccctatataacggcccacggcggcattttgcaacagcttccttgacattttttttgcgctattgtaagatgggaaaggtttcatcttaaatcattacgccgctgtggcggaacaggcagacgcaagggacttaaaatccctcggtggcaacaccgtacgggttcgattcccgtcagcggcaccaaaaaagggagcatccaccagccgcaggttggtggatgttttcttttttggctatgacgctgggaatcgaacagggcggcgcaccgcagtgcgtaaaaaagctgccggcggcaggttttttagcccgcgggtagattcccgtcagcggcaccacaaagggagcagccaccagccgcaggttggcggctgttttctttttggctatgacgctgggaatcgaacagggcggcgcaccgcagtgcgaaaaaaagctgccggcggcaggttttttagcccgcgggtagattcccgtcagcggcaccacaaaggaagcatccaccagccgcaggttggcggctgttttctttttggctatgacagctgggaatcgaacagggcggcgcctgcaaatttcctatcagtgtgccccgcggcccttgacaaatcccctccctccgccttataatactttggtaaatagcacaaacggctatgacagggtcagtgctgcaccccgcccccagagagaaagcccctggctgaaaggctttcggcatcccggtgcatcacagccgcccccgagccatcggcgtgaagaacgccggcgtccccggtgcgttaaaccggcaaaaagcggcagcgtcctttcggcgctgcaaactgggtggtaccacggaagatttggctttcgtccctacggcttcgtaaaaaatgaagcaggggaggagagctgtttttttgtgttctcacccttaccaaaagaaaggaatcaacccactatgaaatggacaggactcaatgaactgcgcgaaaccttcctcgaattctttgtcagcaaggggcatacccgcctgccctcggcgccgctggtgccgcaggaggaggccagcctcctgctcatcaattccggcatggcccccctcaaaaaatacttcacccggcagaagttcctgccgaacggcagcttccgcgccaccagctgccagaagtgcatccgtaccccggatatcgaaaatgtaggcaagaccgcccgccacggcacttacttcgagatgctgggcaacttctccttcggcgattacttcaaggaggacgctacccgctgggcctgggagttcatcaccgagaagctggagctgcccgtcgataagctctatgtctctgtttaccaggatgatgacgaggcctatgatatctggaccaagcgccgcggcgtcgcccccgaccacatggtccgtctgggcaaagaggataacttctgggagatcggctccggcccctgcggcccctgctccgagatctactttgaccgcgggcccgaaaagggctgcggccgtcccgattgccatgtcggctgtgactgcgaccgctatgttgagttctggaacctggtattcacccagttcaattccgacggcgagggtcattacacccccttggagcacaagaacatcgataccggcatgggcctggagcgcctggcctgcatcatgcagggggtggataacctcttcgaggtcgataccgtccagaacatcatgaagaagatctgcgagatcgccggcgtcacctacaagcaggatgagaaaaaggatgtttccatccgtgtggtcaccgaccacatccgctccaccgtctttatgatcggcgacggcgttgtcccgcagaatgagggccgcggctatgtgctgcgccgcctgctgcgccgtgccgcccgtcatggccgtctccttggcgtccgcgagccgttcctgtataaggtcgccgataccgtcatccacgaaaatgagagcgcctatcctgagctcgtccagcgccgggactatatcgtaaagaccatccgcgtcgaggaggagcgctttgcccgcaccatcgatgccggcctcgatcaggtcaattccatcctggaaaagctggccgccgagggcaagaccgtcttctccggcgaggatgccttccgcctgtatgataccttcggcttccccatcgatctgacccgtgagctgtgcgaggagcgcggcatcaccgtggatgaggagggctacaaggccctgatggaaaagcagcgtgcaaccgcgcgggaagccactgcccgcaatgtcggcgatgtagcatgggtcgaagatgtcctcaagggcgttgagggcggcgaggactttgttggctacgagagcctgaccgccgaaagcgagatcctcggcatcgtctatgagggcgagcgggttgaggccatcggtgagggcgatgccgcccagatcgtgctcacctgcacccccttctatgccgaaatgggcggccaggtgggcgatagcggcaccatcacctgcggcgagaatgtctttaccgtcaccgatacccgcaaatccggctccggccacttcattcatgtcggcaccgttacccacggcaccttccaaatgggcgataccgtcaccgccgccgtggatgaaaaccgccgcatgagcatcatgcgcaaccacaccgcctgccacctgctgcaaaaggcgctgcaggaggtcctgggtgaccatgtccatcaggccggttctctggtggatgataaggtctgccgcttcgacttcagtcatttttccgccgtgacccccgaggagctggaaaaggtggaggtccgtgtcaacgagctgatcctggaggcgaaccccgtcaccaccaccgaaatgcccatcgaggaagccaagaagatgggcgctatggccctctttggcgaaaagtacggcgataccgtccgggtggtcaatgccaataataaatccatcgagctgtgcggcggcacccatgtggataataccgccaagctcggtctcttcaagatcctcaaggaatccagcgtggccgccggtatccgccgcatcgaggccgtgaccggccgcggtgtgctggaatacatggcggaaaatcaggcgctgatgaataccgccgcccagaacctcaagctgggcagccccgccgaactgccccagaagaccgcccaggtgatggcggagctgaaggccaaggaaaaggcactctccgacctcgaaaataagatggcggccagtgctgcggccgatctcttcaagaacgccgtcaccgtcaagggcctgcaggtcgtcaccgggatgcccggcgaaatgaagcctgatgccctccgcctcatgatcgatgaggcccgcggcaaccaccccgatgcagttatcgctttgggcagtgtattcggcggcaagggtaccattgccgtggcttgcggcgccgaggccgtgaaagccggtgtcaacgccggtaagcttgtccgcgccctctgccagctcaccggcggcaacggcggcggccgccccgatagcgccatgggcggtgccggcgatcccgaaaagatcgccgaagccctcacccatctgcccgaactgatctgattttttgcggcgtctttttacggcgctcctccgtggaaagcactcccggcgtcgtcgctgcccttgacaggcataagtacgatttcatcgtacaacagcctgcctgcgggcgcttcttgccgggagccctctccctccgtcgcgcccgtccgtttttccccagttccataaatccccggaaaggagtattctctcatgtgtgttttctgcaagatcgcatccggcgagatcccatcgaacaagctgtacgaggatgataaggtcctcgccttctatgatctcgatcctcaagcgcccacccacttcctggtcatccccaaggagcacatcgcctccgcggccgagatcaccccggaaaatgccgggatggtggcccatatcttcgccaccatcgcccgcatctgcgccgagcatggctgggaaagctaccgtgtggtgaccaactgcggtgagcaggccggccagacggtgcagcacctgcatttccatgtgctctccggccgggatatgacctggccccctggctaaaccgatcgcattttcctgtccccgcttttcggcggggactttttcttgcaaatgccgccgcgctatgatataatttatccaaattttcgtttgatggggagagggaacatggcaaaaaccaatagaaaagaatcaagaaagatctacgagggctataaaaaacgtcaaagactttggaacactattttcatcgtcttctttgccgtcatcggtatcggttctgcagtgctcaatggcaccatggagctggatccgcagatcgtcatcggcaaatacgagtttacctggttccacctggtcatcctggccgtcctggtggtgctgctgggcttcggcatcgtggcgctcaaacgcgacagcagcgaggagcagcaggagatctaccgccaggagcgcgaggaagccatccgtctgcggcaggaggtcatggccgagcgcaagcaggagatgcaggatgcctacaatgccatgaagcgccgccgcgccgagcgcctggccgcccagggtatggcccccaccgccgcccaggccgatgtggtggatgccgtggaaatggtggaggccgtggaggccgaggccgccgaagcagtggagatggcggagcaagccaatggcgaaaaagaggagaaaacctcttgacatcgccggccgaaaggactacaataaccgcataaatcccaaagcgctatgagaaaagttacccgcgccccggcactcctgccagagagcggacggcacaggctgcaaccgtccgcaggagaatgaggaattgcggaccgccttttccagcgcggtgccaaatcaccgccggcccggccccgttacccgccgcaatgaagtggatcgctttagccgatccgattcgggtggaaccgtgggatattttgtctcaccccggctgttttcttcgcaggaagaaagcagccgtttttattttccctttttcggcggcggtgaaaaccggcgctggctgtgtcgggggttcgccatacatcagtccgatttcatcggacaagagtatgccgtcacccgcctccttgccatcatccgattttccctcgccgcccctttgggatcttccgcatcaattcatcaatgaccagaaatggaggaaatttatcatgatcaaaattaccctgaaagatggctcggtcaaggagctggccgctccccagtccatcgccgattttaccaaggatctgagcatgggcctgtaccgcaatgcctgctgcgccctggtggatggcaaggtcgcagatctctgcgatctgctggaccacgactgcgccgtggagatcctcacctttgaggatgagcagggccagcgcgccttcaatcacaccgcttcccacatcctggcgcaggcggtgcagcacctgttccccggcgccaagcttgccatcggccccgccatcgaggatggcttctactacgatttcgatgtccctacccccttcaccccggaggacctggaaaagctggaggccgaaatggctgccatcgccaagcaggatctgcccattgagcgcttctccctgccggtggaggaggccaaaaagctgatggccgatcagccctataagctggagctcattgaggagcacgccggcaagggcgaagccatcgccttccgccgccagggcgattttaccgacctgtgcgccggcccccacctcatgtccaccggccccgtcaaggcggtcaagctgaccagctgcaccggcgcctactggcgcggcagcgaaaagaataagatgctcagccgtgtttacggctgcgccttccccaagcgcagtatgctggaagaacacctggcccgactggaggaagcccgccgccgcgaccacaataagctgggccgtgagctggaatacttcaccaccgttgatgtcatcggccagggcctgccggtcctgctgcccaagggcgcccgggtggtccagctgatgcagcgctgggtagaggataccgagcagcagcgcggctacctcctcaccaagacccccctgatggccaagcgcgagctctataagatctccggccactgggatcattacctggacggcatgtttgtgctgggcgatccccacgatgagaccaaggaatgctttgccctgcgccccatgacctgcccgttccagtaccaggtattcctcaaccgcgcccgcagctaccgcgatctccccatgcgcctgggtgagacctccaccctgttccgcaatgaggattccggcgagatgcacggtctcatccgtgtgcgccagttcaccatttcggagggccatatcatcctgcgccccgatcagctggaggaggaattccgccactgcctggagctggctaagtactgcctcgaaaccgtcggtctgctggaggactgcaccttccgcttctcccagtgggatcccaacaataccgaaaagtacatcggtactccggagcagtgggatgaggcccagggcatcatgggaaaaatcctcgatcaccttggcatcaagtacaccatcggcatcgatgaagccgccttctacggccccaagctggatatccagtacaagaatgtctttggcaaggaagataccctcgtcaccatccagatcgaccagctgctggccgagcagttcgatatgtcctacatcgaccagaacgggcagaaggtgcggccctacatcatccaccgcacctccctcggctgctacgagcgcaccctggcctacctcatcgagaagtacgccggcgccctgcccacctggctttctcccacccaggtggccctgctgcccatcgccgaccgtcacctcgactatgtcaatgagatcaagaaggcactggagcagcgcggcgtgcgcgtaacggtggacgaccgcaacgagaagatcaacaagaagatccgcgacagccagatggagaagatcccctacatgctggtcatcggcgaccgcgatgtggaaaacggcaccgtttcggtccgctcccgcaaggagggcgacctgggcgccatggcccccgccgatttctacgcgaacctcaccgaggagatcaccacccgcgcccgctgatccgaaccccctacaaacggcaggcccccaccgggcccggcgccttcggcaccgggcccttttgcacctctccgcaggcccctgcaaggggcagaatcgggccgcaggcagggccgccctccgggcggcctcagtgggcttcgcccgctggttccggctgcgccggaacggcctgcggcccgcccaatttgcggcttgcagcggcctgctgccggccccggcccctcacccagttttcccccaatcgtcacattccgtttacaaaagcaacaagaaatcccacgcccatggtggtatactggcagcatcggcagtccgcccttggctccacccaaaagccccgggctggacaaaaccgtaaatctttgctataatactaagctgtgttaatacgcaaggaaggaggatgccccatgacggaagaaaataagagccttcaaaccccgcagaatgagccggaacccgaagccgagtcggtggataccgccgctgccatgcagtacttcgaggcctcggaagccgccgcggaagtcggccgggagatcctcgcttcccgcaagcccaaaaagcagaagcagaaaaagcccaaaaagaaaaagagccctgtacggcaggaacccgaaactgcccccgccccggaacccgtcgaggaaccggcggagcagcccgctccggaagcgacggaaaccaacggctggcagccctcccagcgggaggaacccgccgcggagccggcagccgagccggcccctgccgaaccccaggaatccccggaatcccaggagccaaaggcccccaagaagccgaagaaaaagaagaaaaaatcccggccgaagcaggggaagaaagcccccgccaaggcaaagaatgcaaagcccagggaaaaacgccccactttggcggaatcctttgagagcatggagcgcggctgcgcctacatcggcatgcagctgctgcgggaatactatgccattcgccggggcatcggtcatgtgtacggccgtgtccgggcccgggtgcccatcctgtggcggagcctgcgctttaaggtcgtccgccggacggagcacttcgccgatgaggtgctgttcccctaccgcatcctgcacgatgaaacagccgagctggccgccgccctgcgggataagaccccggaagggaaagccggccgccgggaggcctggcgggattacagccgggcagtggcccgccccttaaaccgcatcgccaatttctttgcacccatcttcggcctggccattctggccggcgccatcgccttcttcaatcagtttacctttgcccttcgggtggagtataacggcgagtccatcggctacatcgcccaggaaagcgacttttacgaggcacgggatgccatgctggctcgcctcatcaatgaggaatacatcccgccggaggataccatccccaccctttctttggctgttgccaaggaaaaggacctcctaaccaaggaagaacttaccgatgccatcatgcgctcctccggcaatgagctggtggatgcctccggcttctatttggagggcaagttcctcggcaccttggaggacggcaatgagttcctgctctacatggataaggtgctgaataactaccgcaccggggaagagcacgaaacggtgcagttcaccaaaaatatccggctggaggacggcgtttatcccgttagctcgctcatgaccgtttccaatctgcaaagttacctgcgcagcaataaggagctgcgccgcagctacaccgcccgccccggcgagaccatcgaagccatcgccaagcgctacggcctgacgctggaggagatgtacgacctcaatacggagctggaggagtacctcaccgccctgcggcagcagcagctgggctacgatcccgattcggtcatcctgcccgattccggtaccccggccgaggagtggaacgcccggctggaggatatttccgtcagtggcgaaactccgctggaaaccgccatcaataacggcatggtgctgtatatgggcctgctgtactggccggaggacctgccggatggcgccgccgaggagctggccgcggccgccggggataacaatgccctgtaccgtctgcaatatggcatcaccgatgaaacggcggaagccccggccgatgaggccccgacggatgccgccgccgataatacagccgattcgaccgatcccgccacgccggcggaggacgccgaaagcggcgaaaccaccaccggcacccccatgcagaccatcagcctcatcccgttggagcaggtgcccctgcagggcgatgaggaactgctggtggtgcagatggatgtggagctgggcatccaggtgacccgccgggaaacctatatggccaatgtccagttcggcaccacctatcaggataacaacaaaaagccgatcggggataccagcaccatttccgccggtatttacggccaggatgaagtggtggccgatgtcacctacattgacggcgtaagagtgggcgaaacggtgctgagccgtacccgcctcaaggacccggtcaatcaggttatcgcccgcggcacccagaccattgatgactattttgcgagcaccggcggccggttcatctggcccgccgacggcggctactttaatggctcgctgggcgcctacggcggccacaccggcatggatatcgcctgtcccatgggcaccacggtccgtgcctccaaggcaggtaccgttaccaccgccctcaattacggctggaactacggctacggcagaacggtggtcatcaaccacgggtacggccagactacccgctatgcccatatgtccaatgtcaccgttacggtcgggcagtatgtcaagcagggccaggtcatcggttacagcggcagttccggtaattccagcggcccgcacctgcacttcgagatccgtatcgatggtgccatcaaggcgccggagaactatattggcaaggtctacaaccgctaagccaaagaaaaatacaagccttacagtccccccaacggagtactccgctggggggactttttggaggaaagaggcaaggcccacagtgttttgagggaagcctcccccaaaatgagctgcggcaggttgggtgctattttgccgtcctaccggtgagctgccggaaagggaaaactttactgccccgtggcagtgatggtaatctgcagggtcagatcggcggcgggggcggcccccagagcatagacggtcaaggtgccattggcattggcagcggtaagggcggtgaccccggcctcctgcaaggccatcaactgggcggcggtgggatgcagagccaccagcgaaccagcggtcagtccggccaaagcggcggcttgggaatagggttcctcggtactccatccggcagcggtaagggtgatgctccccaaagtaatggcagcttcgccgggatcgcccttcggcccttgggggccggtttccccggtttcccctttcggcccttgcgggccggtttcaccagtgtcgcctttcggtccttgagggccggtttcaccagggtcgcccttcgatccctgagggccggtctcaccggggtccccttttggcccctgaggaccggcttcgccgggagcgccgttttggccgtcttttccgtccttaccgttggtgccgtctttgccatctcggccgttaaacagcccggcatcggcatcggtccggagggcatctgccgccgaaacggcggcttccgccttggtaagcaggctttggacgagggtgggggtggcttcagtgggggtattttcctccggctgggtgccggtgcatatgggccccagcaggcagctgactgtcggcaggaccattttctccccgcgggtgccgtatacccccacacgcaggtactcgcccgcacgggtgagacattcccacgggatgaagcattggttatcctccccaagcaggcagctgacgctgacggtgccggcggtgaaaacggcggtgcgatcgagggcagcccactgcggggagaagcggaaccgcaccgggacggcctgtaccataccggtggtgagaagttcattttgggccacggtgatggcggccccggtgacttgacaaatgatcataaatttcctccttgtgataagatcccctgcactaatacggcaaaatgggcccttttttgcatgtgaaaggttaatatttcactttttttaatggaaaatttacaatattggaggaatatgggctgattttgcataaggattgggctaatgagacaatgatttactgggaatataagtttgtttcgcgggacgatttgcggccacctggcggcgaaagcctcccttgtgtaaagggaggtggcgaaggtgcctgcggcgcattttattttggattctgctgagaccgaattaaaataaacaccttataagcgtcgtcgcgtcggacgcaaccttcgcttaagtcgggctgaccctgcgctttgctccgggcagccctccccgctgcggtgcatcctcctttccccacaaggtcttacgaccttgcgggggccccgattatacggggtgtaccgacgcgtgggggtctcggggtcctccccgagtgacttttggttacttttcttcacagaaaagtaacccccccgccgggcaggcgtgcagtctgtcaccctgtggtgactccgcgacgccgacaggcgagatgaaattattaccttttgccggcaacccctcagtcacggctacgccgtgacagctccccttacacaggggagcctttgggtgtgccgacaggtgagatgaaattcggtataaaaggggtcgcgggggatggggacgcggagccgagcgccgcctgtggcggatgcagcgaggcggagcatccgcagcggtcgaaaaaatcaagcaagcgaacagcgcgaagattttttcgggcaccgcaaggcggcagggactgcgattggccgaggaggacgagaaacccgggtcgcagggagagagcgtgggactgcggctggccgaagcgctgggcgaatagacaaaaaatttatgtcgattttacaaagtatggtatttcgccttgacaaagggacgatgggggcgtaaaatagaacggaataattgtagatactttacaaattatttgttcaattaccccctcccccgcagcgggggaacttttacgatacattcataagaaaggatggaccctgaccaatggtagagatgaaactgtggcttgtgatagtcgcagcggtagctctcgtactggttgccggagtcgtcgccttttttctgggcgttaagtatagaatgaaggttgctgaagcagagcttggttccgccgaggaggaagccaagcgtttgatcagtgacgccattaagaccgccgagagcaagaaaaaagaggcactggtagaggcaaaagacgagatctatcgcatgaaaagcgaagccgaccgtgaagtgaaggagcggcgcagcgaggtgcagcggcaggaacaccgcctgcagcaaaaggaagaaaacctcgataagaagatcgataacctggagaaaaaggaagaggccgtgcagcgccgtcaggcggaagccgatgaacgcctgcaggaggtcgagcagatcaagaagagccagtttgagatgctggagaaggtttcgggctttagcaaggagcaggcgaaggactacatgctgcagatgctggagaacgagctgacccacgaaaaggcgctgaagatcacccagtacgagcagcagctgaaggaggagagcgacgaaaaggcccgcgagatcctttccaccgccattcagcgctgcgccagcgaccatgtggcagaggtcaccgtttcggtggtgccgctgcccaatgatgaaatgaaaggccgcatcatcggccgtgagggacgcaacatccgcacgctggagaacctgaccggcgtggatctcatcatagatgatacccccgaggcgatcaccctttcctgccacgaccccgtgaagcgtgaggtggcacggctttcgctggagaagctcatccaggatgggcgcatccacccgacccgcatagaggaaaccgtggagaaggcccgccgtgaggtggaaactaaaatcaagcaggacggcgagcgcgccgtcatcgaaaccggcgtacaccacctgcatcccgagctgatgaagctgctgggccggatgcgctaccgcaccagctacggccagaatgtgctggagcactccatagaggtggcgaagctggcgggcagcatggcggccgagctgggactggaccccaccctggcacggcgtgccggtctgctgcatgatattggcaaggccctgacccacgagatagagggcagccatgtggccattggtgtggagctggccaagaaatacaaggaaagccccgaggtcatccacgccatagaggcgcaccacggcgatgtggaggccaagacggtggtagcctgcctggttcaggcggcggatgccgtaagcgcggcccgtcccggcgcccgtcgtgaaaacctcgaaaactacatcaagcggctggagaagctggaagccatcgcaacctcctttgagggtgtggagaaatcctacgccatccaggcgggacgcgagatccgcatcatcctcaagccggaggtcatcagcgatgaccagatggtcattgtggcccgtgacattgccaagaagatcgaggacgagatggactaccccggccagatcaaggtgaatgtggtgcgggagacccgcgctgtggattacgccaagtaagccgaaaagtaaaccgaaaaaagaaaaagccctccgcaggggaagccttgcgggggctttgtgcgtttaggggaagtgtgcggtgggggagaggacgggcgcagccccggcggcggagccgccgcagcggacgaagtccgctgaaaccgtccagaggacggtttgggctgcgcccggtgctgggatgcagcaaaaaccggaaaaagacagggaaaggacggcccaaatgggtggaaaacccggcaaagcaccgggcggggcaaagccgcgtaatataaaaacagacccgggcgcgggcagtaaccggcgcgggggtcatgtagggggcagggggagcaatctctctgcccccgtagtgatattacagcagggcggcgcgataggcggccaccagctgcgggaatgaggtgcgggcattggcagcggaggggctgggcagcccgatggcgggcagaccagcttggggctccaccaggcggcggtaaagccgtgcggcggtgctgccggtggcggcaatgcgggtgatgcccggataccggcacagcaggccggggatatcattggggatgggatcccggatggtgctgtccgcggcgccggtgatggtacagctggccagcacatcccacagggccagaccgtgggagagcagcagctcggcgcggccctcgctggtcttggggtcctcctcgctgtacagggccgcgatgaccggccaaaagcggttctgcgggtgggcatagtaaaaggcctcggcacggctgcggggactgggcatggtccccaggatgagggtatggctttccgctgtgatgagcggagccagcggatgcagaacagtttgcggcatagagggacctccggtgggtgcagggtgcagggacggcccggcgggcc

SEQ ID NO: 3665 - DNA, 25410 bp, Unknown
  16S sequences of unknown bacteria
gcaatccacttcgctacttgctcatgaacgcagtcgcttcgcgatctgcgttcacgctctaccgaccatgatacagcttcgcataaatcccgttcctcgccagcagctcctcgtgtgtgccttcctcctcaatcccgttcgctgtcagcacaaggatgcgtccggcattccgtatcgtagagagccggtgcgcgatgacgaaggtcgtccgcccctttgccagcttttccattgactcctgcacgatcttctcgctctcattgtcgagtgcggaagtcgcctcatcaaaaatcaggattgccggatttttcagaaatacccgtgcgatcgacagacgctgcttctggccgcccgacagcttgacacctcgctgaccgatatcggtctgatagccatccggcagctgtgagatgaatccgtccgcattagccagctttgcagcctcaatgacttcctcatcggtggcatccggtctgccgtagcggatattctccataatgttctccgcaaacagatagacatcctgctgcacaattccgatctgcctgcgcaaatccttcagataaatcttgcggatatccgtgccgtcgagctttactgtcccgccatcgacgtcatagaaacgcggaatcagactgcacaatgtcgtcttaccgcctcccgatgatccgacaatcgccacatactcgcccgccttcacatccagattgatgtggctcagcacagtatcctgcttctcttcatatttaaaagaaacattatcaaaacagatatcaccttttacggaagtaatatgctgtgcatccttcgcatccgtgatatccggctctacatccatgatctccaggaagcgctcatagccggaatagccgttctggaactgctcggtaaaattgatcagcttcttgatcggatccgtgaaattattgatatagagcaggaaggtcacaagatccgccaccttcatccttccgccggtcatcaaagaggctcctgccacgagcacgacgatcgtcacaagtgtcgtcaatgcgccaagtccggaattgtacagtcccatataccagtagctttttcgttttgattctacaaaacgctcatttccctcgtggaacttctcgatctcgatcgcctcattgccgaatgacttgaccgcgcgcacaccggataagctgtcctcgatctgtccgttgatgtccgctatccgcgcccggtttgtcttgaaggcgtgcttcatcctccggttcagaagaaaggcatagactgcaatcaccgggataaatgcaaacgtgatgaccgtcagcgtcccgttgatgttgaccagaatgagaaaggaaccgataaatttgatgagtgaaatcgtcacatcctccggtccgtgatgcagcagctcactgatatcaaacaggtccgaggtaatacgggacagaagctgtccgaccttctgattatcaaaaaacgtaaacgaaagcttctgataatgctcaaaaatttcgtttcgcatgtcgtgctcaatctttgcacccatgatatgtccatagtaggcaatataaaaattgcagaagcactctaaggcgaccatcgccaccatcgcagcgcccagcctcaaaatgatctgcagcgcctcctcacccggcagaagtacgaccgtcgtcgtgatatagcgcacgatcagcggaatcgccagtgtcaccgccgctccgagaatcgcaaataccatatccgaaaaaaacagcccacgatacgggcgatagtaggatatcagccgtttccatttatgttgcatgtcctccccctgttgtcacacttttttgccaatcttctcttttgtcacacctgccgtgcatcgatcatctgagcatgctcagcttaacagctgcaccggcaggcttttacaaaaagcggtattccactcagtccgccactactccctgatcctgcatcaccgcaatgacatcatcgacgcactgctcgcagagcttagtcgtctccgcctcgaccatgacacggatgacaggctctgtaccactctcgcggacaagaattctgccgtcgtcgccaagtctctccgctactgcctttacagcttcctgtacagccggattctccttcgccgcagtcttatcagccacacgcacatttttgagcacctgcggatagatcgtcacctctgacgcaagggatgccaggctctgcttgcgatccatcatgacacccatcaccatcagagaggtcaggatgccgtcgccggtcgtcgcatattttgaaaaaatgatatgtccgctctgctctccgccgaggcagtgaccattatcacacatgttcgcatagacatatttgtctccgaccgccgtcttctcataggaaatgccgatcttgtcaaacgccttgtacagtccgaggttcgacatgaccgtcgtcacaacggtattattggtcagctggccttcttcctttaaatactttccacagatatagagaatcagatcgccatcgatgatccgtccattggaatctaccgcaatacagcggtctgcatcaccgtcataggcaaagccgacatccagtccacgctccagcacaaattttttcagctcgccaatgtgggtggaaccacaatcccggttgatatttgtgccatccggctcattgtggatgacgtaggtcttggctcccaatgcgtcgaacacactcttcgcgatcgaagaagcgcttccgttggagcagtccagtccgacctttgtatttttaaaggaacgggtcgccatcgcaatcagatgaccgatgtaacggttccggccagcgatataatcaactgtacgcccgatccgctcgcccgtcgccagtggcagctccccggtctttccatcgatgtagtcctcaatcttctgctcgacctccgcctcgatcttcttgccgcttccgctgatgatcttgattccgttgtcatagtatggattgtggctcgcagaaatcatgattccacagtcaaaatcctccgtacgcacgacaaatgatacactcggagtcgtcgtcacatgcagcagataggcatctgctcccgaagcagtcagtcctgcagcgagtgcgtactcaaacatgtagctcgaacgacgggtatcttttcctattacaatacgggccttatattcctgaccgtaataccagccaaggaatcgtcccaccttaaacgcatgctcaactgtcagttttctgttcgcttccccgcgaaaaccgtctgtaccaaaatattttcccataatgaatattctccttttccatccggttgcagcatccgggcaacatccacggaattgctttttttgcatctacttcatcatacacgcaatacaggaaaacgtcaaaccaaaaaaccgccggagggacacggcctgccatgatatcccccctgcggcttttcctgcattcacttagtccatgcggacattcgcaattcgtttcactacttgctcatgaacgcagtcgcttcgcgacttgcgttcaaatattcggcgcgtcccttttcgtaaaggttattcccttcgcaatcgataatgacgaccagcggcatatcctccacgtagagcttccgtaaggcttctgcgcccagatcctcataggcgatcagctctgcctttttaatgcactttgccagcaacgcaccggcgcctccgatcgctccgaaatagacgccgtcgtacttcttcatcgcctctacgacctccggaagtcttgcaccttttccgatcatgcctctggcaccgacagacatcatcgtcggtgcataggcatccatacgtccgctcgtcgtcgggcctgccgatccgatgacggcacccggcttcgccggtgtcggtcctacatagtagatcgtcgcatccgtcgggtcaaacgggagctgctccccgcgcgcgagcgcttcgcacatacgcttgtgtccggcgtcgcgtgaggtgtaaatcgtacctgtcagatatacctgatctccggcatgaaggcttctcgccagctcctttgtcaacggcagcgtaatatgtcgtctttccatgctagatcacctccgttttgtggcgtgtcacatgacagttgatattgattgcacatggcatgcctgcgatatgcgtcggcatcgtctcaatattcaggccaattgcggtcgtccgtccgccaaagccctgcggcccgatgccaagctcattgatcttattcagcatctcattttccaggtctgcatagaacggatccggattcgaggaatcgagcggacgcatcagagctttctttgcaagcagtgcagccttgtcaaatgtaccgccgatcccgacaccgatcaccatcggcggacacggattcggacctgccgtctcgaccgtctcaataataaaatccttgatgccctgcagtccggctgacggcttgaacatccggattgcgctcatattttcacttccgaagcctttcgggccgaccgtgatctttacctgctcgcccggcacgatctcggtatagatcatcgccggcgtgttgtcaccggtattgccgcggcgtaccggatcctttacgaccgatttgcgcagatatcctttgtcatatcccctgcgcacaccctcattgaccgcatccgtcaggtctccgccgatgaaatgcacatcctggccgatttccagaaagacgcatgccattccggtatcctgacagatcggcacgttttcctgatccgcgatgtcaaaattctcaataatattgtccagcacacccttggcgatctctccgtcttcacaggcgcggcaccgtttgattgcctctttgacatcagacggcagatgctcatttgcctcaatgcagagcttctcgatcacatcggtgagcatgctcacttctatttcacgcattttcttcctcctgtctatgctcaacaatcctcctatggcattttccttagccgaacatttttctcaattataacaggttctccgtctctatacaactcaaagtaattacttgcgttacttcgtatattttacgcccgtctaccgctcatgtctcgcatagtgtggcagcagcagcggggatacatctccggtatccagcccggcctccttcaattcctctgcgtaccgtgctacatggtccaggttcatcgtgccgagtgtcacctgctttgccttcgcagccgctgcttttcccgcatcacggccaaaaacaataatatccagaagagagtttcccatcaggcggtttcttccgtgaataccgccgactgcctcaccggcaacgagcaggttgtcgatcaccttcgtaaagccatctccgccaatctccagaccaccgttctgatagtgtaaggtcgggtagatcaggatcggaagctttctcatatcaatgccatagttcatatacatgcggagcatcgccggaatccgccgttcaatcgtaccttcgccgtgaagctgctcgatcatcggagtatccagccatacaccggtgccaagcggcgtcgtcacacccttgcctctcgcggtgcactcacggatgattgacgccgcagagacatctctcgtctcgagcggatgcataaatgcctcgccctcggaattgacaagcatcgcgcctatggaacgaaccttctctgttacgagtgcgccgaaaatctgtgccggatatgcaactccggtcggatgatactggatcgtatcctgatacagaagcggtgcgccgagacgatagccaagaatcagtccgtctgccgttgctccgtaatggttcgaggtcgcaaagccctgataatgcatacggcccgcgccgccggtcgcgatgatgaccgtcttcgctcttgccaccagataatcgccggtctccatgttcaggagaactgcacctgccacctgatttttctcatcgcggatcagctcgactgcagaagtaaattctacgaccgggataccgcgattgataacttcatcgcgcagcgtacgcatgatctctgccccggaataatccttgcacgcatgcattctctttctggatgttccgccgccgtgcgtcgtgatcatcgtcccgtccgcatccttatcaaacatgactcccagctcattcagccacttgatcgcatccggcgcctccatgaccagcttctttaaaagctccggccttgcggcaaaatgcccgccgccaaatgcatcgagataatgctgtaccggagagtcattttctttgtccgctgcctggataccgccctccgccatcattgtgttggcatcgccgatgcgaagcttcgtcacaatcatgacatccgctcctgcctcgtgtgcctcgatcgctgcagaagcacctgctccgccgccgccgataacgagcacatccacgtcatagtcgatcttcgagagatcgacgtgatccttcagaagacggctgttggaatgcagcatatgcaccagctctttgttcgccttctggcctttgttcgggcctaccttgatctcctcaaatgcttccgcgcggtaatccggatgaaactcgcgaagcagctgatccttctcctccgcggtcatacgacgtggctccgttccaagccgggacgctctggtcgcctccaccttttttaccgattccatcatttccggtgtaaacatgactgtgtccctccttacttctcaatttctcttgtattgtagagctcttccatttccgtgatcggctttagcataatctgctcgatcagtgcgtcgtactttccctcatgaatctcttccacacgctttgtcagatgctttgattccggctcaatgtactttccggtcagccgccttgcaagcagtccgaccatcggatgagaaatgccagccggacagcgtacgctgcagcatccgcagctcacacagtcaaaggactcctctgcacacttttccagctcgccgcgctgcgcatacgcgatatactgcataacattcaggttctgcgtacaggcctttgtgcaggcgttgcagccgatacagctgtagatttccggatagagctccatcatcacctgctggtccggtctcagctccccgatctcatacgttcgcttgtccgtcgggaaaaacgggatgctcgcaacatacatgccctcctctacctgtgtctgacaggcaaggcacgtcttcagctcattctttcccttaatcctgtaaatcgtcgcacacgcgccacagaagccatgacggcagccgcagccgcgctttaacgtgtatccggcatattccattgccgccatgatcgtcagatcagccggcacactgtatttttttccgtaaaaatatacgtttaccatgtttgccattttggtaaatcctcctcatctccggtgtattgcatcagtattcgttcggaagctcattgagctcatcgcagcgaaatactgggccatccttgcagacatatttggaaccgacattgcagcggccgcattttccgataccacacttcatgcgcagctccagcgtcgtatagacctgactggtcgaaaatccaagctcctgcagtccctgcaaaacgaacttgatcataattggcggtccgcagatcagcgctgtcttgtctgttgaaagctcaagctccttcagataggccggcacaaatccgacatgtccgtcccagccctcctgctcccggtcaatcgtcagatggacatggacatccttcgccttcatccagacctcctgaatctcctttagctgtaccaggtcatctgccgatctggagccataaaggatatccaccgtaccataatcatcacggttgtccagcacataattgatgacggagcgaagcggtgcgaggccgattcctcccgcgataaacagcagatcctttcctttgagcttatcctctaccggaaaatggttgccgtaaggcccgcggacggtgatctcatcgcccacctccaggctgtgcaggtagctcgtcagactgccgcactttttgatactgaactcctgatactccctgttcgtcggggaggatgtgatggaaaacattccctcgcttactcccggctcacagagcatcgcacactggcccggcatatgctcaaacagcttgccgccctccggcgcattgacacggaatgtctttacgtccggcgtctcctcccggatatccgtaatgacaccgaccttcgggatcagcgtatccagcgtataatttttttgacatgtacattcactcattcgttttccctccctgcgctgcaaatgctttgatcacctttacgatattcagggactgcggacatttctccacgcagcggccacagccggtgcaggaaaacatgccgtcattgtttgccgggaaatagaccagcttgtgcatgaatctctgacggaaccgctgcatctggctcgttcggttgtttccatgtgccatcatcgtaaaatcagaatacatgcaagaatcccagcagcggtatctctggattccgtgacctgtatcgtaatccttaatgtcatagcactggcacgtcgggcacacaaaggtacaggtgccacacgccagacatgggcggtacagcttttcccacagcggggaattgaatttttcctcaagcacatctttgccccagtcatccagcgaaagctgcatatacggaagcgcttctgcgatcttgtggatccgcgccttttctgcttccaccttttcttcaccgtccgccgcttctgccagcagatcttttaccagctccgtcagtacctcacctttttcgctctgtgtcttccagtacagaacttctcctgtcatccagatggcgacatcggccttcggatttgcacagtcaatcccaaacgctttacagaaacaggaatcctccggctcgtgacaggccattgccacgatcgtaccgtgtgctctcctggctgcataaaaggtatccaccgggtctgccagaaataccttatcgagcacctccacgccgcgcagatcgcaggatttcatgccgaatacgacaaacggctgctcctgtaatgcctccggggtaatggaaatcttctttccgtcccggtagcaggtatagagattctcactttgcgggaaaaatgcatctttggcggatttcacggtctttaatgtatccagatccacctttgcatcttcactccacggcgcataatttacctgaccgcaggcttctaccggcagatacagctcctgggtctgcgcaattttccggaataattccggaagcttttctttcgcaatctgatacatgccttatcccctttctgccacaatacccggctctgcgtcctcaaaggtatagctcgtcagcgggctgcgctccacaacggcctcgcctgcctgatacgttccgtaaagttcatcgatatccttgataaatttccggttgaagaggtgaagcggaatgccctgcggacatacacggctgcactctccacagtcggtacatctgccggccacgtggaaggcgcggatgatatggaacatcttctcctcaaaggaatccacatttgccttctgcgagctgtcaaacttattgctgtcaaatacgcacttgcggcagctgcaggccgggcagacatttctgcaggcattgcagcggatgcatttaccaagctcactctggaaataagcaaaacgctcctgcggagacattgcctcgatccgctctacctctgtgaaacgctcctgatccttcgtatccttcgactcgccgatccgttcatcatagatctgatgctccttgcccttgcagacatggcagcggctaagcatggcatctgcgtatgcgcaggtcttttctcccgatgacgtctcgaatcttaacgtatctgccgcatcctctaaagaagcgccctcaacgtttcggattccgcggattcccatggatcggattttttcaatatcaagctttcccttgcagcctactccgatgatgtatgctttttcccggtctacacggtgctcactaagcagctgattgaagctgtaggtatcacacggctttaaacagaccagcgtcttcccatccagtttggacgcttcgatcatcatcttgcttaagttcgccccacaaaagccgtcatatacaaaatcctttaattcttcttcgttttcaaagaaagccggttccggattccacggcatgtctccggccttccagccaagcacacgggctaccgtcccgtctgccagcagttcttttgcccgtctgatcagttcctgcatcttatatcccccaatctcacgtttttgccgagactgtaaatcttctcaacaaactcattcatggtcgcggaaaactttacaccctctgcggcagatacccactcgacacgggtacgtccgttttccactccgaggtaatccagcatggagaaaagaagtgtcatacgtcttctcgcataaaagtttccgctcgtataatgacagtctcccggatggcatccgcacaggatcacaccgtccgcacccttctcaaatgcacggagaataaacatcggattgacccggcaggagcacggtacccggatgatcttgacatcggccgggtaggacaggcggctgcttcccgccagatccgcacccgcgtagctgcaccagttgcagcagaacgctactattttcggtctgaattcttcgcttcgctctatcgacatatcgcatctacctccgcaagaatctgtctgtttgaaaagccctgcagatccatggctccggacggacacgttacggtacatgcaccgcagccctggcagagcgcggtatttacctgtgcgatacgccgcacctcacggataccgtgatcatttacctgcttttcttcataggaaatcgcaccatacgggcacacatttgcacactgggagcagccgttgcataaaagctcatccgcctgtgccgtacacggatttgtcatcagcctgtctttggcaagcagtccgatggcttttacggccgccgcacctgcctgtgaaacggtctccgggatgtccttcggtccctgacacacgccggagaggaagatgcctgccgtcggagattctaccggacgcagcttcgcatgcgcctcggtcaggaaattgttcgtatcgatgctcgctgtcagcatggtggcgatctttcttacgtccggattcggctcgattgccgccgccagaacgaccatatccgcttcctttaatatctgacggttgtcgatcagatcgacgccgcgcacaagcagctttccgtttggctgcaaaagaacctttcccacctgtccctttatgtaattgacgccgtactcttctactgccctgcggtaaaattcatcaaaattctttcccggtgtgcggacatcgatatagaatactgtgacattgacatctggatatttatcccggatcagcatggcatgcttggctgtatacatgcagcagatctttgaacaatagctctttccgcggtcgtctgcacaacggcttccgacgcactggataaataccatttccttcggtgcttttccatcggagagccgctccagatgtccctttgtcggacccgccgcgttcatgatacgctccagctccagagaggtgatgacatccttactctgcgcataagcatactcatcatatttatcaagcttaatcatatcgaagccggtcgctaccacgatcgcaccgtatttctgtgtaatgatctcatccttctgctcgtaatcgattgcacccgcctggcataccttggagcagacgccgcattttccggtcttaaacttcgtgcagtgctcgcggtcaatgaccggcacattcgggattgcctgtgcaaacggcgtatagatcgcagtacggctgccaagcccgcggttgaactcgcttggaatctttttatttgggcacttttcctgacaaacgccgcagcccgtacacttactcatatcgacgcttctcgcttttttacggatatcgaccgtgaaatcgcccacaaagccgctgacatgctccacctcgctgtacgtataaagcgtgatgtttggatgtgtgtttgcctctaccatcttcggtgtcaggatacaggccgagcagtccagcgtcggaaatgtcttatccagctgggacatccttcctccgatgctcggagttttctctacgatatcgaccggatagcctgcctctgcgatgtcaagcgcggtctgaattccggcgataccaccgccgatgacgagcgcacgcttcgtgacgaggctctcacccggctgaagcggggtgttcagattcacctttgcaacggctgcccgcatcagaatcacagccttctccgttgcctcctgcatatccttgtggatccaggagcagtgctcacggatatttgcgatctccaccatgtacggattcaaccctgcgcgcttagctgcattccggaatgtcgtctcatgcatgcgaggggagcaggagcataccacgactccgctcagccttttttcccggattgcctcctgaatttttgcctggccggcctcggaacacatgtactgataatcctcggcatgtacgacgccctgttccttaagcgccatctccactactttctttatgtctaccgtcgcggctatattacttccgcaatgacagacgaatactcctatcctttgcatccgcttacctcctgtatcttctgaacgcacttaccagaagctgctgcggcacctcaggatccagcagctccgggatctcatccggggaaagatacgcctccccacgctggcggatcaccagctgtctggccgcatcgatcagctttcccggctttacgtctctcggacaacgctccacgcaggcaaagcaggataagcacttccacagagatttcgaatttaccagtgcttccatatcttcatttatgacataagacacgaactgatgcggcttgatgtccatctcgttaaaggacgggcaggatgcggagcattttccgcacttcatacagcgaagcggatttacgccactgatttcctttatctgttctgcccttgacttctctgtattcacgcctctggcacctcctcttttaccccgagagcctcagcaagaagctctgtaaaatagtataccggaagtgcgccgtttccggccatgttcaggttgtacctgcaaagcggacaggcggtgatcagcatatctgcgccaaagcccgctgcgctgtctgtgatatccttgcacattgttcctgtaagttctttttccttcagggaaatgtagcctccgcagcactcattccgatacggataaatgaccggctctgcaccgatggccctgataaaatcttccatgatcttcggattctccggattgtcaaaggccatcaccttaccgggacgcagaagcaggcagccataataagcgccgatcttctttccggtaaacggatttactacttttttcgccagctcgtcaaaaccgacacggtcgcgcagcacctccagataatgcaggacattcgtctcccctgcatacggctccaaaagctgcatgtaattgtttgcacgcatccggatatcttcgacgttcttcatgtcgtcgttgaccctttttatgacatggtgacaggcagagcagagtgtcacgagctcctgccccttttccttcgcctcgttcagggcacggacggaggagagctttgtcgcaatctcatcacagccaagcggatagacacctccgcagcactgccagttctcaagctcctccagttcaaatccaagtaccaccgctgaagctctcgcatatacatccagcattttcgcctttgtctttaaggtacatccgggataatagctgtacttcataattttataatcctttctttcagttctgcgctcatccgcgttcatccagggatccgagcagatcctggtaatcgctgtccagcgcatgtgcattcgtggatttcttctttcgcagctttacagaggccgctgcctttgcgatcggctgcacggtcccggctcctgccacgcagccgcccggacaggccatgccctccagcaaatagccgttgtattttccggccttcgccatcgtcagaagcttcttacagtctgcaagtccctctgcattcgccacctttacctcacggtccggatattgctctttgatacagttcacgaccgcctctgcgactccgccgctcaccgcaaagccgcgcccgtctccgctcgcaccatgcatcggctcctgctcggcaagagtggaaaaatcaatctgctttgcctcgaacattcccatcacttcctcgaaggtcagcacgaaatcaatgtcgctgcggacagaccggcgtcccgcctccagctttttcgccgcacacgggccaatgaacgccaccttgcagcccggatattttttcttcatcagacgtccggtaagcaccatcggcgtcaatgccatggaaatgcactcgctgtagtccggaaacagcttcctggccatcatcgaccaggccggacagcacgaagtcgccataaacggcagcttctccggtacttccttcataaagtccccggcttcctcaatcgtacacaaatcggctccgatcgccacctctatgacatcggtaaagccaagcgcttgaaatgcgctccgaatcctgcccggtgtcagtcccggcccgaactggccttccaccgcaggcgcaatcgcagcatagaccggcacatcgctctttatcgcctgaatcgtctgaaaaatctgtgctttatctgagatcgcgccaaacggacagttcaccagacacatcccgcacgaaacacacttttcctgatcgatatccgcccttccgtattcatcggatctgatagcattcattccacacgcctttgcacacgggcgttcctgccggatgattgcactgtatgggcaggcagtaatacactttccacatttgacacatttctcctgatcgatcacagatttcccgtctgcaaatgaaatcgcattttttggacagacctcctggcatggatgtgccagacagccctgacagacatccgtcacatgcacgatattatccggacatttatgacatgcaaatttgataatattaatcagcggcggctgatagtatttctccggccttacacattccagcgcaccttccgataccggcgcatgctccgatgccgcccgaaacggcagccccatcgcaagacgcatgcgttctcctacaatcgcacgttccagaaacacgctctcccggtaggtcgagatctcgcccgggatgatccggtacggaatctgctccatctgtgacagatccccatcctgataatcgtaggccagccttgccacttcagcaaaaaccatttttcgaatatcatttaccgaagtgtatactcctcgcatcatctcactccctttcgttttttatacgtttgctgttccactgcagatgatggcacatctgaaatggaacagctgtggaggtattcactgtgcaatcgctctgccatgagatgatccctgtataaatcaaagcagacggacatcagatcctgcctgcattttgagcaaaaaaatagtggctgctacccttgcagacacacggaacaaaccatatggtattccctgataccctatggtctggctggatgcttatgctgtgtctggagcacatctcatgtaccaggcaggtttcctgacttacagatcatcgcttgcttcaccttctcacacatttgggttatgcaatggttttcgaagctcgctccctgaatacagtgaccagttcgctcaggactcgcacctgattccctcttcagaaaatgtctcataaatggaatcgaaaaaaagacgatcttctgcacctgatactgcaatattcaattacactttttcattatataaatttgttattattttgtcaatggatcttttcgtcatactgccctgatattagacgattcttaagatttttcttcgggtttttatcttgcttttcctatgcgcaccctctataatgaaatcggaaaatgctgttagatctgacagcatcttacatttccaatcagttaaacggttctcttctatggtacacctgcatttgcagccggtttcggccagccacaaaggccggtgtttcgcattgttcggagaacttattatgtaccctcgcatccttctatccggtatttcggaaagatttcgagagtatattttcagaaaggggagaaaaaaggaactatgaaaattaaacgaatggtatctgcccttgcgctcgctgcaggtcttgccatttctgttccgtctcttgcgtccacgtttggactctcatctcagacgatgacgagtgttcaggcagcagacggctggcagcgggacgatggcggtgttttctatctgcaaaacgacacgcgggtgaccggcctgaaggatatcgatggcgcgacctattactttaacgccaacggctatcgcttcaccggggcaatcaagctggacaaatacacctactacttccatccggaaagcggaaagctctgcaagggctacgcaggactgtaccggatcggcgacaactccaacgactattacttctttttaaacagtaagaagggtcgggtcgcagtcaacacgtgggtaaagtccaaaggcaaatattactacgcaggcgctgacggaaagattcagctcggcacgatcaaggtcaaaggaaagctttatcacgtgactccgaagggacgtatgacttcgtacggaagatcttcctatgacggaaagtactacaacgcttcctcaaagggcatactgctgaccgggctgcgcaaggtaaagggcaagcagtactacttcgacaaaaagaccggcgaacgtgtttcgggacttgtaaaggtcggcaaatccaccttctactttaatgaaaagaccggcacagccaagaccggctgggtaaaggcggatgacaagacctactattacctgtcgaactacaagcgcgcttccggctggaagaccatcaacaaaaagcgctactacttcaatccgaaaaatggctgcgcacgccaggaattcagctggctgaagattggtaagtcctattattactttgatgcaaacggcgtagtcgagaccggtttcttccgggtcggcgcagatatgtattacgcaaacacgaagggtgcacggaagaccggatgggtgaccgtcaacggacggaaatatttctttggcccgaagaccggagtcatgcagaccggatggcttacctaccagaaggctaaatattaccttaccccatcctccgcatcgaagacctatggagccgcgatcaccggatggtaccggacaaatgatggcacctattacttcaactcagatggaagaatgcagaccggatggctgcagcaaaatgatgtaaagtattatttcgataagacgaccggcaagatggtgaccggaaaacgtacgatcgatggaaagctgtatgacttcggcacaaacggtaagatcaaagtatctctgaccgggccgtggagcattaaggtacagcgcggtaccgccagcaacggctatcagtgctttgtcgtcgtataccggggcaacaccgcagttaaggcatttgtctgctcgaccgcccgtgccggatgcactacaccggccggtacgttcacgatcaaggataagctgtactggcatgagctgatgggaccgacctggggacagtattgctcccacattacttcggatatcctcttccactccgtgccgaatacgagctacaacaatccatacacactggagacctccgagtacaacaagctcggcaccgcagcttccgccggatgtatccgactctctgtaaagcatgcaaaatggctgttcgacaatgttccggtgggcacgaaggtaaccgtcagcaacaaggtcacgaagccgagcaatatcgaaattgaaaaggtaccgaagcagaacctctccaagagctatgacccgaccgataccttccagaatccgtacagtgtacgataactgatctgtttcagaaatgatttgaggcagctgcaaaacgcagctgcctcatttgttgttgtgacgaatcatacacctgtttttttgtcatttcaatcgtcagtaaagcggacattcgcaatccatccctgcagctctgctgacagggcctagcttcgctacttgctcatgaacgcagtcgcttcgcgatctgtgttcacgctgcgaaatacctcgcccccaagctcctgctcgataaatgccgcgagctcctctgacgccctctgctcctgtgggccgtcgcataccagaatgatctcgtccatctgctgtacgcacgcgctcagaagtccgagcaggctctttgcattaaattcccgtccgcggaagcgaatcaggatcttcgtcccctcgtactccattgcctttgtacagagctgctgcgccggacgcaaatgcagccctacttcatttcggatctttacttttgtctcagtcaaggctattcctccgtactgtcctcatcatttccgtctttgattgcggtcgctgtcacgaccagtttcacctctgataccagtgtatagccctccggaagctgcacatttaccggcacctcatagacaccctccttagcacactcactgaaatccacacttgcctttatatcactgaccttcagatttggctctccggccttcgcatggacgctgatctgtacctcatctgccggtgataccgtcagactcatcttcgcagaatccggacggttcagcacctcaaaggtcgataatggtacccggatggtctgatccccagtcttctcgatctgtacggtcacggaaatcgtcggatcggcatccgcgacaaggcgcacgccctccaaggaagaaagtgtctcactcaggtcgatctcctgcgtcacattctccgtcgcgccctcgaccgatacaggatctgctatcgcaatctctccgcccagccgtgccagtgcctcattcgtgccgacaagattgatcgtcaccggaatcgtcgtgatgcccgtgattcggtacccctctgccggttctcctgccgtctctaccttgaccggaatgtcattcatcacctgccaaagtgtcacatcgaccgtcacctgattgtttgagagaagaacacccgcggaatctttgatctgcaggcggtccatctgtgatgtcagcttatcgccgttcttatcgtaaatcacgatgttgccggtcaaccgctggtccgacttgatccgggccgtattgacctccgctacgaccttatcgatctttttcagaatactctccgcacctgcgacctgcacagtctttccgccgactacctccgttgtgccgacctcatagccattctccggcttgccgttcgtaacgacattcacgataaattcactctgctttttcggctccagctttaccttctgcacggacgggatcacctcgatctcatccagagtcacagccggattgcggcactccacgcggagcggtacgctccccatctcattcatcgtttccatatccgcgacgacctcaaagtccgaagcagtcaggctcttcagtacacttttgcgctctttcaccttaatgattaccgtatctccgtagacatcgtcctcgacgacatccagcaccttatccagtgcggtaacgctctccacattctcctgctgaatcttgacatcccggaagaggcgcacgctcatcggatcgtttacatttaccacgagcagccagatcccgaaagccacgaacagcgataacagcttcagtcccatattccgggtaaatttatatttcatttttattccagcctttccagagcctgaatttcttctccgcagcagtcttgttctgcgctatgacaagcagctttttcagctcctctgccgtcagcttccgcatcagctcacccttgtaggcgacggaaattgccccggtctcctccgaaacaatcaccgtaagggaatccgtcacctcactgatccccacgccggccctgtgccgtgtcccaagctccttgctcagcagcatgttgtcggaaagcggaaggtagcaggtcgctgccgtgattcggtttccgcgcacaatgactgcaccgtcatggagcggtgtgttatgttcaaaaatattaatcagtatctgactggtcagcaccgaatcgatcactatgccggtccgctcatactcatccagccggacattctgttcaatgacgatgagcgctccggtcttggccctgctcatctcagatgccgcctttacgatctcatttaccgtcttgtcactgaaccgctcagtcacatggttcgtatcgatcggaagcagtgaagagacgatctttttctcgccgattcgctccagcactctgcgcagctccggctgaaagatcacgatcgcagcggtaatcgcaatgtcgattcctctgtttacaatgaaaatcagtgtatccatgtgcagaagatacacaagggacacacagatcaccagtaccatgattcccttgagaagtgtccatgcccgggtatttttcacccatagcagaaaactatatacaaggaaagccaaaatgagaatttccagtacatctgtcacggtaatggaaaatgtcggtactgtgaaccatgacagataattcgacagccagattctaatgctgctcattttgtcctctcctttctgatcgcatttctatttcagtatagcacacattttctgccgtgcaaaccgtctttttcccttttcctatacataaaacaagaaaaaatatatgcctgatcccggcttccccaagcagccttgcgagcgcgtctgctgtgcttccggtcgtgtacacatcatcgaccagcaacacccgctgcagccctcctgcaggctttcgcagtgcaaagctccccttcaggttatccatacgcgcttttcggccgagctgcttttgttcggtatgcggtctgacgcagcagatcagcttctgctccaccgggattccggtaagtctgctcaatttttttgccagcagttcagactgattatagccccgcttctgccgctttttccagtgcatcggcaccggaatgagcagctccggctgccagatatggagatgcttctgcagcacctctgccatcaggacggcataaaaatccagataatctctgcgattgtccgccttcatccgataaacggagcgtcgcatggcaccggtataaatgacggctgctgccccctgatcgaaccagtgtctggtgcgtaaacagtcatcgcagtactccgtctcccagcttccgacaggcttcccgcattgaaagcaggtcggtccttccaccttcggaagttttttcgcacaggcacggcagcagccttcctcaccctttaccagaatcgtgtcgcataaaatacagcgcggcgggtagagcaggcgaagtaccgcctttcctgtcgttttcccaagctgcagcggtgtaaatttcttttcggttctctccatagataaataccgtgctctctccccggtattttcttatcgctagtttttctgcttattctgccattttacattgcggaaagctcctgtatacgtgcggccagcgcagtgtagcgcttctgctccatcgtattgtcaatcatctgcgtaaatgtacgctcatccccgacaagcgtcacacatttccgcgccctggtcaccgccgtgtagagcagatttcgggtcataagcatacgcgggcctgacagcagcgggatcacgatcgccggatactcactgccctgcgatttatggatcgtcacagcataggccagctccagctcctctaaggcagcgtaggtgtattccaccatgcgctgttcatcgaactctacggtaacccgctctgtctgctcattgatctcccggacaattcccatatcgccattgaaaatgccaagccccttctcaaccggaatcccgtagcggccccgcacctcccactcaatctgataattgttcttgatctgcatgaccttatcgccctcccggaacagcataccattctgctcatgctccttttttccggcatccggcggatttaagtactcctgtaaaattttgttcagccgctcgactccgagcaatcctttgcgcatcggcgtaagcacctgaatatcatatggcgatgcctgtacatagcgcggcatcttgtcacggacgagctgaatcacaatgctgatgatgacatttgcatcctgacgcttcagaaaaaagaaatcccggctcttattatctaaggtcaccggttctccacgattgatcttatgcgcattcacaacaatgtcgctctccttggcctgtcggaatatccgggtcagctgtacgaccgggatctcgtttgattcaatgatatccttcagaatacttcccggtccgacggacggcagctggttcatatcacctaccatgatgagccgtgtgccgatcgtcacggcatccaaaagcgcatgcataaggtaaatgtccaccatcgacatctcgtcgatgatgatgacatccgcatccagcggattctgagcatttctgccaaatccttccgtactgccgccatcctcctgcacaccggaaatctccaataaccggtgcaccgtcttcgcctcgaatccggtcgcctccgtcatccgcttggctgcacgcccggtcggcgccgccagaaggatctgcagcccctctgattcaaaataggaaatcagcgtattaatcgtcgtcgtctttccggtaccgggaccacctgtaatcacaagcagcccacagcgcactgcctcaatgaccgcctttttctgcatcccgtcgagcaccgttcccgtctcctgttcgatggaggcaatcttcttttcgatcaccgccgcatcaatctcaccggtaatattcagatcgacgagcatccgcgctgtactcatttccatatagtaggctgaggcgctgtacacgcagtcccggtctccgtcttttcggatcacgattttcttctggattgccatatcaaccagaaacggatcgagatcatcaatcggcacgccgagcaattctgtcgtacgtcccagcagcagctcttttggcagaaatacatgtccctccgacgccgcctgctgcaggacataggagatcccacattttacacgatattctgaatcaaagctaactcccgcacgctttgcgatctcgtctgcaatccggaatccgatgccgctgatgtcatccgccagccggtaaggattctgctcgatcacctcgtacatccgctgcccatatttttcaaaaatcttgacggccagtgccgtactcacaccaaattgctgcaaaaacagcatcgccttccgcatgtcgcgcttttcataaatctgctgtgcgatctcccgcgccttgcgctcgctgatccccttgatctccgccagtcgctccggctcttcctcaatgatccggaatgtatctgcgcgaaaccttcgcacgattctggcagcaagtgccgtgccgactcccttgatcgccccagatccaagataccgctctacggattcctcatcctccggaggacggatcgcgtacgtctcgaccttgaactgctccccatacgtcggatgtgctatgtatgtcccttccgcttcgagccgttctccctccccgatataggaaaaggtgccgacacaggtgatctcggtatcctccgatgtcagcaccatgactgtatagccattctcctggttccggtatatgatatgatctacataaccttctattttttccattcgcgtctcaattcttttccatcattttcccgtttgcagccatcagctctacaaattttcctgtgccgactgccactaccgtcatcggatcctctgccgtcatcgtattgatgcccgtccgcgcctcgatcagctcctccagaccgcttaaaagtgcgccgccacccgtcagcacgattccccggtctacgacatctgccgcaagctccggcggtgtgcgctcaagcacgctgtgtacagcgtccacaatctgtccggtcacttcctttaaggcatcgcgcgtgtcctctgaggtcacgcggatcgtcttcggcagtccggtcaccaggtcacgtccctttacctccatcgccttcggctccggcttttcaaacgcagtcccgatcgtgatcttgatctcctccgcggtctgctctccaatcatcaggccatactttttccggacatattttacaattgcatcgtcaaaatcgtctccggccaccttgatcgaagtgctcacaacaatcccgtccaaggaaatcaccgccacatcacaggtaccgccaccgatgtctacgatcatattgccgcacggacgggatatatcgatcccggctccgatggctgccgcgatcggctcctcaatgatgtgcacctctctggctcccgcctgataggtcgcatcctccactgcttttttctcaacctctgtgatactgctcggcacacagatgctcaccctcggctttcgaaaggacagcttgccgatcgccttctgaataaaatacttcagcatctgctctgtgactgtataatctgagatcacgccctttcgcatcgggcggactgctatgatattgcccggtgtccggccaagcatgagccttgcctcttctccgattgcttttatcttattggtgtcccggtcataagccaccacggacggctcctttaggacaactccttttcctctgacataaactaatatgctggcggttccaagatcaattcctacatctgttgctgccatctctcttacccctttcctgactgtttgcttctcattcgtttcaggattatttgtctccccgctgctgttcataacttttttattataatatagattgatagaatttggaaactctttttcttaatattcccctaagtaaaattctatctgtttcattgctgtctattatacccgccagcctcgttttagatgcaaatagcctgacctgtttttatacagaaatgctttagacgtcctaaaggttttcttaactttttttccgttttttttagaaactggacatactttcaacatatttttcgattatgatgtaagagtattagcgaggagctaatatatttcataactcacacttggcagcccccacacgctgccaagtactccctcaaacattacctgtgcgggagccaaacccgtgcagggcaaaacatttttcaacccaaatttttctctttcctgaaaaagtctgacgagcaatcgtcagactttttcttgcatcaaacagttcagcacaacagcaacatgcgaagatagctttcagcaaattttttgctgagggctatatttgcatgttgggatgggcggaacgcccatcagccacagataggagctgctttagcagcgg

SEQ ID NO: 3666 - DNA, 32759 bp, Unknown
  16S sequences of unknown bacteria
tgccatacggtacttctgtatccgttctgacttcgctgccgtcccagtttacccacttgattgtgtacttgttgacttccttatcatacactgcggtgtaaactgcatcgccggtaaccatcttcacttccggcgtccaactcttgaacgtgtacgtgtactgggcatctgcttctcttgtcggatcttccggtacttccagttctgtgccatacggtacttctgtatccgttctgacttcgctgccgtcccagtttacccacttgattgtgtacttgttgacttccttatcatacactgcggtgtaaactgcatcgccggtaaccatcttcacttccggcgtccaactcttgaacgtgtacgtgtactgggcatctgcttctcttgtcggatcttccggtacttccagttctgtgccatacggtacttctgtatccgttctgacttcgctgccgtcccagtttacccacttgattgtgtacttgttgacgttccactttgccttcaaagttacatcctttgcaggcatcgtgaacgcatcgttctcgatcgtaacctcttcgctcgtccaatctgcgaaggtgtagccttcctttgtcggaactgcttctattacgttgacctgatcgttttcaaactttctgaatgtatcttcggtttctgttgtccatgcgccgccactcagatcgtaggtcacattgaagcttgcctcgtactgtgccttatatacctgattactggttaccttctggagcggtttatcccaatctgtgaacttatagtcatggtcttcgtcactcggtttggtcggtgcttcaccggtataagccttcggcatcgtgttgtatgcaacatcgggctctgtctgaagaacttcatcgttccagtttacccatgttaccgtgtacgtcttcacctgccaaaccgcatagagatcgttatcgccgttagcgtcgacaaagaccgtagcgcctgctgcgtattcaatcgtactgctgtcccgcgcggttgcccagccgaggaacttgtagcctgtgggttcggtgaagccgacatagtcatacgatcttacggttgcggtcgtattcttcgggtaacctttgtcttcaaagatctgcgtgctgcccccgaaattataatgatacgtaatcttcacggtttggggcttattggtgtagactgccgtcaacgtggtgttctttgtgacggtaatcttatcgcccgggtggatgagcttgccgtcttccgttttccaagcgcggaagttttcggaattttccggcggaagtacgcgggcggagctgccgcttacatacttctggttatccgttgctacgttttcgtttttgtcctcaacgtatgtgaccttgaagccatcctttgcggaggggaagaacggggaaatcgtaacggagctgtaaagctcggtatctacattgaacagcgcgccgttggaatcaatccaagcggagggctgttcctccttgaacttttcaagcagtgccttaaaatcttcggaatccgaaagctttgtgccgtacggaatttcaatcgttttaaactctccgtccgcagaggccgtcaggtaaaccgtagcttcaataaccggcgcctgccactttgcgaagagcgtaatgttctgtgcgggcattgtcttgccggtgaagtcatacgccgtgccttcgcaaagctcgttatcataccagcctgcaaacgtgaagtttgcgggtacaccggccggtttttcaggtgtgtagttgacatcggaaatatcctgctgatacttgcggctgattatattatccttcgcaccgttattcttgaaaacgatattataggaattacgggtatagtagaatcttgcgttgttgtaactacgtccattttgcgtaccactactgtacgtaaagccagtaattggatacttatcttcttttgatactgtataacctgtaccaggacttgtatcgtggtgatcttctttataggttactccaccgacagtagttgttcccttttcgcccggcagaacttctacataatagtatgcagtctcactgcctctaccggttttagggccatagaaagtcgcaccattcaatggcatggtattaatattgacctgataggtactaccgccatcacttgtgctccatgtgttgctgccattgtaagtaggccacttcttactgatgttcgcgccatattttgccgtaattctaagactggtatactcacgagaagaagagaacaagccactgtagctgtagaacttaacgtcataaacatttctcttataataaacgtttacgattgtggagccgtcaccggcaatggtcttctgcgtaatcgtctgtgcggtaaagccggaataagattttgctttagcgtttgttctgctgtttgtggcaccggtctttttttcaatatcctttgaggaatactcgttatcatctgcattttcaagccaatggataacggtgtattccgtttcggaattggctttccagtgtgcggtaacggtagccgttccggaaaccgttgcaaccggtttgccgtctgcgtcataccaaccgtcaaacgtgtagccgctgcgggtgggggtgaccgtgctcaggtcaagtggttccattcggaactgcggcgccacatagtcgccgccgtcggtattgaacgtgacccagaaaccggttttaactaccgggtaaacgtatgtaacgccggctgcaaatgtgatggtttcggaggtatcgctgcccggcgtggtgctccagccgacaacgcctttttctttgcccatggtgagctcgacttttgcggtcgcggcgttcaaatctgcttccgcaacgttttcaccggctacgcctgcggcggtgtaataaaccacctttgtaccgtcttcattcatgaagtatacgtagctgtactcctcaaacttcgccgtaacggtcacttccttgccgctgacatccgcgactgtgccgaagcttaacggggtctcaccgacataccacccaacaaagcgtgcgttttcctttgtcggtgcaggcggctcgaggagctcttcgccttcggcgacggtctgctgccactcggtcagttccttgccatctgcatcatctgcatcatagaaacggtaggtatcgaccttgggcttctcgtcgtccggacgcaacatagtcattgcaatgcccgtttccgcgctctgtttcgcaggtgcagtttcctctgcacctgcggcgggggtcgcctgtgcttccacttcaacgggagccggggtctctaccggggcgggagtaggtgtctcctccggagcgggagtgggtgtctcctccggagctgcggtctcctcgggcgcgggcgtttcgtcaacgaccggcgttcccccctgcataacatcccctgttgcagtgtaggtgttcgtttcctcatcactcattgcaaacgcgcccgtaggacatgccgaaaccagcatacatgcgcttagcaacacggcgatgatcttctttttcatagtgttttcctccaatcctgtgatttgtccgttttataacaaatatggattcctaaattgatgtgtgttactgtgccaaaaccgtttccatttggatgagcagctccagcacactgcggaacgcggcctctttgccgccttttgtccaccgcagtctcccctgccagctgtaattctggcggaacaggatgtccagttcaaacgtgggtgtttccgtacattttatgggagaagctttcggtgcgccgcctgtatccagctgctcttccaaaagcaggatcaggcgtgaaagacttcggaatagggtttcctccgggagcgtcccgccggagaccctgccgcggatgacaccgtcctccgcttcatccacaaagatacggaaggtctctgtgccgatcggtagcatacgattttctttcacctaacccctccttttgtcttttgtgattctattttacacaaaggtgctatgagaacgctatgattaagaaggtttttcatagaaaaacgacctattttctcataaaaaaagaaaataggtcgtagtttttttgttaactgtgctgcgtcaaccggtttatttttttaggtgacggttttaggcctttcggcgctccgttttctccgttgctttttcttctgcgcttatatgtatgtggcgcaggtcgagcgatttaaaggtgtaggccgcaccgcttttcggatattccttttggaaccgattgaacacacggtgggaaacgagcccgccgttttcgccggtcgcacccggcagcagcacccaaaactggtttgcgcccacctttgtgaacgggtcgcccgcgcgcagttcgtttaaaagcgtcacttccatctgcttcatatatacagcgcgcttttccgggtctatcgagcggtttgcaagccgcacaatcatcaacgccgcaggggtatcgtttcggcgcatctcgcgcacatgcaggtttacaatctcgcggaaaacgttgttatcgcagcaaaacgcaccggtttcctgttctttttcaagcaggaacgtttgaatatcttcttcactcgtctcgctgccgtaaagctcctgcaccgcaagcgccttctgcgcctccagctccgccgaaggcgaaacaccgtagacctcccggtacagcgaagcgatgtaatcatagtgttccagcgcttttttcgggtttttgttttttatgagcgcctgcatcaaaaacacgctgaattcctctgcggcgggatctaaacggataacgcccgtgcagagcttttccgcatccgtaatgcgtccgagcttcaaaaggcgatccaccgccgcgcgacataggcgcgtataaagcgagcggtaatacgtgttgaggttgatgcaccagaactccgctgcgctttccgtaagaaaatcgccggtgtaaagcgccacggcttcctgcgccagggcaaccgatttttccatatcttcttcggcaagcgctgcctttgcaagtgtttcaaattgctccacgtcaagctgcgtctcgcggtccggcgcccagcgataatagcccttttcgttatggattataacctttgcgtgcgtaaagccgagctctgccagcgcagcccttgcgcggctgacattattttgcagcgtgcttaacgggttatcgttttcggcttccggccacagcaggtcgatgagctcctgtgcggaaacaccgcggtttctgttcagaataaggtatgccgtaagcgtccacagtcttctggaacgtcccgtgaggctcacagcgtgcggaacctccataccttcctgctttaatgtaaacttgccgaacatggtcacatcgatcttcggcacaacctgtatcgtttcaccgttctgtgcttcacacggcagcccggtggtttcaatttctttcgctgttcgactcatgaacggttcatctccctctttcagaaataacggttcaaaatatcaccccggctattgcgaaaaaataatattccgaacttgttcttttcataaagtataacacgcttcacggtctttgtaatccaccgaaaggtggaaaatgcgatttttctcataagtatttacttttttctcggagaaaatacctttttggcgaaaggtcgcgctaaaaactatggcttaaagtaattgcagacgtttttgcatcgtctcatagttcgtgcagtagtaaagcgccgtctcctctgtgatgcgcttttgccgtacaaggtccgcaagcgccatgtccatggtgcgcatgccctgcgccgcgccggaagcgatggcggcatcgagctgatgcgttttgctttcgcggatcatattgcgtatcgcgagtgtggaatacatgatttcaaacaccgggatgggtgtgccgtctacgccgggcacgagctgctgactgatgaccgcctgcaaaaccatggaaagctgtaagcggatctgcgcctgctggttcggcggaaaggcgtcgatgatgcggtcaatcgtattcgccgcgccggtggtgtgcaggctcgaaagcaatagctgccccgtttcggcggcggtcatcgcgacctccattgtctctttgtcgcgcatttcgccgagcaaaatcacgtccgggctttcgcgcagcgcactgcgcaaagcggcgacgtagctcgggcagtcgcagccgatctcacgttggctcacaatgcacttatcgtggcgatggatgtactctaccggatcctcgagcgtcagaatatgtcccgtgcgcgtacgattgatctcgttgatgatacacgcgagcgttgtggacttaccgctgcccgctgatcccgtaacgagcacgatgccttttttcatctgtgccgcgcgcatgacctccggcggaatgtgcgcttcttcggccgtaggcagaccgaagcggatgacgcgcaccacggcggcaatgctgccgcgctggcggaacagattcacacggaagcgtcccgtaccgctgagcgagaacgaaaaatcgtcatcggtcgcactgccgtttaagcagtgcggctcacgcgcggcaagacgatagatttccgctgcgaatgcttcggtcttttcgggcgtgaaggcgccatccgccgtttcacgctgctgttcgccgcgcaccttatacgtcagcggcaggcccgccaccacgaaaatatcggaagcgccgcgctccacggcacttttcaaaatttcagtcatattcattgtactccgcctttcttacccgaggttcagggagtcatccggctgccagcgcgctgtgcagtgccattttgcaatctcatagctgccgtttatcttatttaagcagatctcaagctgcatgttgccgcgcgtgatttccgttttgagcgtggtttcggtctcttccgtattttccggcagatctcccgcgccctttaaatacgcatctgcttcggaaagccagtcttgcccggcgttttcgcaggcatacagcacttccacgtgctcgccgtaacgctctgcggcacggcgatcggatacggcagaggacaccgtaagcacgccgaaaatggcgacgcacagcacaacgaccgcgaacagcaccgcgatgctgccgatgcggaatcgatttcggctcatggcgttccctccttcggctggtagcaccgtacattcagcgcataaatttctttatcctgctccgccgtgtacgccgtgattttcccggcatacaacgctcccgtttcggtctcggcggcggtcacttcggtttctatataatagtaagcgtccgcttccgcacagcttgccatatcttttgtgaaatatgctatttcgccgttttcggggatctctcccgcacgaaacgcctctgcggcgctgcggcacagcgcaatgcctgcgctttccctcgccgcttcatcgctgatgacggccgcgcgcaggaacacgcacgcaatgacaccgcagcacgcgacaaatgccagaacaaacacaagcagcggggtcataaagcccatgcggtggcgcgtttcactgcgcttttcctcgtaatctatcatgccgcgccacctccgtcacaatacgcgccggcggtcatgccgtccgcagtgatcgttaaaagcccgctttccgaaagctcggctttaaacgttttaaggccgcacagcttttcggcgttattggggtcgatctccgccgtgacccgtgaaaactccgtgcgcaacgcgttttcatataaatagatgcgcgtttcgaagtcgctttccggctcgcgcaggcacaccgccgggccctccgggccgtcgatcaggcggatgttccctttgccgccgcacgctgccgtttggctttgaatatacgaaagcgcgctgcgctgctttgcgtgtgcgtcgcgggcatccatcgtatcggaatacagccgcgcacccgcaagcgtcaacaccaaaagcgatgcgatgagcaatgcatacagcagaagcagcatcagagaagtgctgtttctctttttcggttccgtcatgcgccctccttattcctcgccgcgcaccagcacctgaacggtcggcagctggttatcggcgaaaacctcgtatgtcacgatgtattctttcttattgaccgtaagcccgtagtgcttttccaaatattcaaggctttccgggtatgcgccctctaaggtgtagcactccacggcgctgcgcaaaacggcttcacgcacggcggcacggcctgtttcgcggatatcctcctgaaaaaccggcacgcacaccgcggtaaaaattaccgcaagcaccagaataagcccgaccgcgaaaagccggaagcttacttttcgattcaaaatgcccatagcttttccctcagattgcgctcaaaatgccgagcaagggcagcatgacgcttaaaagcgtcaaaccgacagacgcggtgagaaatccgatcaaaatcggctccgtgcggtcgatgacgctgcacagcccgttttccgcctcctgcgccgtgcggcgcgcgaggttttccgtcacctgcacgagctcgccgctcttcgcaccgccaagcagcattttgccgtacatggcgggcaatatcttttggtgcgcaaacgccgtcgcaataccgatgcccatctgtgtttcttcacggcatttttcaagcgcttcgtgcagctttttgtggcgcgtctgctcgatgcacagcgcaagcgcactgtcttcatccgtaccgctcgcaagcaaggcggagagcgtgtccatcacctcggagaccgccaaaagccacgcagctttgcgcgtgaagcggctcgtttccattgcatttctgagcttttcccgacctttatcggagcgcataccaaacgccaaagcgagcaaaacgatgcccaaaagccccgcaaacaccaggctgatgcgcccgatgagcgtcgccgcgagcacataggcataggaagatgaaagcaggctgcccgttaaattgtcgtacacgcactcaaacatgggcagcacggcaaaaacgagcaccgccagcacgccgcacatcatcagcatcaaaacggccgggtatgtaagggtgctgcgcaaacggtcgtatagcgcgctttggcggtcatagtggtctgcaaggcggtcaagcgcttcgtccaatcggccggaaagctctgccgtgctaaaaacgctcaaggcgtattccgggaaaacgccggtcttttccgccgctgccgaaaacgtctcgcccgccgcaaccgaaaggctgatctcggtagaagcctgccgcaaggcggtgtccatgccgtcttcctcaaacagggaagaaacctccgaaagcgacgcgccggagcgcagcagcattgcaaggctgctgcaaaatacgctgagctgttcctgagtcaaaaatttttctgccatgttcctcgtcctttcgcttttcctttaataagtgaaccgcgttgtgtattccgaatcgttttgaatctccccggcgggcatgccgcctgcggcaaaggtgatgtccacccgctgccactcatccgcttttgcgcggatctccacggtgatccacccctcgctctccacataaaagctgttccacgcgtggtaggtctcctcacccacataacccgtgatgagcttgcacggaatgccctcgctgcgcagcatggcggcggcaaggcttgcataatcaaagcatatgcccttgccggtctttaaggtctcatccggggagggcaggtagccgttctgcacggtcgccgctttttccgtatcgtattggatattcttcaccatgtagtcatacacggcggcagcaatgtccgcatcggtggtgcagcttgcggccagctctttcacctttttgatgcaatcggagcttttgttgtaattcaccatctggttcgggcgcaggtacggctgaaattcatctttcagcgtcacgtcgcggtcttcgctcccgatgcatgcgtatttgctgtcgcccacctgctccatcaggcggaacgtgtatgtgccatttcccatattgagcgggaaaaacgtcgcagtgccgtcgttcggcaagtcatagttatatttatcctcgccgcagacaatctgcatttttaatcgcgtatcgctctgcgcttttacgccgatgatgccgccttcaagctgagaaaggtcaatctctccactgccgaacgcggtcgcttcatcttcgttgaagacggaatcccgaaaagcggggacctcgtagggcgcggcgttgctgtccgtgacatcgcccgccgccggcttggcgtcgtttgatgccgtgccccgcgccgcacagccgcaaagcagcaaaataagcgccagcgccgccgctaacagctgaattttttctttcatgccgcaccccctgtcttttctgtgtatactaaatattattttatcttgtttttgtcttatacgcaagccctgtgcaaaattcttctgcatggctttttccgtcgattttttcaaaaaaatgcgctccaaactattgacattatatatataatgttgtaggtataaatttcaccgttttctgagaaattcccgcatgtttcgcggtgtttctcaaaaagcagaaagagtaatttaaatgaaggaattcgcatctttcctgctttttgcactgctcgttctctctcttgcggcgtgcgaaagtaacgtcggtgccagaaacaacgattccgaaagcagcgccggcagcacggcttcctccgaagcagagttctctgcgacctcacaacgtggagtgagatcacgaaatccgataccgttacacttgagttttaagctttaacctatatccgaacgcccggcaagctgtttacgcagcttgccgggcgttctttttgtttttccgaaattttggcgcaggagttttccacgaacacattgacaaaccgcgcaaaaaaacgtatgcttatatgtagagttatatctaacttagaaaggagcgcttgcagatgacgtacaccattaaggaagcctcggacatcacgggcatcccggcgaccacgctgcgctattacgataaagaaggcatcctgccgtttttggagcgaaaggaatccggccacagaatgttttccgaacaggatctttccatgctgcgcattatcgaatgtttaaaatgcacgggcatgtccattaaagatattcgccagtacgcggtgtgggcacaaatgggtgactccaccctggagcagcgctacaacctgtttcttgagcgccgcgaggccgttatggcacaaatcaaggaacttgaagatcagcttaaagtaatcgattataagtgcaaatactacgaggaagccattgccgccggtacggaagacattcacaagcacaaaacaggccactgctgcgacgatgaaaaagaaaacaaagacgcgtaagttccgcaaaaaccaagggcacggagttttaaagctccgtgcccttttgttgtataagtcataaccacacctaagaggagtggttatgacttttgctttatttccttattttagccctgcacagaccacgtgatgccctgcggggtatcctttacaacgatatggcgtgcggcaagcgcatcgcgaattgcgtcggcagttgcccagtcctttgcctttctggcttccgtgcgctttgcgatgagcgcttcaatctccgcggcttcctcggcggtcatgccctccggcacagcggatttctgcgcattctgctcctcgcgcagcgcctttgcagctttcagcaagccgagggacaacacttcgtcaaactccttgatgagcgcaagcttgtccgcgtcggaaagctgagctttcagtacgtcgtacagcgctgtgagtgccaaggacgtgttgaggtcgttttccagcgccgcgcggaacgaggcacgcagcggctccatggcagctttgtcgtgctctccctcatttttcagcgctgcaatgcgggaaacgagctttttgtacgccgtggcggtgttgtcaaggctctcaaacgagaacgtcagcggctttctgtaatgggactgtaagcagaacatgcggtatacaagcggcgcgtagcccttttcctcaagcagcgagaccgtgagaaaatcgccctttgatttgctcatcttgccgcgcgcgtccaaaaggtgcagcacgtggaaccagtatttgcaccacgggtggccgagatacgcttcgctctgtgcaatctcgtttgtgtggtgcggaaacgcgttatcgatgccgccgcagtgaatgtcgaggtattcgccgaggtacttgatgctgatgccgctgcactcgatgtgccagcccgggtagcccacgccccacggggaatcccacttgagctcctggtcgtcaaacttcgactttgtaaaccacagtacgaagtcgctcttggagcgcttgttttcgtcctcttccacgctgtcgcgcacgcctacggcgaggctctcttcctccatgttgccgaaaacataatagttttcgagcttggaggtatcaaaatagacgttgccgcccgcgatatacgcatagcccttttcaaggagcacctctaccatgtggatgaatgtatcgatgcagctcgtcgccggaacgacgatctccgggcgcttgatgccaagcttttcgcagtcactgaaaaaagcgtcggtatagaactgcgcaatctgcatgacggtcttgtgctcgcggcgcgcgcccttgagcatcttgtcttcgccggtgtcggcatcgctggaaaggtgcccgacgtccgtgatgttcatggcgcgggtcacgtcatagccgaggtagcgcaaggctttttccagcatatcctccatgatgtacgagcgcaggttgccgatgtgcgcatagtggtacacggttgggccgcaggtgtacattttgactttgccggcttcgtgcggaataaattcttcttttttctgtgttcttgtgttatagagctgcatacaggtgcttcctttctgcttattcttccttattcttctccgctttctgtgcggtcagcttgcttttttctctgcggcagctgttcagctcgccgtgcaggcgctcaatttcaagccgcatgcggcacatttcctgcgccaccgggtcggccacgtggatctgatccagcgtgctgttgtccatcacacgcttgccgcccacgcgcacgatgcgcgccggtacaccgaccgctgttgcgttatcgggcacggcatccagcaccacggcacccgccgccacacgggcgttatcacccacgcggaacggccccagcacctttgcgcccgcaccgacgagcacgtcatttccaagcgtcgggtgacgcttgccctggtctttgcctgtgccgccgagcgtcacatcctggtacagcgtgcagttgtcaccgataacggtggtttcgccgatgacgacacccataccgtggtcgatgaacaaatttttgccgatcgtcgcgcccgggtgaatctctatacccgttttgcggcgcgcgcgctgcgagatatagcgcgcgataaatttcatattatggcggaaaaaccagtttgccttgcggtaagaccgcaccgctttgaagccggaatacagaaaataaacctccgcacggctgcgggcggcagggtcgcgcgccatcacggcgtccagctccgcctttaacttagaaaacatgacgtaaatctctccttaaaaacaaaaagccccgagcgcacaacataggcgctcgggggcgaaatgtaccaaaacattcatgatacaataaatccgcggttccactccggtttatcactcaaacggcgtaacgtgccgtacccgtatgcggctcactttcgctcaccgcatccgctcgcgaatgcacttcgcccggctcttttctgcggcggctttcagcccatgacctccgctctctatcgactgcccccggggtactcgttcggtctcagcgtttgctttatgacagtattttaacacagcccctttaaaaacgcaagcccaaagatcacctctccgcgccattttatgcggcttttttcttttggtgatttataattcacctattttaacaaactaaatataaaattattgattttatgcctagatatagtcttgacatatattgtaaactatgttaatatattttcgacataaattctaaaaaaggtgagtccaatgtccaatgtataaacctgtgtatatttatcaataatcaaattcaaattgtttattgggaatatcaaaacagactccttctggaagcattttgctttcacgttataaaaacctctaaagcaatttcttcatgcttccttttgaaattacttgaaaacgagggcgaatttaatatgtttcataaaaaaatcagttattttctcgttcttactttttgctttcttttgtttttgccgagttgttcaaataatgtcgatacacctgaacaaagcattcaacgtgttttaactacaattttcacctgtccagacaatgaggaaaaagaatacggtaaaatactaaataaaaacaaatattctttagaacaagaaaacagccaaacggaaattgcagaggcagaaaaacgtatgcaagaacatctatgccaaaaatacagcaaagatgattttacagaagcctattataattcattatttaagcatctatatacaagtctcgcctttccgactatgtgcattctaaatgaagctgaaatatcgcccatctccgttactgtggaaaaagatgctacaaccaatatttacctttataccgccaaactaaatgtgacaaaaggagactccaatcctatagaaatcacacagaccggaagagttcaaactgatggtgacggacacattgcttttatcgatttagatgattccactctttttaacgccctttcttaaaaatcaataaacacacaaaaacagggtacgcacttttttacagtgcataccctgtttattttagctgtgatttagaaattagagctgctcgtcgatgatctttgccttttcaagcgcacgcttctggagcagtgcatcgatcttggcgtgcgggtcgagcagggagctgatggaagcgtcgtggttcaaagcggagatgaagtaagcgatatacttcgaaacgtcgacttcatggaaccacgggcggttcttcagttccgggttaaggtacgtcaggttgctgccgaagatgccgtcgatgagaccctcttcatacgctttatcgaactttgcgaggccgttcgtgaagatggcatacgtgccgtaagcgaagaagcggcgtgccttgcgggccttgacgttctctgcgatgtcgagcacggactcgccggaggagatgatgtcatcggcaacgaacacgtccttgccctcaaccggggtaccgagatactcatgtgcaacaatcgggttgcggccgtctacaatgcgggaataatcgcggcgcttgtagaacatgcccatgtccacaccgagcacggaagcatagtacatgttgcggttcaacgcaccttcgtccgggctgacgatcatgaagtctttcttatcggtggaaagatccgggaagtccttgaagagcttctttaaaacctgataagtcggcatcaggttatcgaagcccataaccggcacagcgttctgcacgcgcgggtcatgtgcgtcgaaagtcaaaacgttggaaacgcccatctgctgaagctcctgcagcatgtacgcgcagtccaaagactcgcggtagctgcggcggtgctgacggccgccgtaaagcagcggcatcacgacgttaacgcggtgtgccttaccacttgccgcctgaatgagacgcttcaaatcctgataatggtcatccggggacatgtggttctggttgccgaagtagttgtaggtcaggctgtaattgcctacgtctacaacaaagaacaggtcatagccgcgcacggtcgacttgataagacccttgctgtcgccggaagagaaacgcgggcagctgttttcgatgatgaacgtgtccacatccataccggcacgctttgcccaacgcaccagatgggcctcaaccttttcggaaagctcacgcgcaccggcaagcggtacgatgccaagcggtgctacgcgattctctgcactgaaaaacgtctgtgattccattgccatttgattactccttcaaactgcatattccgttatttgcctgtccgttttacacgaacaatgtcggctcttgtctatttcaatatagcacaaaatagcgagaatttccacagcaaatacgcaaaatattaaacttttgttaaatccgataagagggcaatgccaaacggagcgagtttgattgaatttaccgtttgatctgtaccgtacaacttgtagtcgcgcggcaattccacggtttttccgctttccgtgtagttttctacaaaaatgatattctccttttcgccgtggcggatgtgtgccgttacgccgtgcggcagggcgcaatcgagcgctttttcaatgtgcagcgtctcaatcatttcgccgtacagtacagaaagcatatcgctgccggtacgggccgcaatgtaatacgcctcgcccttgccgaacttgtttttcgtcagcgccgcttcgcctgcgtagaaatccttttcatatgtgccgagcacctccgccgtcagcgggtggatacgtgcacaaagctccatagcatcgtaacggctgccgttaaacacaatgccgtttttcatgccgtccggcaggctgtcgatttcttcgttccacacgccgaacacgtccatcatgtcgccggggaggccgcccattttgcacaggtcggtatcgtccacaatgccgctccagtacgttgtgacgagcgtgccgccgttttcgacgaacttgcgcatcttcttttcaaagcctgcgcggtacatatagagcatcggcgcaatgacaagcttatatttcgagatgtcgccgtccatatcgacgatgtccacctgcacgcccttatcccagaacggacggtagtgcgtcaagagcgtctccacgtatttttcgtctttatccttgttgcgcgggcccgcggcagcatccagcgcccagcggttttccacgtcgtacacgatggcgacctgcggcttcacttcggtgttatacacgtcgttacgctcattcatgatcttcagctcagcgccgacggactgcacatccttaaacacacgggtgttctcgttcgtgacggagtcgaatacgccgccatggctgacatggtcgacaaccgcgccgtggaacttttcgcaggagccgcggctctttctgaactggaaatactgcacggaatttgagccgtgtgcaaccgcctgcatagaggaaagcaggtgcatgcccgggcgcttcagcatgctgatgggcgtccagttcgtcatgctcggcgtgctttccatcaaaaggaagttttcgtgcttgatcgaacgcatcacgtcgtgcgtcatcgcggaagagaccgcaatctccacgttgtcggtcgtatgccactgcgggtaattgtcccaggaaacaacatcgagctccgggccgaacttgaagtaatcgaggccgtcgtagaagcccatcaggttcgccgtcaccgggatatccgggtttacttccttcacggcgtcgcgctccattttcatgaaatcgacggtctggtacgtgacaaagcgcttccaatcgagcgtcagaccgtgcacgttcatttcgccgttcggctgcggcgcgtgaatctggtcccagctcgtatacgtgtggctccagaagtccgtccaccacgcgtggttcaggtcgtcgagcgtcttatacttctttttcagccaatcgcggaacgcctgttggcacagcgggcagtagcactcgccgccgtactcgttagaaaggtgccacaaaatgacgcccgggtggtttgcaaagcgctttgcaaggcgcttatccatctcgcgggtcttctctctgtacacgggggatgtatagcagtggttatggcgcgcgccggaaaggtcgcgcacaccgttattctgcacacggcgaatctcctcatacttttcgctcatccaaagcggctttgcaccggacggtgtggccaacacggtataaatgccgtttttgtagagattgtcgatgatcttctccagccagtcgaagtcgtattctccctcattcggctccagatgtgcccaagagaaaataccgaccgacacgcagttgatatccgctttcttcatcagctccacgtcctgcttgagaatctcggggtagcgcagccactgttcgggattataatcgccgccatgcagcagcttcggaaatttcggtgtaaggggtctcataataaaatacctccgtcagcgcgacttcccgcgcgtaatctacacccagtatacaggttgtacagacaaacttcaagagtgagtttcacattcttcattctttagtctttgccgtgttcttatgcgcatgtaataaagaaaagcgcacagattttgttttctgcacgctttttagcttcatatttttctgaaaggcttcttttattcgcccgctttactttggcttgtgtcaagttctctcgtcagcttatgcattctcaaaaaatacgtcgtgacaagcagaatagccgcaccggcccaagcagtgatctccgcatagaaaataccctcctgcccgataataagcggcagaaacaacgccacgccaatacgcatcaaaaattccatgatgcccgaagccatcggcatgatggtatcgccaagccccatcagcgcggagcggtaaatgtgcagcatatagaggatagacagacaaatactcatgatattaagatagtgtattgccacctgcgacgagatcgacacttcctccgccgtgccggaaataaacagtgcgatgccgtattttccgaaaatcagcacaaaaaccgtaatgacgaccgaggtcagcaaagcgatccatgttgcggagtgcataccctttttcacgcggtctaaaagccccgcgccgagattctgcccgacatacgtcgtcacagcgtagccgaacgaaacggcggcaatctccaaaataccgtacagcttattcgttgccgtaaagcccgccacgaacagcgtgccgtagcggttgacgaccgactgcaccaccatgccgcccacggcgatgataacattctgtgcagcaaccggcgtaccgagccccaaaaggcgctttgctatttccggattgagccggaaatactcttttttcaggtggatgaccttcacgtgcagcacagcgcgcaaacagtaaagcgctgcaaaaagctgtgcgatgaccgttgcgacgaccgcacccgcaatgccccagtggaacaccataacaaacagcagatcaagcccgatattcagaatagatgcaatgaccatggcatacagcggcgttttgctgtcgccgagcgcacgcaggatgcttgcaagcacgttatacgccatgatgatgggtatacccgcaaacatgatgcgcaggtatgtgaacgcgccgccgatgatctcctccggcgtgttcatggcgcgcagcacgggtgccatggcgacttggctcagaatgacggtcaagattgaaatgaccgccgaaagcgagatcgtcgcgccaatggaacggttaagaccctcgtggtcttccgcgccgaaacgctgcgccatgtaaatggaaaagccctgcgcaaagccttgaataagccccagcacgagccagttcagccagtccgccgcaccgagcgccgccagcgcgtttacgccgagcgcctgccccacaatggcggtatccaccaccgtgtagaactgctgaaacacgttgcccaacatcagcggtatcgcgaaagtgaaaatcagctttgcagggctgccttttgtcatattttgaatgcgttctgtttttgccataaacccctcatgatttcgccgaaagtttttccggcaatttatgaatacgaatgtaatacgtcacgcacagcagtgccgccgcgccgaaccacgcggagacctctgcaatgcagatggaaagaaagcccagattgaacactttagagagcacgagcacaacggaaatgcgcagaattagctccagcgcgccggagagcatcggcaccaccgtgtcgccgagactttgcagggaaaagcggtagacgaacagcaaacccagcacccacatcatcgcaccgcaacacagcaaatacggatacgaagcttcgatgaccgcctgctccacgccggagacgaacaccgccgtcagctggcggccgaacagaatcattgtgccgccgatgaagaaatcgacgatgagcaccatcaaaatgctgcggcgcacgccgactttaatgcggtcaacgcgtcccgcgccgaggttctgcccgacatacgtgccaagggataacccgatgatgttgcacggctgttccgcaagaccgaagattttcgagcccgccgtatatgccgccacaatcgtagaacctaaaccattcacaatgccctgcaagatcataccgccgatcgccgtaatggaattcataattccgaccggcaaaccaagcttcaataagccaaaaacaatagacttatccatgcgcttttcgccggctttaaaccgcaaaaccggcatacggcgcaacacgaaaagacacatcaggccggaaagcagctgtgccaaaacggtcgcccacgcagcgccggccacgccccatttaaaggccatgacaaacagaatgtccagcccgatgttcactgccgagctgatgagaatgataatgagcggcgacatgctgtcgccgagcgctcgaagaatacttgaaagcgtattgtaaaacaccgtcgtgaaaataccgatgaaaataatgcggatgtacaaaagcgcgtcgtcaaaaatatcggtcggcgtacccatcagtgtcatgagcgggcgcgagaaaatgagacttaacgccgtgatgaccgccgcgctcataaaaccgaggtagcccgcgttcatcaccgtgcagcgcatgtcgctttcgtcgcctgcgccgaagcgttgcgaaatcaaaatggaatacccgtgcgtcaaaccgttgatgaaaccaaaaataaagaaatgtaccgaacccgtggaacccgccgccgcaagcgcgttgacgcctacaccgcggccgagcaccatagcatccgccacagagtataactgctgaaacacattggcaacgagcaaaggcagtgcaaatgccaacaaaagctttaccgggctgcccttcgtcatattgcgaaccacaaaattgctcccttcaaaagacactttaattaccattatatcggataaaatgctgcaattcaatgcctgtatgtcattttcaaggggtgtaaacgccgaattttcctattcttttttggctaatttggcgcggtttcggcttcagcaacaagccgtgtaaaaaagcagcgccatgcaaaagccgcacagcgccgcgtgaattttgttcaatcaaacgatgtaatcaaccgcaaccgccttttcgcgaactgtcgcaacataggtcttcaccgtgttgcagtggtacgggtctttctggtattcttcgagcgcttcgggactctcgagcgtaacggtcaggcagacgtcaaaggaacgctcggagtggaggaaatccgcaccggcttccacgtcaagtgcctgcggcacgcggcccttcatcgtcataaaaagatcgcgcagcttttcgcactgctccttggaattgtccttgagcttgatcattaaaacatgctttaccatttgaaaaacttcctttcggataaaattattgcataactaaagaaaaccatggttaaaagttttgctcaagctttttcaaaagcttgcaggttcttagggcagcgccctacgtcgctttccgcagaaagcgaaatctttttgcgttcgcaaagtcaggcagggaggacgaagcttccggtggacgtttcgtccgagggaaaccctactaaggggttttcctatgaacttgtaacacaagttcataaaaatcgaacccagtcttccccgaaaggcggccaaagccgcctttaaaaaattgacttattctatctaacccccgaaaccgccctgtcgagcgcgcccaagtccttgtgaatccgcacatcgcgcaggccggcggcttcaaacagcgcctttaccgcctgcccctgcgtctcaccgatttccacggcaagcacgccgttcggatgcaattttttcgcccaaatatcgcagatcgcgcggtagaagacgaggccgtccgcgccgccgtccagcgctgttttcggctctttctgcacttcgcgttgcaaaagcggcagctcgcttgtctcaatatacggcgggttcgacgcgatgaaatcgaacccatccggcagcgtctccgcaaaagctttatctaatatgtcgccctttaccgccgtcaccggcagctccgggtaacgcgccaaattctcgtttaaatagttgaatgcgctgtcgtacagctccacttccgtcacttcggcgtgtgcttctttcgcgatggaaagccccaccgcgcccgtgccggcgcaaaggtcaagccccttcggcaaattctcggttttcgacagacgcttgcacactgcttccaccaaaacagcggtgtcctcgcgcggaatcagcacgccctctccgcaggaaagcgtcaggctcataaagtcccactcgccaagcagatattgcagcggctcgcccgttttgcgcttttcgagcgcggaaagcaccgcttgctccgcttcagactccgccggcttatcgccgtgcagcaataactctgtgcggttcgcgccgcagaaatgctccaaaaggcacgcggcttcaaacgtcgggtcttccgtgacgggttcaagcgccgtcttcgctgcgcggtacagctcgttgagcgtcatcggataatatcctcgccgttttccgggataaccgctttcatcgccgcaatagcggcttccatcatcttgtcggtcggctcttttacggtcaaacgctgaaaccacaggcccggcgccgcaatgatgcgcgtcagcacgttatcgtacttgccgcaaagcttgatgagctcataaccgatgctgacaacgatcggcaggcacaagagcttacagaatgtgcgcaggaacggattggaaaacggaatgaaaaagccgatgatgatgccgagcaaaagcattaagatcataaagctggagccgcagcgcgggtggaagcgcttttgcttccgcacattttccacggtgagcggcaggtcgttttcatagcagaaaatcgtcttgtgctccgcgccgtggtagcggaatgtgcggtcaatctccggcattttagagatgacaacaatgtacagtacaaaaatgacgatacgtaaaaggccctcaaacaccgaacgccaaccactgatgccgtcgcccgtgagcatcatcagcccgttaaaaagcaccgccggcaaaaagaagaacagcagcaccgcaagcgccacgcccagcacaccgcccacggcgacgaccgcattcatcaccttgtctccgaatttcttttcgagccacttttcaaatttcgagggctcttcctcttcctcgccgcccactttatccgccgaaagcgtcagcgccttcataccgaggcgcagggtatccaccatagagaacacgccgcgtataaacggctttttcaaaatggggtatttttcgcgcagcgacggcgtggaaacctcctccgttgtaatatttccggcttcgtcacaaaaagccgctacgtttttcttcgggccaaccatcaaaatgccctcaagcaaggcctgcccgccgatagatgttacgcgttttgccattctttctccttttgcttataaacaatatttaatcctgttttctctccacgacctgcacctgcgcggtggcggtgggaatctgcgttgtattggaaagctcaggattcatctcaagctttttcatggtcggtatcgtgatgatgaccgtggtgcccatgccttcttcgctgtcaatatcaagcgagccggagtgcagctccatgatctcatttgcgacggcgaggccaatgccgttgccgcgcacgttttggtttgctttgtagaacttctttttgacgtttggcagatgctccgccgggatgccgcagccactgtccttaatgatgacgcggataaacccgtcgtcctcatacgcggaaacgcgtaccgtaccaccgggattcgtgtatttcaaagcgttgtcgatgacgttgatgaacacctgccgcaggcgattcacatcgcccaaaatcggcgaaagcatcgtgtcttcctcatcgtaaatgaggtttttatgctccgttcgcgcacggtcggtgaacatatacacggcctcatcgagctccgccaaaagatcgatcttcttgaggatcagccgcattctgccgctttgcatgcgggaaaaatccagaagctcctccaccatgccggaaagacgttctgcctcgcgcacgatgacgttcatgcccttatcatacgtttcgcggccgatgccgcctgtttgcagcgtttccgcccaacccttgatagccgtcagcggtgtgcgcagctcgtgcgaaacagaggaaatgaagtcgtttttcattttttccgctgtgccaagctctgccgccatgtcgttgatggagtcgcacagtgcgccgagctcgtcgttcttctctttcttgacgcgcacgtcaaaatcgccctttgcgattttttccgccgtagcattgagttcccgaatgggcgtgataatagaccgcacaaaatagatgcccgaaagcgtgacgagcaccaaaatgagcacgccgataccaatcaggaccagcacaacatacgtaatctgccggtctgcgcgctccatagagacgatgtaccgcaccgcgccgagcaccgcgccgtttgcgccgcgtgccacgcgcgagacggccatgaccttctcgccgcttgcgagcttgccgatccaatagccgtacccgttttcgctgtgcaaggcactttcaaaatcgggcttgctctggttttggtccggcgcaaagccggaggaggtagacaaaatgctgcccgaacgcgagaccgccatgacctccatgaggtctttatccgggaaattttcggtgtagcttctggctgcagcgttaaactcgcttacggttttcatgctgctggaaagcacggtgggcaactcgtcgctgcggccgatgagcgtcatttgtatgccgttataggcatagctctgcacaacgaaagaaagcgccgcaatacaggctgtaaataataaaatcatcacaccgaggctgttaaacagccagcgtcttgcgataccttttttgaacacgcgctttcctcctttctgtgcttcttttcgtagttaccactatttttaaatgacttgccctgcaagtcatcagaaaacccatgcaactgggttttctgcggttcaacagtccaccggactgttgaacctactttcctagttttttattaggcaaaaagatttcgtcgtctgcggacgacgcctcagggccttgccccgagatcccataaactttctgaagaaagtttaatcaaagacttcattcgtttgctttcacgcaaccttttgattacttatcccaccgatagccgatgccccacacggtgacaacatgtctcgggttcgagggctcgtcttcgatcttcattctcaatctgcgaatattcacgtctacgattttttcctcaccgacatatccgctgccccagacgtgctttagaatttcggagcgttttaacgccttaccggcatttgagatgaagtattccataatctgaaactccacctgtgtcagctccacggggttgccgtcttttgtgaatgagcggttgcgcaggttcagcacgaagcggccggagcgcagctcttcggagaaattcggctctgcggctctcgtaaactgtgccacacggcggtaaacggcgtccacgcgcgccacgagttctgaggggctgaacggcttcgtcacataatcgtccgcgcccatcatcaggcccgtcaccttgtccatttcctgcgttttcgccgtcagcatgatgatgccgatggtcgcgtttttctgtcttaattccttacatacggcaaggccgtccagactgccgggcatcatgatgtccagcacggccacgtcaaaatcgccgccggcctgctcgtacacgcgcaaggcctcctcaccgcttgcggcttccacgcagtcgtaccccgcgcgctttaaattgatgaccacaaactcgcggatattctgctcgtcctctgccaccaatatctttttcatgttcgtttcccctttctgtcccccattttcagtccatatttattccaacacttcaaatccgctttgcagcgttttttcgtcgctttccgccatggaatcgtccaaaatgcgcagcacatacacgcgcccggcggagctgctcaacagaatatcttcgtcatcctgttctttttccgcccagtcttcctccgtatatacccgaatggagaacttatcctcccggccgaggtaattgccgttaaagccgatctgtgtatacgtaaagaatgtcgctgtgcgggtcacggtgtcattttggcagccgtagttatcctcgctgctcggcaaaaacaggttgtagttttccgccgtattcaaaatactcgtgcacaccggcgtcaacgtgttgtcctgtaagctatacgtgttccacgtgatgacatacccggtggaatccgccgtcgtttcgctgccgtttatcgtcaactccgccgttggaatctccaaaatgccgtctttattcacatcgcgcgagaccgccgcggccgccgttggccgatccgtcgcgttttcttcgttcgacagcggcgaaatgagtctgtccgacgcttcgtcatacccaatgacctgcgtcagcatgcgcccgtccgctttcacgccgtccagcaccgctgcgcgccgccaggaatttacctgcgaaaagctcacggaagtgtaacgcgtcaccgccgcatcgagcggcacggttttggagacatacggctggtctccgtcaaagcggtataacccgccaagcgccataatctcctctccgctcgtctgcgctgcctgcaaaacgaacagctcttttatattgtcgctgtcaaaatccgtcagcagcatttcgctgtaagaaaccgttgtcatggagaattcgcggatcgtgtctccgtccacataataaaccgaaacgcttgccgtcgccgtgagcggatcgccccagcccacgatgatctcgtccataccgtcgcccgtcaggtcaccgaagaacaccttgtccacctgcgttgccgccgaggtaaaccgcgccatagagttccaaacaccgtccgtgtttttcttaaaaaattccagccgcgtaccgcccgcgtcgccgtttgcacagaagctcacgacctccgaagtgccgcacccgtctaaatcgcgcgagataatcgccgagcggtaatcgccgtatttcgggtaaacaagcgtcacgtcacccacgccgccgcccatcagggcatatatcgcttctctgtctgccgtcgtctttggcggagacatcagcgcttgcgcatcaagacccgtcagctcgctgcaccccgaaaaagaaagcgccaaaagcacggcgagcaccgctgcaaaaagttttttcagttttccgcgcatcgccgtcgcctcctgcgcaaatttacaatatcagtataagtatagcatatcccccgcaccgccgcaagcagtcaggggcgctttggcgtcatataaaaattaaatttctgtgacagcattgagaaaccggcgcgcgcgtggtaaaatggagaaaatatctcgaaaggattccgcatgaaacaaacaatgcacaatacccgcgtgcgatgggtgctcggcattctcattgcgctcacgcttgcgttcatctggggcaactccatgcagagccgcgcggtctccggcggcatgagcggctccttaaaaacgtggctcgagcaacttctgcacacggaaatcagtgaatttttactgcgcaaggcggcgcatttttcggaatacggccttctgggcgtggaattttcgcttctgctcggcctgcagcacgataaaaacggcaaaaatctccagtacgggcgcaatcttctcgactttccgctcatcggcatgctgtgcgccgtcacggacgagaccattcaaattttctccggccgcggttcgcttgtttccgatgtgtggatcgacaccgccggcttttcgaccggattctttttgaccgttctgctctttctttttatcaatcactgtaaaaaagccgggtaaccggcaaccggaaaggataaataccatgaaacagcatattttaaagaaggttcccctcttcgtcaccgtgtccgttctgctcacgtgcatcgtgttttccggctgcgcgggccgcaccgtcatcacagatgagcaattcaagtccgcctgcgaagctgccgactgcgaagtaacggacgtttccgaccagtttgacagcagcgtcatcacaaaagcgctgactgtttcgggcgatgattactccttaggctttttcacattcgcttccacggacagcgccaaaacgaactacgcgcagatgctttcaagcgtcaggacctccgagggcaaggcggtcgattccagcgaatacaaccgctacacgtataaaggcgacgacctcacaacggtgctctaccgcaacggcaccacgattcttttcgccaccggcgcggataaggacactgtaaataaaatcataacagcattgggactttaacttttaaaggctcgtcggcaaaaccgacgagcctttaaaaatacatggccatgcgggcagcggcgttcgggatgaatgtttccgcccgctctgctatataagccgccgtcagcgcacccgcgccgacgtactccccatactccgtaaacaggctgcgcgccgcgatgcgctctgaaaaccgcaccgtcacgcacaggaaaaaccggctgccgatccgccccagcgccgaagaaagaacatggagcgtgtgcacggcacgctccaccgcatccatcaaatgccctacggtctcaaagcaaaacgtcagcggcacgggcggcgaaacgatacgaatgccaccaccccctttccattcccaaggcacacccgcaggtgtatcttaaaccagtttacgccaaaggcaggtacaccgtgccgatttttctttgaaaccttgacattttctttttacgttctgatcattaccaaagttagttattatctgacatcggtgaaacgctgaaccggccgcccccatcgcgaccacggtcggcatcgtcttaaatgtcatttatttcctgtacctcaacaaaaaagacgtacaggaacagaacaaaaaaagcacctccgaatcccgcatttgatttacccgcctatatcttctggatcccgccgatctttcggcgggattttttgtaaaaatgcagatttcctccttgacaagcattactatgcgttgtatagtattgcgcaaagagagatatctcggaaaggggatgcaaaatggatattcagctcaagcgcgggctgctcgatgtgtgcgtgctcgcggcgatcaagcaggaagactcctacggctacaagatcatcaaggacatgaagccgtatgtggagctttccgaatcgaccttataccccattctgcgaagattggaggccgcacagctgctctcggtgcattctgccgagcacaacggccgcctgcgcaagtattaccacatcacggagcaggggcaaaagcggcttgaagatttcaaagccgagtggaacgagatcgtttccatctacgaatttgtgacaagggaggacaaaaacaatgcgtaaagaagaatttttgacggcactgcgtgcagggctcaccgggctttcgccggagggcgtagaaaagcttgtggagttttgcagcgagatgatcgatgaccgcatggaagacggcctcacggaagaagaagccgttgccgccgcaggctccttagatgagctcatccaacaggccaaaacagagcttttgcccgtaaagaccgcgaatttcacggaaaaatccacctttggcgacaccctgcgcacctatacggcagagagcagcatttgcggtataatcgctaactgtgactacactgcagattttaagcttttaccttccgaaaatggcacatgccgcgtagaatgtatggaaagcgaaaaaatatgctactctgtgacgaccgaaaataatgtgttacacattgaatgtgcggacagacgaaccttgttttccagatataaattttcaaaagctcagcgtcatgcaactgtacgcgtttatttgccgcagggtacatataaatcacttgaagttgaaacaacaagtggtgacattgctattccggctggttatgcatttgacacagcctctttgcaaagtacaagtggtgacatcgcttgctgtgccgagtgcagtttgctctccatagaaacaacaagcggcgatattgccctaaaaaacgcaaaatgcagcacgattgaactgtgtagcacgagcggcgacataacgcttgaaaatgtccaatcttctaaaaaaactcacgctgaaactacaagtggtaaagtacagtttataaaccttgaagccacagaattagaaattcacactgcaagcggtaaggtaagctcagaaaatataaaatgcacaaccttgcagatcggtacggcgagcggtgaagtacaccttacacatgtcaagtcctcaaataccatagaagtcgacactgcaagcggtaaagttagtctcgaaaacacaagctctgccgttttacatgttgacactattagcggcgaaattgatcttacacgtgccgtttcttcaaatagcatggagataggaactataagcagtaacattcatttggaaagctgtgattccgaatcacttttatttgaaagcagaagcggcagtatcataggcacactgaataccggtaagaatttctatattacaagtaggaacaataaagtggacgttccattcgacagtggcgagggaacctgtgaaatcgagacccgcagcggcagtatccgcattaaaatcgcagaataacgtaaaaactctctcggctgcgccgagagagtttttcaatttcgaaccttattttactttatttctgaacttcggtaccaacacggtggcgagcacccagaacaactcgtagatgacgagcgcaaatgcggaaatctgctccacgcccgcaacgaacgtgaggaacgccacaagcacaaagccgatgacgaccgccgcgttctgcatggcgacgatgaagctgatgttcttcttttcatcaatgcacgtggaaacaaggctcatcatggattccacacgaccctttgtggcggcataggcgtccacgcggtccgcagtgtcgttcacaaggtggtctgccgggccgtcttggcctgcgccgatgacattcaccgccgtggcgtcaatgccgaacaggcgcgaaatgaactgcggcgtaaggttcgggtctgccgaacgcagaatgagcgaaacgccgttcatttccatgttctgcagctccgctttcttcttacggtctgcgttataggtcaggatgaacatggcgtaaagctcgccgcccattgcaatgtacaagatctgtcggctgcccgtcgtgtactgactctccacattttgctccggtgcttccacaccgtgcgcagtcaaaagcgtacgggagccgatgagcacctctttgccgtccaccgtgcccacaacgccgtttccggcctcaaatgcggccttttcgacctccggaagctcgccctcatgctcgctgaacacctgctcgaacacgccgcaaagcgggccgccgagctgctgcaccaacgtgccggcagccaaaacggcttcttcaaggccctcctgcttaaacggcttcaccccgttcaaaacgaccgtgccgcgcgggaaaagctctgtagaatcaaccagaacggcatttacggcgctcatgcgcttgataccttcatagccggagaccatcgcgccgcggcggcgcagacggtgggaaagacggctcaccggcaggtttacggccagcatgttcatcaccgctacacacacgcaacaggaagccgccaaagccgtaatggcaagggacgcatctttcgtgatgacaagcgccaccacgcacagaagcagcgaagaaatgaggcccaccggcgccaaaacctgcgaagaggtctctgccgggtccggctcataggaaatttgtaagaagcgctttaagaagcccgctttctgctgatacgcgattgcaggctgcgaaatgacggaggaacccgccatttttaaagacgtgttgtaatcgtcaaatacgcgcaccgcatatttctgctcgcgggaagacacaaagcggaaattcgagtggatgcggcgcagcatcgtcagcttgccgacggtattcaggaacagaatacccgccgcaataccggcgtaaaggtggattttacccatgctgagcgcagccggcgcaaacagcgtgcagagcgtctgcacaaaaaccgccacacaagctaccgcagcggcagaatccgaattcgcgcggaactcaaacagtgccttcagaccgtttaaaatcgttttcgcgcagaagccgatggccactagcagcagcacaagcgataagatggtg

SEQ ID NO: 3667 - DNA, 14482 bp, Unknown
  16S sequences of unknown bacteria
tttttgagttgtcttttccattctgtcgttgttacttatctattgtaccataacaatcctaaaacataatttcgcgaggggattcacaaagtaaatggggggcagtcagtccgagaatttaccgcgtgtcccgattgacacatttatgcgaattgtgttataatctagaaaaatgctcgtatcatgaggtggaatatggcagtaatacatacaacaaagcaacacgaaagcggaattgctctcggcggcatcggaagcggctctgtggagcttttccccgacggagaatttcacagatggcagatagcgaacgagccgagatgggcggaaagaagcgacggacgccacgttgacgatggagaaggcagtacaggcgcgctttcgttctgggttcgctcggaggacggagaaaaggttatagtccgcaagctcgggatgaaaaccgacgccgacgacttcacataccgtatgttcacatggaataagcctgtcgagggaatcacatttgacggaaagttcccggtgtgcgacgtgacctatgaggacagtgcgcttcccgtgaacgtaaaaatgcgcgcggtatctccgttcgttccgcaccacactgacgacagcgcgactccgggattctatctcgacttcaccatagaaaacccgaccgaccgcaccataaccgcaagcctgctctcctctcttgagccgaacttctgcaacaacggcggatgcgtcaacgagagatacaccgacggagatgtgtgcggaattttcattgacacgccgaaggtttatccgtgggaggagagattcaacgagagaaaccgcggctcgctttgctattccgtagagggcggggagatatcgtatatcacagcagacaacttccgcttcctcagagaatatgtggcttcatccgacctcggagtatcgcaggagtcgttcatcttcggattcagggagacgggagagctgccgaacaccgatgcaggagtacgaccgcgcagcataccgaacgacgtttccgagctgaaggacgaagcagttgataaatatgtcagcgaaatgttacgctacccctttgcgctctcactgcttaaaagagttcgccatctgaagccggaatatcccgggacacgcgccgaaaaagaggaatttcttaatgcctgccgctcgtctttccggagaatggggaacgatttcggctcatgcgcgctttgcggaaaggttgtgcttgctcctaaagagacaaaaaaggtgcgcttcattctcacatggttcttcccgaatcacttcggcgagtaccacaacaggctcggacactactacgaaaatctctttgaaaacgcaaaggacgcgaacctacatctctcgagacgccgctccgatatcgaagaaaaggcggaaaagttcgcggacatcctttttagcacaagcctgccgcagatttatcccgacgcttggtcagctcatctttctactatagtaaaatgttcttggtacataaaggacggcaagttcggactgtgggagggactgggcagctgcggattccacacgaccgacatcacatatcacgcttcgttcggacttctcgcgctgttcccagagcttcagaaaaagcagatgaagatggggctgaaattccagcgtgaggacggaagggtacaccacttcttcacgcccgaccttgaccatgttgacaacggctacagcagagttgacatgaacaaccagtttgtgctcatggtttgccgcgactacctaagcacgggagacagagactaccttgagacaatgtggaatcccgttcagcgcgccatggactccatgcagagacttgacacggacggagacggactgccggacagcgagactacgcgaaacacgtacgacgcatggaatttctcgggaactccggcgtacatatgcgtgctgtggctctccgctctcaaagccggtgtgaagctcgccgaactgatgggggatgagagcagacgagacagctggcagaagctccttgaaaaaggtatggattcactcgaaaaacgtctgtggaacggaaaatactacaacctttggagacgcgacgacgaaaacggaaccttcaccgacggctctctcatgaccgaccagatagacggcgagtggttcctcagaatgtcgggacttgacggaaacctcgacgacgacagggtaagaacggtgctttccactatattcgcgggaaactatacgcccgagacaggacttgtaaacgcgacctgccctccgagccgcacagtcagccttgacacatacgaaaactgtcaggcggaagcgggatggacgggaatcggatacattatcgccgctcttgcaatgaatgttggaatgcgtgaggaagccgacactatagtaagaaccattcacgaaaatcagatgcgcttcggtcagttctgggagcactgggaatgcggttacagatacacgcgcccgctctcttcatggacaacgctcatttccgccgagggactgtcagttgacgcagaccgaagaaaactcacactgaatcccaccgaagacgaacttaccgcacccctctgtacaccggaattcatcggaagcgtgaagttctccggcggcagatgcgacattgcgacggtcgaaggctcgctcgacggatgggagatagagactgcgggcgaggtttacgttgacggaaaaaagaagtaaaaaagcagacggaatctgatatattttgtgaaaagtattgtaattggcgtaaagacttgctataatgaaagtgattttttataagtttacatgatacggaggatgtaaaatgttatttaccagcggagacagaatcgtttttacaggcgacagcgttaccgatgcaggacgcggcagacccgtcggagaaggactctggcagggtgtaggcgacggatatgtcagaaccatcgacaatattctgaacgtagtttaccccgactggagaatttgggtaagcaacacaggcacgagcggagacacaagcagaagcctgaaaaagcgttggcaggaggatgtaatgaacctcaagccggactgggtaagccttatgatcggtatcaacgacatctggagacagttcgacacgccgacaattcccgaacagcacgtttatccggcggaataccgcgaaaacctctgcgaaatgctcgagagaacgcttcccgtagtcaagggagttatactcatgtcgccctactatatggagctgaaccgcgaagaccccatgagaaaaatgaccgacgaatacataaaaatttgtgaggaagttgcgaagaagtacaactgccactacatcaacattcagcaggcgttcgacgactaccttatctaccgctatcccgcttatatttcatgggacagagttcatcccgggaaaatcggctcgatgataattgcaagagaattcttgaagtcggtcggcatggacagaactctcatctgacggaggaattatgataaatcttgcgtgctgtattcccggcggatctctcatgcccgagggagtggcagaggtaccgaaatctcccgccgagaatatcatagaaaaatgcagatatgttctttccttgggctatgacttcaccgaatgcggcggaggaatgcttgctggactgaacgaggaagagctaaagcttctcgcagacgaaaacaagcgtgaatcccttcgcattgccgcggtaaacagcctatttccgggaaactggaaactttcagacccacgcgtggacaagacggagtatcttgaatatgcagaaaagctgttttccgtgatggagctgctcggcgtgccgtatgcggttttcggaagcggaagtgcaagaaccatacccgatgatgttgattttgacgacggagcggacgagctgtacggatttctgctctcccttgcggaaaaggcgaagaaacacggaatcactgtgctaatagaaccgctcagaagcacggagtctaacattttcactacagttgaagaatgcggacactttgtgcgtgaagtcgaccgagataacataaagcttctgtttgattcgttccacatggcggaggaaaagagcagtgtaaaatgcgtccgcggaaacttcgacatcgtgagacactgccacatctcggagtcccccaagcgcacaattccgggctcaaccgacagcgcggatcttgaatacaacaaagactttataaatgagctgaaaaacggcggatataacggagttttgtcggtggaaagcagctttttcgacttttacacggacgccgcgaaagctcttgactacctgaaaaaactgatataggaggctgtttatggacaagctgacattcagatataaacccgtgagacatcacgaaagcgaaccggtctatcttgttcccgaaagcggagaaatgtacgacggcatcacctcactgaccgacggcaagagcgtatttcccgcgtcaaggtataaggatggggttatagcgattcttactgccgatgaaggggaagagcttgtgcttgaagccggagaaacggacgtcggcggatgctctgcggagatagaggacggcaaggtcgcggtttcgataaacggcaagcacttctcggactatgttttcgagggatacaacaagccgttcttcgggcagatagtcgacgaggacggtattcctttcaccagacttgactttgagacgaaggaacacccccatcaacgttcgctcttcattgcggtaggagacgtaaacggaatagactgctggaacgagtacggcaactacggtcttgtgaagaactgcgccgtgaaaaatgtcgtttcatcctcggcttacgcgtcgttcactgccgaaaaccgctggactgaccgtgaagacaagtcgctcatcacggaaagaaccgcatacaccgtatacaatcagccttcagacgttaagattctcgatatcgagacgaccttcaccgcggattacggaaatgttgtcttcggcgcgacaaaagaggcaggaccgctcggaatcagagtgcgtgacgaaatgcgctgtgatatcggaagcggacatatcctgaactcatggggagcgtgcggagaaaacgaatgctggggcagaagcgcggaatggtgcgattacggtgctgacattgacggagccggacaaatgggaatcacagtgttcgacaactgcaaaaacgaacgccaccccaccgcatggcacgtcagagcttacggacttttcgcggcgaacaacctcttcttcaagggcggattcacgattcaggcgggacagagcataacctaccgctaccgtgtcatattccgcagaagaagcatgacaaacgaagaaataagcgacagatacgtcatttacaccttagctcagtaaataaaaaaatgcccggaagagaagatttaactttcttcatcctccgggatattttttgctcagtttgcgttttcgttttggtttgtcagagttacatcagcgtagtcggctaccttttcgtgaaccttttcgtacattatggtctgacggattgtctttttgtcgtaaatcgcttcaagctcttcaacggaattcagtccgtatacatctgtggcgtattcttctgcgcccttgcggtattcctcgtcggtgagcgtgatgttctcggctctcgcgatagcgtattttaccatttcatccttaacgtaagcttcagcctgctcctgaatgttctggtagaattcgtcctcggtcatcttgtaaacagcttcaacatagcttgcgaattgcactcctgcgtttgttgcgtatgcttcggcggaggttaccatgtcgtcgtaaatctgcttcagctctttttcggggtacttcttgacggtagtgttgtcaaggattgtgttccaaatctgctcgtctatgctctggtagtagatttgcttgtagtggtcttccatgagtcccttgatatgctcttcatattcggcagtcgtgtcgtaaccgagatatgcgcgcgcgaactcatcattgtattcgggaagctcctgctcgcagacgttgtttactgtgacttcaaagtgaacgttgtctccggataagtcggggtactggatgtaaggatcggggaaggtcatgtcaaaggaaagagtgtcgccgatctttgttccgatgagcttgttttcaaattcgtcaggcatagaacccgcgcctatcgtaacttccgcgtcgctttccgtagcctcggatataatctcgccgtccattgttcctgtgtagtcgatgaacagtgtgtcgccgtactcagcaccgcggtctgttatgtcggtcagcttcgagtagtacgaacgcgtcgcgagaatctgctgctgtatgtcttcgtcggttatgtttatagtgtagccctcggcgggaagtcccttgtagttcgcgaggtcaatgtattccgaaaggtcatagttatatctgtaagtcaaaaggtcgttctttgaaccgcatgaagaaaaagcggaggtgagaagaacggctgaaactactaatgctgctaattttttcatgttatttatatttccttggtaaattttaatgattataaactcagccacataccatcttatcacaaatcttatcgaatttcaagagataattcggaaaatttgcattttacttgctgttttgagtttttactgcatctgcgccgacgttttgagccttccgaaagagtggcagcacggcataaccgacaatgtacgagattccgccgtacactacgagtatctcaaggaacgagccgacaatggacgcgatttccgtgtttgttatgttgacataggagagaagaaaatcgacgagatagaatatttccgacacaagacgggacgcgcagtaaagtccgaccgagtacagcagcgctttctccggtgtgtggcggcacttcttccgctcgttctcttccgcgttcagcttcagctttactatgcgggagacaatgcaggcaagaatgaggaacacaagctcatataggaagtttgcaccgagccatatgagagccacgacctccgttccagataccgcgcttgtgacgaggtctatgaccaaacgcgccgcaaagtcgagcagtgtcagcagtgataccgataccgtagtcctcacacctgagccgcagaacgccgcgcagactattgcacagtacgataccgcacgtctcgccgcgtcaagtatctcggaaagatatgacgtaacgctctctacccactcgggaaaggcaatattcgtcgagctgagcgtgcagagatacgacacggctcttcctgcggcgatgaggatgagtattataataaaatatgtaagaaaaaagcggctgctcttttgctttactgcattggtgctgtcttttgccattataaaacgtcctgtagatttactgataaaattgtactaatataataacacaacacagtgattatttccataaggttttgtgaattttaagtgatattgccttcatcggcgcatataatagggtatattttattgcggcaaacgcggaggaagatatggtaacgcttaaaactacggagataagatttgctttggcaaacgacgccgaaagactgtacgagtttctcgacacactcacgatgaagcatgacttcgtttcggtcacaagcataggaaaaacagctgagggaaggatgatacccgtcgtcacactcggaacgggggagagagggaacgtttacgtcggcggaatgagggcagttgatttgatttccccgtccgttctgctccgattcatctgcgactatgcggagttctattcggcgggcaagagaatgtacgggataaatatgcagtacctctgggaacatcgcacaatacacgttattcccatgctgaatcccgacgggtatatgatacgcagaaaaggcgcggacaaatgcatcatgtgcgacaggctgaaaaatctcaacgtgcgcgacggtcatgaaccaaacgatttctcggagtggaaatacaacgcctgcggaaaggatatcgcgctgtccttcgatgatgcaaaaagcgtgaatgtgccggaagctgacgcacttaaaaactacataaactactacgccgatactcttgacgcggtgcttgacatcggagcggactgcggcatagtttattcgtccggcaaaaatattccgtcacgagcaaagaccgtggcaagactgttctcgcggatgagcggatatcagccggcgcggtcgagtgaagcgtgcggaagacttaccgactatgtgatagaaaagctcgggaagaacgcgtaccacataggctgtcttgacgaaggagagagcttgccggagagcgggaaggactacatcaaagcatatgccgcgctccgtgaagctctgttctcgtgtccgcttctgtgaataaaggttgcattttcctgcacggtatgttataatctctcatataacatatgacaaaggtgacgaaaatgtacgatatagtcaaagaaatatggaaaaatccgggagcacagtattctccctatcccgtatggcagtggaatgagagcgatacggcagaaaatcttgtcgcgcgtcttgattctttccaccgaaagggaatagacggggttatagtctctcttccccaatgcggactcacggatgagcttgccgaaaaattcataacagtgctcgaagccgcgaaaaaaagattcatgctcgtctttataagggacagctttgcgtcggccgaagaagctatcgtcgcggaagaaaagcgtgcgagcgagagagtgcttctgataaagacgtcctgcgaaagagcggaaacagacgaggttctgttcagcgtgtacgtcaagcgtgagggtgaacttcttacggatgtaaaactcggtgcggctgacgggtacgaagaatgtgacgttgttctcggctacggcagggaaaacaaagccgacattctgaatccgtacactgcggaaaacatcataaaaaacacgcttgaacagtattacaacaagctgcacgagtatttcggctcggtcataatcggctttaacatcacgcctcgcggcttcacggataagctgatatggagctacggcatggacgaggactggatggcggcaggcggagatatttcatcccttgtgtcgtttctcatcgagccgaaggtgaaaaaacagcgacgcgaagccgagttcgtttacgacaaaatgctccgcgcgaaaatccgtgacgcatatcttgcccctgtcgcaaaatggtgtgcagagcacggtgtgggacttgtcggaagcctgacgggtgacagtgcggacctagcgttctctgcgcagtttgacgttcctgcatacagaataaaatacgacagcgaggaaaaacttcccctcggaatgaaagcggtatctgacactgcccgtcatcgcggagtatctcacagtgcggctgagcttttcgcgggtgtggagtccgtgtctcccgacgagtatatgtgcgagctgaatcgtgcgctttcgtgtggtgcaagcatgataattcccggggaattcaccgaaagcatggcggaaaactcacctctgtggtgcgaatacagaaaagcatcggcttatatcaagagaatgtcatggctgaacgcgaccggtacgaacaatcccatgtgcgcagtgctgtgctcctccgactatgtgccgagacttcccgcggaaaagctgtatgccggcggatatccgttcaattacctcacgaccgacgacctcatgaacaaggctcacatccacgacggagagatacacatcgacagatataagtacaaggttctgctcgtcgacacaagactgagactggatacggcgatagttgagaagataggcagattcgtgactagcgacggacttttgtaccgcggaacagattttcagacattcctcgaaaagcacacgaagcaggagacgcgttttgttcccgataagcctactaatgatataacattcctgcacatgacaaagagcggatgtccgttctgcgcggtgataaaccacaaagacgatgccgtgagcggaaaactcatcgtaaaagacaacttcgcggcggacagattcgacccgttcaccggaaaaacggaagaactttcagccgagatgaccgatgcgggattcgagtacgccgtaacggtgcctgagcattcgtcgtttgtcgtaggttttgacccggacagccttgtcagaataaaagaatccgcggacggcaatctttcactctccgaaatcgtatctctcaacttagacggagaggcgtgctttaccgtgagagaggacacaaaaaaagtcatgttttcagcagaacaagcgaacggtattgcggcagtcaaggtaaacggcgaggaaggcggcaagatactgttcaaaccatatgctatcgacattacaaagcttactcacgcgggagaaaacacggtgtctctcaccctctgcggaagcgaagtcaaggcaggagaaaagctatgctccggctgcaaggtgatactttaccgcagtcaagtgtgaaattcacatatttataaaaagataacatttaagttacattatcgtcttgaaaaatgccgaaaaataacattaattaacaattggttaaatatatgtacacacattgccgtgtaattaacgatataataatgatgtgaaaaattgaagcgcggacgttaaaatgcgctgaaaaagaaaggtacaggacaaacttttatgaaaagaatttctcttgttttgcttgcgattaccgtaatggcagtccttgcaataagcgcgtcggctgctaatactgtaatgtacagcggcggcggtgcggctcagaaccttgtacagggtgacgcgggtgctctcgttatcgaactcaagtttgacgatgaagaagccgaaaatccccagaccttcaatgttgacgactcagacgctctctatgttcgtttctttgtagaagacgctgacgctctcacaggcaacggtcagatcgaaatttcctcttccggcacttgtgaccagcaggaatacaactacaacccctttgcatatgaaatcgtatccggttggaacgagcttgagctttacctctgggaaggacaggaaacaggcggttctcccgacttcacaaagataaactacttccgtatctacctcttcacagacggagaaaacgcagttgctcttgactacgtagcattcggtgatgaaggcgaagatctttcttccatcgctacagacatcggtgagatcgttaaggaagaagtagttctcacaaacgagcttacagaccatgctgaaagcgatacactttctactctttcagcttgcaaccgtatccctgaggatatctgtgacgtaacaaactatgactacctctttgcaagaatctatgttgaaggcatcgacaacttcacaggcgatggtcagcttgaaatctgctccaagccctcacccgaccttcaggaggttcactgggatgtaaatactctcgaacttcaggatggatggaacgagcttaagcttgatacataccttgcttcctcttatgacgaaagcttcaaccgcgcaaacgctcagttcttcagactttatatgttcacgtccggcaatctcaagctcgacctcgactatgtaggattcggcaatgaagattccgacccgaacagcctccctgtatatcttgtaaagcccgctgccgagagagcagaagaagctcctgctgacgagactgctgaggcaacagaagaaacaacaactgaaacagaagccgctgccgaagagacagtcgctgagacagaagttgctgaagaaaccgtagcagagacagaagctaccgaaaccgtagacgaaactgttacaacagaagaacccgcagctgaaactaccgaaacagcagctcctcagacattcgacgcagcagttgttgcagcaatcgcagcagttgttgcagcaatcgcagcagttggcagcatccgcaggcgcatacatcgcttccaagaagagaagataaatctctgaaataaactaagttccgaatggttttgactaatccaaactgttcggaactttttgttatcgtaaaacttaaaaagaaaatcgctgtaatcgtaaaaaataccgtgttcactatagaatatcgggcgcgtatgtgatataattcagtcaaaggaggtggaagtatgtctgaaaaagcgttatgcgacgttctctctcccgatgaatttctcggcgggcgtgactataggataggggactgctattcagagcatcaaagcacattcaacaatcggcttcattttcattcgttctacgaaatgtcgataatctacgaaggtaaaacggactttcttataagcggcaacaaattcagcctgaaaaatcacagcattcagctcgtcagaccgtccgactaccataagcaaatgacggcggagggggagtatttcaagtatttcaacatcctcttcactcccgaatttatatcggaggatatgcgcgtggagatagaaaaagactccgtcccgctgtgcatcaacgtaaacgaatccgactggcgtgatatgctgaagctcaccaagaacgcgtatgatgaattcagctgcactcccgacgatcctcttacgaaaatactcatcagaagcgcgatcgagagtatctgcgtgtatctcctgcggcatattcaaacggaaaaatgcgcatacgaggacagttcatacgagcctttgagacgcgctatcacatatatccacaaaaattaccgcgaggacttgaagctttccgatgttgcggctcaggcgggattgtctccgacatatttttccgcggtttttcacaaatacatcggaacgtcgttctgccactacctcacggactacagaattcaggcggctgaaaaatatctccgctcaagcgacctatcgttaaaagttatagcgtcggtgtgcggattcacatcatattcgcattttgtaactgtgtttaaaaaatactacggcgtgtctccgagcgagagaaaacgtcggaacagcgaaaagaaactgtaaagtcaatctaaaacataacaaaagggaaggtacctaaagaagtatcttccctgatttgttgttgtgttaaaaaacttagatttcggcgatcttgatttcaacttcgtgaccgcaagctgcggacttgttgataccgtcgatgattgcctggttgtagagaatctgtgatgtgggaacaggagcgggaccgtttgtcttaacagcgtcgaggaaggaacgaatcttcttgtcgaaaagtccgcccttgccaacgttaggctgaatcggaataacggtttctgtctgagcgccgcatacatcgtggtagagagtcataggaccgccaacggaaccgttccagcagtctgtggaaggaatacggagcgcgccttctgtaccgaagattatagtgtcgccgggtgtgttaacgtgcatagcccatgcgattctgaagtcgagaatgattccgccttcgagacgaacgaaagctgctgcaaagtcgtcaactgagaaacgagctgcgtctgctccgttgtacttcgggttctttccgaagaagtcggaggtgtagccggatactgtgagcggcttcggataaccgattgcgttgagaaccatgtcgagggagtagcatccgatgtcgccgagagcaccgataccgccggtagacttttcgatgaatgtagagcccgggatacctcttcttctgccgccgccggtctggatgtagtagatcttgccgagaacgccggagtcaacgatcttcttgatcatctgcatattggcgtcgaatctgggctggaagccaacggaaacgaacttgccgcttgccttttcaactctgcaaatctcttctgcttcttcaagagttacggagaagggcttttcgagaagaaccggaataccgtgctcgagagcgtagattgtgggagctgcgtgctgtgtgttgtatgtgcatacggaaacagcgtcaagctcttcgttgtcgatcatttccttgtgagaaggatagaatctaacgccttcaacaccgaatctcttcatgaatttttcagccttgccggggatgaggtcagctgccgcaacaacttcaacatcgtcctggagcttgtagctctgaatgtgggattcagcgatccaacctgtaccgatgatacctaccttgagctttttgccggtgttttcggttttttcttcaacaacggtctgtttgaactgactgagaactgcgtctgacatttattttgtccgcctttcatttatttttagattattgataaccgctccttgtcggacagcggattatttcggatttaaggtaacagcactgggttctggtggtggggttgcgcagacagatttttcgtcaggttaaacaaaccgaggaagcaagagtaaatcctctgctgacgaggtttgtgacacatgacggaaaagatgcaagcaagtgtgccgc

SEQ ID NO: 3668 - DNA, 29225 bp, Unknown
  16S sequences of unknown bacteria
agcagccggcctgccgcacgggagccgccgcggcaccgacgcccggccctgccgcgccgcgcccctccctgccggaggccgtgacgggggcggcgacgtcgctgctggcggtatgcggcgccatgatgaccttcgccatcgtcgcgggcgtgctgcgcgcgctggttgcggcgctgttcccggcctggacggcgtcgcacggacggttgctggcggcggcgtgggcgctgctggagataggcggcggcgcggcggcggtgctggaggcatggccgcaggcgcccatggcgctgctgtgcgcgctgtgctcgttcggaggtctgagcatctggctgcaaaacctgctgtttgtgccggaatgcatacgccccgcgaagctgctttgcatgcgcatgcttcacggggcgctgtcgggcggcctggccctgctgatctttacgctgtttcccggccttacgcggcctttttgaagatccagaacttgctgaccacgtagttgaacaccatcacaaacaccagcacgatcacacggttgacgatgttgctcacgcccacgagcttgagcagcagcatcaacccctgttcaaataccagaaagctcaccagccggctcccggcgaactgcaaaagtccggtcagcacctttccctgaccctgtgcgcggaacaccagcccgcggttgatccagtaggcaaagagcaccgcaatcacccacgagatggcgctggacagggacatctgcacattgttggcccggttgatggaatccaccagccaggggatgagattgccgtcatagggcgccttatctgccatgagaaagcagcagccatagtgcaccaccatgctcagcagcgtggtcaggcccccggcaaaaaggtagcggatcatttcatactgcttttcatgcgtattgagatattgcctgatcttctgaaccatgagcgtccttcctctcctgtatgcggtcagtcctcgccatggtcgccgcgggcatagtcgcagctgagcaggtcgcccacgggcaacgtgaagggcgcgccctttgccccggcgcgcagggtgacggtttccccgtcaaaggcgagcacatggaccgttttctgcaccattttgccatcccgcataaacaccgcgcgaatcctgcggtcatgctccagcgcatagcgcaaaaagcgtttcattggcggtattcctccggcacctcaaagatgcggttctgccccccggccgattcataaatcaccgggaacagcgcctccagcgccgcctcgttgaccgcatactgggtattggcgcgttcataggggctgacgtagatatattgtacctgatatcgtgtcagcaggtcaaggttggcggcgggattggcatagaaggccgcaatctccgcctgccgctgggtggtattgaagccgtggtagtagaggtagaggtcgctggaacacaggatggtgcgccccgccagcgagctcacgggattcaggtgctgatttccggtgagaaagatgctgtgttccggggtgttttcccgcacgaattccgcggtttcgatatcggcggcgctgtaggcctgatagtcgctcacgcactcgcgcgccacggtgagcgtcgaggaggtgaagcagcagaggaggaacccgacggcaatcacccgccgccccggcaggccgcgcaggcgggcaaaggcttccatggcatagtccgcggccatgggcaggcacagcaggaaccagacatacaggagcttgttgttatcgtactcattaggctggaacttgaatacctcggccaccgcatagatgaggaacgcgccgcaggcgatcaggcggatctggcgcagatcgtcgggcacggcgggcgcatccttgggcttgcggcggcagagcgccagcagaatcagcacatagggcacgcccacgtttttgaggtagaaccacaggtaggtatccaccaggccccggttgccccggttgttggcccagttgaaccagacgctcaggaaatggtcgctgcccgtggcctgcacaaacgtgaaggcgatcagctgcggaagcgacagcgccgccgcgacggtcccgtacagaagccacggccggaacgcctcccagcggcctccccggggcgtggtcgccacgcagtaggcgcatgcacccgcggaaaacagcaccagcgccagatagctgtgcgtatgggccagcggcagcccgcctgcaaacaggcccagcagcaccagctcgcgcacgccgtgacgctcccggcggcacagcggcggcaccaggaggttgagggccggcatcagcagcgtccagccgcccagaatgccgcgctggggcaccagcatgtcgcagatgatgttgacccagcgcaggttgtgcgggtcgggctggttggtgggggtctggtagtaaccctgcatcacgttggccagattgtcccacatggtggtgacttcatagccgttcacggtggcatccagcgtatagaaaaagcccagaccgccgttgagaaacagcaggaaaaacgccagcgccgccgcaccgcgccttctgcacagctgcatggccaaaagcccgtagcctgcgtagaccagcgccatcatcatcgtgcccgtgaaggccatggcggtgttgagcggcatgcccagcatgagcatgctggtggcaatggaatccgacaggtagggataggccatggtggcccccagcatgaggctgttttccagcgggaaggacgcgttgacaatgctggtgcataccgccaggtgcagggacaggtcgccgtatgtgctctgacccacgtggtaggtaccgtccgccgccaggcggatggaatgcgtatattgcaggtagccccccagcaccgtcagcggcacgaccagcacaagcagcagccgaagcgtccgcttctccgtctcgtcaaagggcgcaggcgcgcgacagtcgcgccacagccacgccgcgcccacaagcagcgcgagcgtgcccagggccagccagtgcgccgcatagctgaagcgcaccgcataggcccacaaaacgggcagccacatcagcagaagcacgcccagcgacaggcccagataaacgcgcagcacgggcttgagccggggcaggagcagccgtgcaatcactgcgccacccgagagaaacagcatcagatacacgatggaaagcaagctccgtcctccttatacgcacagcatggagcggaagaactgcaccgcggtctggagcgttccgtccgtcacggtgcacatgcccgaaagcgcctcctcgcccgtgagcataaagggcgagaagcggtagacccgtccgcccggctgggcgtagaagcgcccgtccgtcacaaaggggctgaggcagggcacgatcaccgcccgctcgaactggatttcaatggccgtttccaaggcgtcccaggcctcgccgctgggatcgctcggcgcgcccgcgtcctcgcacatggaaaaggtcatgcgcaggtcatcgttgcccgccaggcagcggatgcggtggcgcgcctccgccgcgcgtgcgccggggatcagcgtctggcggaagatgagggacgcctcccgcgccggggtttggagcgtaccctgcgcgctcagggcgcataccgtgcgctcactcacaaagaactgatgaaacaccgaccgcttccgccataaaacccgcatcagcgggaacgtaacgcgcggacggcgcaccagccaccgctgcaaaagcggcgcctttttgcccagctccgaaagcatcgtttcgctggccgcgcacagccgtgcccggcgcggatggcgcgtgagacgcgcgcccgcgcgcagcagctcgtccacggggcgggcgcgctcgcggccggggcggctgctcacctcccggtccgcggtcatctctccctggatttcgcccttttcgcagatgccaatcagcgccagcggcgcgtttttgggcaggtaggtgcggaacgcctccatggtggcatatccgccgtggtccagcacaaagcagggcgacaggctgcgcgccttcaggtgcgcggcgatgctccgggcgcccgccccgccgctgagcccgtccatgctcagggccagcaaaagatcgccgccgggctgatacccttcgcccagaagcccttccagcgcctccagcagcgccaccacatgggcgcgcgacagcggcacgctgatgggcatctcgtgcgggctgtccgccgcgacggcctccgtcccggccgcgtccaggtgggatacgaacaccagcggtgccgtgctgcttgcgccgggcatctccatcagcaccgcgccgttgtcaaactgcttgctttccagcttgtcaaacaccagcggatagctttcccgcagcacgcccagcgcctgcgcagcgccctgcggcgtataggcggaatacccgctcaggcgccggagcacgtcgcgcgcgcggccgtagttgaggggcgccaaaaattcgctcatgagggagcctccgtttccaaaagggaatctgctcatggattcgacaaaagggcgccggggtcctctttaccgggcaggcaaaccgccctgccggcaaaaaagcggggacgggcagccgcccatcccccagaaggccctccggcccgtcagatgattcccttttcctttgctttgcggatcgcatcgctcacgtaaaacaccagcgcgcacagcgtgatgcacacgcccagccacaaaagcagcaggtccggcgtcaacatccagcccacgcaccgggccacaaaccagtcgtggaagtatgtggcgaccagtcccgcgatgaacacgcaatgcgccgtctttccgatcagccgggagtagaccacgatgccatgcttgagcatcactagtccgccgataatcatcaccagctccttcataagcaggatgatcaccgccacccacggcaccaccggcgggatggccgacgagccgatggccatgcttaacagggcggtcagcaccatcaccttgtcggcaaacgggtccaccagcttgccaaaatcggtgatgaggttgtattttcgggcgatgcgtccgtccagcagatcggtcaggctggctgcaaggaaggtaacaagcgccgcgtacttttgcccgctgacgaacagcaccacgtacaccggcaccagcagaagccggatcatggtcagcacgttgggcacattcaggtttttgcggatcaattccttcgcggtcaaaatggtatcccccttgcgctatgttcagggttattatagcatcaacccgagaacccgcgcaacatatgcgcgcctgaaagcagcgccgttcgccgcccaaacccgccttttggcggttcatcgcgcttacttgcggctgaccttcaccatgacggccttgccggcgagaggctcgccgaacacatcctttccctcccgggcgcagcgcgtgatgcgcagcgtatcggcatccacggcctccacctccaggtagccggtctgcaggacggggttgtcgcggcgcttgtggagcagctcgcgcacgccctccagcagcttttcgtccggatcgtcccagttcatgggcgcacggttccaggggtcggccatgccggtcatgccgatctcgtcgccataatacacggtgggcgcgccgggcagggcgcacagcagcttcatggcctccagatagcgcttcttggcgctcttgagctcgcgcttgcccagggtgatcttctttgcctcggcgcggtccatctgcgcggcgccttcccggttgaggccgcacatcgcgttgaggatgcgcacgcggtcgtggctgcccagcaggttcatcagcgaatagtagaagggcacggggtatacctcctgctgatgcagaatcacccggcgcagctgataggcgtcgatcacgccggtgaaaaagtcgatcaccgcgcagcgcagaggatagttcatcacgctgtccagcatgtcgcccaggcagtaggagcggtttacgccataggcggtcttgttgctggcgtcctcccagacctcgcccagcagcgtggcgtccgggtcggcctgcttgacggccttgcgcatctcaagcaccatgtccacgggcagctcgtccaccacgtccagccgccacccgcacgcgccgcggcgcacccagcggggcagcacgccggtttcgtcgttcaagaggaaatcacggtaggaggggttgtccttgttgacggcgggcagcgtatagaagccccaccagcagtcatacttgtcggggaactcctcaaagcggtaccagtcataataagggctttccttgctctgatacgcgcccagcgtgtcatagcggccatagcggttgaagtacttgctgtccgcgccggtgtggctgaacacgccgtccagcaggatgcggatgccgcgcgccctggctgccgccaccagatcatcaaaggcggattcgtcgcccagaatggggtcgatttcctcatagctgcccgtgtcgtagcggtgattggaatgcgcgcggaagatggggttgaggtagatgatgctcacacccaggtccgccaggtaatcgagcttttgcctgatgcccctgagcgtgccgccgaaaaagtccagggcgcggttatcgccgttttccgggtccaggtccaacgtggggcgctcgttccattcctcatggaaggtggcgtccggatgcgccgcggcgatcttgcgcaagcgtcctttctgtccgttcttatccttataaaagcggtcggggaaaatctggtatatgatcccgtgacgcaggtattccggggtctggtaggcggggtcatagaccgtcacctgatagctgtcgggctggccgtcatagcacgcgccctcgccgcccagctgatcgcggctgttgccgtaacgcacgtcgccgtctgcgcggcggatgataaagtcataccagaaaagcatgggcttgtccggtacggtgacggttgcctcataaaggctctcccccacagaaaccatcggatacaggcgctccgcaccatcccaggtgcgcagcagcacctccgggctttcgtcacaggcaaagcgcagcgtcagcctgtttcccgccgcgacgggaccaaggggatcccggtattgagcgtcatgtgaatcgtggtacagcatttggtagattcctccgttctgcgtgtcaagggcatcttacaaacattgcgtattgtaacacaggatttgccaacgtgcaaatgcaagggccgcccttcctgcatcttatgcggcgggaaatgtatttatgcctccgcgcgtcacatttttccagatgggcgtgcgtgtgttgacgcgctcccgctccaatgctaaaatgttctgagcgcatggtcccgcttaatcgggtcaaactgaccatgagtgcccgctacaccgccccacttggaaaatttcctcaagaaaatttgaattttgtgcaggaaaagggaaggcggattcgtttgatgaatgagcacagtacgcccgtgaaggatgcgcgtccgggcattaaacggaggctcggacatgcttagctacgaggaactttacgagaagtacgctacggacgtgctgcgcgtcagctacttctacctcggcgacaggcagcgcgcggaggacgtgtgtcaggacgtattcgtgcgcctgatgaccaacgcgccggacctgcaggagggccgtgaaaaggcctggctgctgaaggtggcgctcaaccgctgccgcgacctgtggcgcggcgcatggctcaagcgcgtggtgctgggcagtccggcgtttgaaatgattcccgccccggacgacagcggcaggcgcgacgatgaagaagccatgatgaaggccatccacgaacttccccccacctttcgggaagcgattctgctgtactactaccagggctacggcatcggcgaaatcgcccagatgctcgatttgcccgagggcaccatctccagccgcctctcccgcgcaagaaagaagctggaaagcattttgaaggaagaaggaggtctttcgcagtgaaacgcctggaacaactgcccgaagtggcaaaccggcagctgggcgggttgacggcgacgtccaccctgctggcaaaggcaaagctgcgggccgcggagatgcgccagccacgcaggcgcggcatcagttggaggcctgcgctggccgtatgcgccgcgttggttttgtgtgtgggggccgcgctgtgggcctcggacggccatgtgcccggcgtccagcccacgcccacgcaaaacgtgctgggcagccgctcggcgggcgattcacatccctctaccgctgcgccgcgcaccgccggtgacgtgcccgtgggcagcctgtccatgagcgcgggcagcgccagttcccatcagaccctgttcgcgcagggccaggggcagagctttccgctcatcaccatggacggcgccacctaccgcatgctgcaaagccccaccggcatttccagctcgctcctgggcgaggagctggggcaggtgaccgagtttaacgtcgagcccgcgctgggcaccagcggcatggtgagcaacgtggtggcccgcggggagacggtctatgccatttccggcatgagcggcgccctggtggcggctcaggtggacggaagcacgcgcgtgttccagcgcgtaagctatgcgggcaccgccattatcggctccgagaccctggccgataccctgtgcgaccccgtcgacgtggagtggatggagctggcaggcacgggccgtatatccgacgtagccaccgcccagcagctgatgcagattctggtggattatgccgactatcagagcacggccatgagcggctccggttccctgcttatcggtctgaaaaacgggctcacgctgcagctgctggtcagcgatgaatccgtcagcgcctgcggcacgtggagctgcccggatttcttcgaggcttttgatgaggccgttgcgtcctgaccatggcatgcataacgacaaaaccgccgcaggagcgttcttgccccgcggcggtttcgtctattccatcagccttcggaagccttcgcccagcacctcgtgcgcatcgctgatgaaaaggaatgcgttctcatccgcctcccgcacgatggccttgagccgtcccatctcctgcgcgctcaggacgcacagcagcaccgggcgttcctgtccgctgtagccgccctcggcacggagcaccgttaccccccggtccagcttctgcataatttcctgcttcacccgatcatgctgggtggagatgatgtagcaggccttttcgcgggcgaggcccaccattaccacatcaatcagcctgctggaggcatacagggaggcaaacgcgtagagggcatattccgcctcgatgaagaaaccggccatcagcaccacgcagcagtcaatcagaaacagaatggcccccaccgagatgtgctgaaagcggttgtgaatcatgcgggccgccatatccgtgccgcccgtggtcgcgccgccgcgcaggataagccccaggcccgcgcccagcagcaccccgccgaacacagctcccagcaggggctgctgcgtcatgggcggcagcgggatcaggtcgatcaggaccgagaaaagcaccgtcgccaccagcgaccggatcacaaatacccgccccatcgcccggtagccgatgatgaacagcggtatgttcatcagcaggctggttgtgcccacgggccagtggaacaaatagttcagcaccgtagccaggccggtcaggccgcccggcgcgatgtggttgggcaccagaaacagcgggtatgccagcgcgcccagagcgcagcccagcacgatctgcacggtggaagcaaggtgctcgtttttcaacaggttttttctcatgtgttctcctttggttttgctgggcggcccccttgacgggagccgccccttttctattgtgcatcgtcctcgcaggtcatatccagagacacgcccagcgcccgctccacgcggcgcatgctctccggcgccagcgcgcccagacgccgcctgaggcgggttttttccagggtgcgcacctgttcgcacagcacgatggactcgcgccacagcccgccctctccccgcgggatgtgcacatgcgtgggcagcgccggcttgccggtactgcccgttagcggcaccgcaatcaccgtgggcgaatgcaggtttcccatatcgttttgaatgatggccactggacgcgttcctccctgctcgcttccgaccacggggtccagctcggccatgtatatatcgcctcgtttcatgctttcacactccgaaggcggccctgctttgctatcatatcatgaagcgggcggattgtaaaacgccgccgcgcttttcccggaccgcccacgtcatcctatgcgcccgccagggatggtgtgccgcaaagacaggtgcgctacatctggcggttgatttttagaacatatgttcgtataatgagatggaacatacgttcgtattttgcactgttgaggcgattgacatggcaaaggtcattctgcacgcagatttaaataacttctatgcctccgtggcctgcctgcaccggccggacctgcgggaggtacccgtggcggtctgcggtgaccccgcgcgcaggcacggcatcgtcctggccaagaacatgcttgccaagcgatatggaattcagacggggcaggtgctgtggcaggcgtttcagctatgcccgcgcctgacgaccatcgcgccggattaccgggaggtctcccgcatgagccagacggtgcgcacgatttttgggcgttacaccgaccgggtgcagcccttcggcatcgacgaggcctggctggatctgaccgcgcccgatatgacgctggagcagggcgagcgcatcgccaatcatctgcgccataccgtgcgggaggaaaccggcctgacggtaagcgtaggcgtgagcgacagccgtgtattggccaagctgggcagcgacctgaaaaaaccggacgccgtcagcctgatctgcgagcagaaccgatcccaggtgctggacccgttgcccatcgggtcgctcctgttcgtagggcgggcgacggcgcgcaagctcaacgccatcggcatttacaccgtaggacaactggccgcggcggacccgcaggtgctgcgcggcgtgctgggcaaggcagggctcacgctcagcggctttgcgcgcggcgcggacgacgcatccctcttcttggatgaccagccggtcaaaagcgtgggcaactccaccaccacccccagcgatgtgacggatgagcgcggggcgcgcctgacgctgctggacctgagtgagagcgtggccttccggctgcgccagcagggcatggccggacgcgtggtggagctcagcctgcgtgatacggccatgcgcaccgtcacccgccagcttacgctggaccggcccaccgattgcagctataccattctcgacggcgccatggacctgctggaccggcactggcgcccgcgcgtgccgcttcgcgcgctgggcgtatgcgtgagcgcgctgtaccccgcgaaccagaacatccagctctcctttctccccgaggaggcggcgaatcaacggcacatggccctggaccgcatggtggacgaaatccgcggccggtacggccatgacgccatccgccgcggggcgtgggtataagacgaacctcgggcccgccgctcaataggcggcgggcccgattcagaccgttgaaaaacccctggttttggaaagagccgcgtttcttgcgtcccggttgctcaatcattcgcgcttccctgacggtcgcgctcatggtttcgctgccccgctccgggtcgctttgccacctccggtggcaagtgcccacagggcacacgctttccttcgcgccttcggacgctcgcaacgctcacgaaatatgctgtggcataaggctttggggctctgccccaaaccccggcagggggatgatccccctgcaccccgcactttgtcaacagcctgagacccggcggaactgcttccgccgggtctgcgcgcatcaaaaaagtccgccgcgccgcctcttccgacaaaacggaaaaccctggttcatcgcgctcgcagccagggttttccgcacggattcggatttcatttggaggaatgcgtccctccaaacctctcagaatgggttttccgacagtctgcgcaccgggtgcatggggcactcggcgcgtcagcctgtcggaaaaaggtacggctctgtttccgtcagtcgatggtgcgctcgtcgttgagctttttgatcatggccacggcctcctcaaaggagacggtgcccaggttgtcgcccttgcggttgcggatggtcacggtgcggttttccgcctcgcggtcgccaaggacgaacatgtagggaatcttcatcatctgggcctcgcgtaccttgaagccgatcttctcattgcgcaggtccagctccggacgcaggcccgcatcggtcagcaggccggccacctcgcgcgcggcctcgtcgctgcggctggtgatggtcatcaccttcacctgcacaggcgccagccatgtggggaacgcgccgccgaaatgctccaccagaatgccgatgaaccgctcgatggagccgaacaccacgcggtgaatcatcacgggccggtgcttctcgccgtccgggccggtataggtcaggtcgaatcgctcgggcaggttcatatccagctggatggtgccgcactgccaggtacggcccaggcagtcggtgaggtggaagtcgatcttggggccgtagaacgcgccgtcgccctcgttgatcacatacttcacgcccagctcgtccagcgcgccctgcaggccgttggtggcctgctcccacatctcgtcagtgccgatagagttttcgggccgggtggacagttccacatgatacgggaagccaaagcgagtatagacctcgttgatgaggttgtacacgcccttgatctcgtccttgatctgttcgggggtcataaagatgtgcgcgtcatcctgggtaaagcagcgcacgcgcatcagcccgtgcagcgcgccgctcttttcatggcggtgcaccaggcccagctcgcccgaacggatgggcaggtcgcggtagctccacagcctgcgctgatagaccagaatgccgccggggcagttcatgggcttgatggcgaagtccgtgtcgtcgatcttggtggtgtacatgttttccttgtaatgatcccagtggccgctgcgttcccacaggccgcggttaagcatgataggggtcttgatctcctcatatccggccttgcgatggatctcgcgccagtagtcctccagaatgttgcgcaaaatcatgcccttgggatagaagaacgggaagcccgggccctcgtcgcggatgtcaaacaggtccagctcgcggcccagcttgcggtggtcgcgctttttggcctcctcgatgcggtccaggtgctcctggagctgctccttggtggggaaagcggttgcgtagatccggcagagcatcttgttgtgctcatcgccgcgccagtaggcgcccgccacgtgggtgagcttaaacgccttgatatagctcagattgggcaggtgcggtcccacgcacaggtcggtgaagtcgcccatttcgtagaaggacagcacctcatcctcgggcagatcctcgatcagctcgaccttgtagggctcctgacggccctgcatgtaggcgatggcctcggcacggggcagcgtgtagcggcgcggacggatgctctttttagcgcagcgctgcatttccttttcgatcttggcaaggtcctccatggtgaagggaacctcggtatcaaagtcatagtagaagccgtccgcgatggcggggccgatggccagcttcgcctcggggaacaggtgcttgacggccatggccatcaggtggctggccgaatggaagaacaccttgcggccgtccgggtcgtcaaaggtgagcggggtcacggtctgggaatgggcaatggggctgaacaggtcgcaaagcgtgccgtcctccagccgcacgaccaggtactttttccagtcatcgggcatctgcgccttgagcaggtcgcccacggaggtgttctccgccacttcataggccttgtcaaacaggttcaaaatcatggcttgcgtactcctttctgtatctacggggacggaaaacgcccgcccccacatgcggtatgcgggggcgggcgatgatttttcgctcgcggttccaccctgcttgaacgccccgaagggcctccactcattgtccggcgctgtatcgcgcgcctcgcggcccgtcggcgggtggtgtccatcggtccgtggcatccgccgcttgcagccgggggcggcggtctctgcaatgccccatcaccatggcgcgtcccgcgtcatccgaagcacgctcactatagcatttgccgcgccgcctgtcaagcggaaaatcttcaacgcttgggcacggccacgccgccggtcttgtaaatgtgccgcgcgggcaccacgccgcgcacgcaggagagggggtagacgttgctttcccgtccaatcaccgtgccgggattgagcacgctgttgcagcccacctccacgaagtcgcccagcatggcgccgaattttttcaggcccgtttccacattttctccctgaccatgcaccaccacaagggatttgtcgcttttcacattggaggtgatggagcccgcgcccatgtgggagcggtagcccagaatgctgtcgcccacgtagttgtaatgcggggtctgcacgttgtcaaaaagaatgacgtttttcagctccaccgagttgcccaccacgcagttttcccccaccagcgccgacccacgcacaaacgcgcagtgccgcacctccgtgcccgcgccgatgatgcacggcgcgcccagataggccgtgggggctaccgtggccgtgcggtgcacccatacctgaggcgatacctcggcgtactgctccgggtccagcttcggtcccagctcaagaatcatcgccctgatgcccccaagcgcctcccagggataggtaaatcccctgaggtactccgccgccagggtatgggtcaggtcgtaaagctcttcgatggtatacatgcgtcgttccgcctccttacaaaacctctccgttcagctttcccggtggagcgtcttttctttcaatgcccagcgtgcgggcctggcgctccgccggtctacgcctttttccggcgcgccagcatgggaaacgcctgtttccagctcacctgccggcccagccgcaccacatagcccgaaaacaggaaaaacaggaaattcagaatgctgtagctgtccacaaacaggtaatgttccagcatgccctgcacaaacagcgcggcaggcagcagcaccagcagcttctgcgcaggactgatcccgccatcacgggcaaacagaacccgcaccgaagccgaggcaatccgccaggtcagccacagcgcggccataaggccgggcacgccggtgagcatcagcgtctgcaaaaaggaattgtgcatgtgattgtacagcatatcggcgtttttgttcaccgccgccatcatttccagctcatcaaagcccttgagcaaggccagcggatgctgcgcaaaagtggcggggacggcgccatatacgcccgtacggcccgtaagtgtggtcaggtccgccagcagggatcgctgagccagctcctgctcgccctcgctggtggtggaaaccaccttcaccgcagccccgaaacccgccacggccactaccgccacaaggacgacaacgcacacgacctctatgactcgccgccatttgacaggaatgggcagccgctggaagccgaccaccaccgcaatgaccacgctcagcaaaaaggcgatcatgcccgtgcgcgaatccgacagcggcagcgccataaacaggcctgcgcccgccacggccgcgggaatcagcacccagggcttccagtggctcaccaccagatacatcagcatgcacaggccgcacaggctgagcgccgcggtaaagttaggatgctggcccaggacatacagccggccatcctccatgatgccgaactggctgtcaaaaaacggcacgggaatcacctcgccgcggagcgcggcaatcacgcccagccagcataccgccgcgatcaccgcggtgagcaccgcggaaatgcggtccagcgcgcggcggcccttttcatcttcgagcatggccgcaaagggaaacgccaggccgtaggtcgccgccatgcagacgatgcggtactggttgtaatcatactgcaaataatggtccccgttgagggctcgcgtaagcacgtaccaggccgcaaaaaccagccccagaccatagacccggtccgcgtggtactccccgcggtagaggcagatgcctatcaggccaaaggccagcgcggctccatagccttgtaccagcgcatgaccccgctcgtaggtcagcaggcccaaaagcatcgccaacgcaaaaaacatggtcgccagccagcgcgcgttccacaggcggcgctctgcgcgcgtgcgcagcgctttctcactcatgccctttccctccctgtcgtctcgcggtgtacctgccgctccgttcacgggcaacggttttgcctcaggggccacacgccgcattctgggtgaaatttccagtcagcttattataccagaatcatcctttccgggcaaatcgctcccgttatagccgcgccgcccgcaataccagcccgccgaacagcccggccacccacagccccgtcagacaccacttggccgccgtaaccgcggccgccatttgcaccgtcccctcttgcctgcggccgggataggcgcttacggcatgggcaagcagcgcgttttccaaaaggtccgccacagcccgcaggcaggccaccgcgtccatggccgtgggcaacggtgccaggccgaccatgctgttgtgcgccgccgctgccataacggccagcagcgagaggctcagccccgtatcagcccaccacaggcgcatcagctgtgcgcgtcccttagcgcccagccggtccagcccgtcaaacagctcctgcggcgtatagtgaaaacgcatgtccgggcactgaaagtccgcgtccagcgcgcgcagggcgggcatctgccgccggcttatataccatccggccagcgcagcccccgccgcgcccgcaatgcccaccgccatccacagcgccgtgctcatgcctgcttctccacgttcacgcccaggcgcgtgcagggcacccggcccgccagcaggtccgtgatgtggtagcgcgcatggccaatgatcacgttggtgccgtgctcgaccgcgcgcatcgcaaacgccagcttggcgcgcgcgccgttggctccggtgcggctggcgccgctgcaatggcccatcagctccgtcacgcgggcccgcacctcggcaaggtcccggccgctgaccagctccaccagcgtatcgggatcgttgcggtccagatagatgccgttggtgctggtgagcagaatcaaattcctggcccccaccagctgcgccaccacctcggcggtttcgtcgttatccacgcactccaccacctccacgccctcggcgcggcggctggcaagctccatcttgcgcacctcctcgtcgctgacggggtcgttgtagttgatgatgggaatgacctcctgcgcggcggcacgcaggagcatccggtgtatatgctcgcggcgcagcgggtcgttaaagtgcgtatgctccaccagcacctgccggatgccgtattcggggcggataaactggcggtaggtgttcatcaggatggtctggccctgcgcggaataatccaccttgtcctgctcggtcacgccggtcagctcatggccggtgcgcttgagatagtccagccgtccgatttcggtggcgccgctggtcaccaggatcatgcccggtcgaagatcgccgcccaggcgctgaaagatgttgtagtcaatggcgttttcatccttctgaatcagcgccatgcttccgattttgaccaccaggtccagtttttccatgccgctcccttcccttccgtcagccctgcggctgctctgtgagcacgttcatccattgtctctttttaaaatgcgggatgccgaccgccattttgaccgcttcctccaggaaggtgcaggcgtacacccattccaggggccagtgaaagaccagcgcagccaggcccgtgctggtcacgcccaccagccacagcgtgcccacatccaggcacaggctgaacagcgtatcgccgccggagcggagcacgcccacaatattgatggtattgaacgcgcggaaccagatggtcagcgcgcccagcatcagaatgaactgggccttttcccgtaccggataggacaggccggaaaagatgttgaccagcggccagcgcacggcgatgaccagaaggcccagcgccacgccggcagccaccgcgcccgccatcatgcgtttggcatacagataagcccgttcgcggtcgcccgcgccgagggccttgcccacgatgatggccgtggcattcatcagggcgaagatggcgacccacaccagatcgttgatcgtggtgcacacgcccatggtggccacggcagcgtcgcccatgcggccgtaaaagacgctgtacatggtcgtgccgacgccccagagcccctcgttaaagataacgggcaccaccgttttgctaaaccgccccgcaaagcccttttcctgccgcagccactcggaaggcctggcgcccgcaggcagatgcatgccataggaaaaggccatgttcatgcccatggacacggcggcggagatgaccgtcgccagcgccgcgcccttcacccccatggccgggcagcccagcttgccgaagatgaaggcatagttgagcaccgtgttggtcaagatgcttgcaaagccggacagcatgggcagataggtcttttccgccgccttgagggtggcggcatagacgttatccaccgcggtgaacagatagccaaacgccaccaccgacaggtattccaccgcccggtcaaagctctcgccctgcggcagaaacagcgatatgatctgacggggcatcaagagcgacacgctcataaacacggccgccacaatgagcacaaacatcatcgtcaggcccatggtctgccgcatgcgccggatgtcccgcccgccccagtactggctgaggaagatcgctccgcccgtacaggtgccgaagctgaacaggttgaacatgaatgtgacccggttggcctgcgtcacggcggagtatgccgcgtcgcccaggccgctgaccatcagcccgtccacaatgtgcaaggacgcggtcatcagctgctggatcaccatgggcagcgctaccaccaatacgttgcggatgaagggcctgtcccagcgcaggctgtcccgcagaagccggaaggcgcgggcgggcagggaaacggcattgcgtaacatgggtcgatcctttccggatgaagccattctattgcgggcgaatacaggcggaaccgcttcctccgtgcttcgccgcgtctttttatgataccatgacacgggaagcaaaggcaagcgcaaagcgagaaaaacgggaaacaggcgggcgcttcctcccccgagccgctcctctgccggcggcctgtgggcctgcggatgcgacgcctccggcgtgatgtattccgagaagaaaccctatgttacctacggcggcgccgcgatcggcttcgcgtacacctccggccgtctggcgggcggatatgcggtggactatgcggccgacgtgcagtaaccggccgaagcgctgccccgtgagctgaggcgcgcggcaaagcggcatcaccaacccaacctcccggcacggggaaggccttcgtcctggcggacgggaggtttttggggcggtacggcatggcccgaaaagaagcaggagttttcattcgccttcacgaactgtcatcgttgcggcgcagatgcgcccctcaatcgcgaaaggaaggcgaaaagccatggattaccggcaggaatatcagcgctggctggcgcgtgtgaccgacgaggaacttcttgaggaactgaggggcatggacgaggcggccatcgaggacgccttctaccgcgacctcgcctttggcaccggcggcctgcgcggcgtgatcggcgccggctccaaccgcatgaacgtctataccgttgccaaggcctcacaggggctggcggactacctcaacaggcgcttttccgccccttccgctgttatcggctacgacagccgcatcaaaagcgatgcgttcgcccgcgtgaccgcgggcgtgctggccgcaaacggcgtgcaggttcacttctggccacagctcaccccggtgcccaccgtgtcctttgccacgcgctgcctcggcgcctccgcgggcgtgatgatcaccgcctcccacaaccccgcccaatacaacggctacaaggtctacggcgcggacggctgccaggtgaccgttgaagccgcctctgaaattctctccgaaatcgaaaagctggatctctttgacggcatcaaacgggctgattttgacgcctgcctgcgggaaggacggatacagcctgtcccggacaccgttctcacggcctttctggaggcggtgaaggcgcagtccgtgcttttcggagaggaagcccgcaaggatatcgccatcgtctacagcccgctcaacggcaccggctatgtgcccgtcactcgcgcgctgaaggagctgggctatacgcatctgaccctggtggaggagcagcgcctgccggacggccacttccccacctgcccctatcccaacccggagatccgggaggccatggcgctgggcatcgcctatgccggccgatgcggcgcggacctgctgctggccaccgacccggactgcgaccgggtgggcgtggccgtacgggacccaagcggcggatatgcgctgctctccggcaacgaaacgggcatgctgctcctggactacctctgcgcccaacgcacgaagcatggcagaatgcccgcagacccggtgatgatcaagaccatcgtgaccacggacatggccgagcgcatcgcggcgcactacggcgtgaaaaccatcaacgtgctcaccggcttcaagttcatcggcgagcagattggccgcctggaagcgcagggccgccgggacagcttcgtgtttggttttgaagaaagctatggctatctctccggtccctatgtgcgggacaaggacggcgtaggcgcggcctgcctgatctgcgaaatgttcagctactacgccagccgcggcatttctcttctggacaggctgcatgagctctacggcgtctatggctactgcctcaacaccctgcacagctatgcctttgacggaagcgcgggctttgccaaaatgcaggccgtcatgcaggcgctgcgcgccggcgtcgcatccttcggcggcaaaaaggtgctccgcctgatggactatgccgcaggtctggacggcctgcccaagtccgatgtgctcaaattcattctggaggacggctgcacgctcgtggcgcgcccctccggcaccgaacccaagctcaagctctatctctccgtcagcggggaaagccgggaagcggcggaggagacagagcaaaagatcctgaaaagcgcagaggccctcctccactgagcggggcgttccctttgctctgccgccggagtccctgttttgcagggcgctccggcgttttttcttgcagcaaggccgcccccacgtctttttgcccggtagttcactttttgcgatatataaatagaatatccggttgaatttcttccaaaacacaactatgatgaacacagattgaatcagctgtttcacaaaacagcaagtgaagaaaggggaatcatccatgaagaagctgtttgccttgttcctttgtgccatcatggccctgagtgtggcctgcgccaccgccgaaaccgcccccgaggaaaccggcaagctggttttgtacagcccgctgaccacttccatgattgaaaacatgctggccatgtttgaggccgataccggcatcaagaccgagtgcctcgccatgggcacgggcgacgcccttaagcgcatcgccgccgaaagcgaaaatccccagtgcgatattctctggtccggcaccatcggcaccgtgaaaaacagcagccagtatttccaggattacacctgcgccaatgaggacgccttctatgagcagtaccgcaacgtggaaggcaacatgacccgctttgactgcgttccttccgttatcatgatcaacaccgacctcatcggcgacatcgagatcaacggctatgccgacctgctcaaccccgagctcaagggcaagatcgtctttgccgatcctcaggcttcctcttcttcctttgagcacctggtcaacatgctctacgccatgggcaccgacggtcagcccaacggctgggattatgtgcgcgaattctgcaagcagctgcccaacggctgcgtgaacagctcctccgccgtgtacaagggagtggctgacggcgaatacgccgtgggcctgaccttcgagcagggcgccgccacctatgtatcccagggcaacatcaaggtcgtttacatggaagagggcgttatcatccgcggcgacggcgtctatatcgtcaaggattgccccaacctggacagcgcccgcaagtttgtggactggctcaccagctatgacgcccagacctacatgaacgagacccagttccgccgcaccatccgcaccgacgtgcccgagaccgacgccatgcagagcatgtccaccatcaacgtgatcacggatgatgaaaccatcgcttcggaaaacaagaccgcctggatcgggcagttccaggaggccctggtggacgccgccgagtaatcctttccacgcttttcaagctgctgtgaatgctgccgggcggcaggccctacccctgccgccccttcacaacagcttctttcattatcataaagaggtgtgcaacgtatgagcgtatccattgccattgaccacgttgtcaaaaagttcggtgataacgtcatcattcccgatttgaccgccaacatcaaaaacggcgagctcttcacgctgctgggcccctccggctgcggcaaaactacgctgctgcgcatgattgcgggctttaactccatcgaaggcggcaccattgcctttggcgatcaggtcatcaacgacctgcccgcctacaagcgcaacatcggcatggtgttccaaagctatgccatcttcccccatctgaccgtgcgcaggaatgtcgaatacggcctccggctgcgcaacgtgcccaaggacgaaatgaaaaagcgcaccgatgaaatgctctccctggtgcatatcgacgaataccaggaccgcctgcccgagcgcctttccggcggccagcagcagcgcgtggcgctggcccgtgccatcgtcatccacccgcaggtgctgctcatggatgaaccgctgtccaatctggatgccaagctccgcatcgaaatgcgcagtgtgatccacgacattcagcgccaggtgggcatcaccaccgtttacgtaacgcacgaccaggaggaggcgctggccatctccgaccgcatcgcggtgatgaacaagggcgtcattcagcaaatcggcacgccgcatcacatctacagccgtccggccaatgtgtttgtcgccactttcatcggtcattccaacctgttccatgccacgctttccaagaaggatggccggaccgagctgtgcttccccagcggataccgcctgcccatgaccaccctgtccgacgagtgcacggacggtcaggaggtcgtggtggggattcgtccggaagaattctccgtctccagcgaggggcttacatgtgacgtgctcaaccgcaccttcctgggccgttacagcaactatttcctgcatttcgccgacggcatgtgcgtgcccgaccagcccagcattgaattttcccaggatcttggccatacgcaaacgctgtatcagccgggcgaccacctcaccctccgccccaatcccgataagatcaacgtctttacggcggatatggaaaagagccttctcaaggatgtgattcgctatgagcaagcgtaagccgcagttcgatttctggacgattgtaaccatcggcattctggccgtctttgccctgtttctgatctacccgctcatctccctgtttgtcgacggctttctggaggaaggcaccggcgccttcaccatggccaacttcaccaagttcttcggcaagaaattctactaccgttcgctgctcaactctctgaaactcacggtatgcgtcaccatctgctcgctgctcatcggcgtgccgctggcctacatcatgtcctttttcaaaatccggggcaagagcatcattgaaatcctcatcatcatctccatgatgagccccaacttcatcggcgcctattcgtggattctgctgcttggccgcagcggcgtggtcacccagttcctttccaataccttcggcatcaaaatgccatccatctacggctttggcggcatgctgctggtctttacgctcaagctgtaccccttcatctacatgtatgtgagcggcgcgctcaaaaaggtggatgtggccgtgtgcgaggcggccgaaagcctgggctgcaacgccatccgcaaggtattcaccgtggtgatgcccctggtcacgcccacggccatcgcctcagcgctgctggtgttcatgaactgcatggcggacttcggcaccccggccctcattggcgagggatacgacgtgctgcccaccaaaatctatatcgagtttgtaggcgaatccggcggctcggcctacttcgcctcggccatggcttcgctgatggtggtgatcacggcggtgctgttccttttgcagaagtggtacgtgaacaagaagagcttcaccatgagcgccatgcgccccattcagcccacgcgcgcaaagggcgccaagaacgtcatcatgcatgtgttcacctacctcctggtgattctttccgtggtgccgcacctggtcatcatctggacctccctgcgcaaaacgaaggtacagtacttcgtggacggctactcctttgaaagctacaccaagatttttgacacggcattgtcctcgattcaaaatacttacttgtattgcatcattgccttggctataattattgtgctcggcatgctgatcgcctacctgtcggtgcgcaaaaaaagcatgctcaccagtgcgattgataccatcgccatgttcccctacatcattcccggctcggtgcttggtattacgctgcttttggccttcaacggcaagggtgaccccatggtgctttccggcacggcagccatcatgattatctccctggtgattcgccgtctggcctacacgctgcgttccagctctgccattctctatcagatcagccccagcgtagaggaggccgccatctctctgggcgattcgccgctgaaagcctttgtgaaggtaacggccaagctgatgctgcccggcgtaatttccggcgccatcctgagctggatcacgcttatcaacgagctgagctcctcggtcatgctctacacggcaaacacgcgcaccatgtccgtggccatctacaacgaggttatccgcgccagctatggcacggccgccgcgctggccaccatccttacgctgacgacggtgctgtcgctgttcctgtttttcaagatcagcggaagcaaggatgtcaccatgtagtttcccatttatcccaagcgaggcgtacgcatgaagaaaaccgggcaacagacccgcttccgtgatgatctgcgcaggctgttgttgttttattccctgctgccggtgttgtccgcggtgctgctgttgattgtgttcctggggtatattccgctccagaatgtggtccacggcacggcggacaacctgcagctcgcctgggatgcctttggccaggaatggcaaagcctgcaaaatgagctgctctccctgcaaagccagctggacctggacgcattccgttcaagcgtcaattaccaggcggctgtgaaaagccgtatctatcagttcatcaaccagggggtatcgcggccgcagttctttcttctggacgctgatgaaaacctggtcttttcctcacagacaaacgaagcaatgcgcgaaagcctgcaaaacagcttccattggcggctggtcaacaacctgcccgcctcggccggaaaagtggccatggtggtggcgcgtgcggaggtcggcgtgagcaccgtttccagcatgctggtcggctgctgcctgtatgatgagaaaggcggggtaggcggctatctctactttgctctggacgaggatcaaatggcggcgcaattcaagcaatgcgcctccgacctgattgtaaccgaccggttcgattccgtatttctgggcacaaacagcgctttcgtgggtgatttcggcaagctgcgcgttatgcttcgcgacgccaacggcttcaccatgcttcccgaaggcctgttctacattcgcacccttaccacgcaaaacggctttctcaaaattcacgccatgtcggaatgcggcggcatcatcagcacgctgctgttgctgggcgcgctggtgctggtgtttttcggtgtattcacggcggtgatcctcgtaagcaccgagcgcgtctcccgccagaaaacccgcatcatcgacgaaattgccgccgcctgctatcaggttcagcagggagacctaaacaccgagctgagcatcagcagccacgacgaattccaaatcatctcccaggcctacaacagcatgctcaaaagcatgcgggagctgatccgccgcagcgtagaccttggccatgaaaccgcggtatccaaaatcaagcagctggaaagccagtttcacccgcactttctgttcaatacgcttgagaatatccgcttcatgatccgcattgaccccaaggccgccgacaaagccatggtggcgctttccagcctgttgcgctacagcattcaaagcgaaggcatgataacccctctgcgcgaggatttgaactacatccgcagctatatgcgcattctggaaatgcgctttggcgatcgcctcagctaccagatcgacgtaccttcccagctggaggacttccctgtgcccaagctgatcgcccagcccatcattgaaaatgccgccgtctacggcatgaagcgcagcgaccgcctgttcattggcctgtctgcctgctgcgaaggggatgaggtagtgctgcgggtaaccgataatgggcctggcattgagcccgatatgctccatcagttgaaacagtgcctggccgatgccggtgccgaacgcggcgaccactttggcatcatgaacgtgcatgagcgcattcggctgatctatggggaccgctatggcatttccattgattcacaggtgggcaggggcacgacggtcctgctccactttccccaggatggcggtaggaaaggagatctgttgtgattctgcgtgtgttcatcgtcgaggatgaggagatgatccgcaagggattggtgcataccatcaactgggccggcatgggctgcctggtggtgggcagcgctgccgatgggcgcagcggccttagcagcatattgcagaagcggccggatgtggtcatcaccgatatccgcatgccggagatggatggcctcgaaatgctggaacgcgcattggccgtgtattcctttcgcatcatcctgctgacgagctacgctgattttgactatgcgcgccgggcgatttccctgcgcgcgtgcgattacctgctcaagcccctggacgaggagaagctggcctctttaatgagccgcattcattccgaggaggaaaccgccaaacagatgcgccgcctgatgccgctgctcaacagcacatgcaagtccgcctcgctggtcatggaagaaatccgcgagcaggacgcctatgtggatgtggccctggaacgcattgccacgcacagcgagcagcgcctgcgcattgaaaccctcgcggaagagatgggggtatccgccagctatctgagccggcgctttaaagcggtcaccggccagacctttttggacacgttgaacatgcagcgcgtacagcaggccgtcgggctgctgcacgagggagcgcgcacgtccgaagtggccgaaaagaccgggttcaccgattacaaacacttctgctccgttttcaaacgctgcaccggccttacgccgcgggaatacctgcgcggcagcacggcacactccggcgcggcggcagacgataatcagaaaggatgattctccatgaccaaagcacagattgcctccatgatcgaccacacgctgctcaaggccgccgccaccccccagcagatcaccgagctgtgtgaaacggccaaagcccttcacaccgccagcgtatgcgtcaacccctgccatgtagcgctggcggcacagctgctcaagggcagcggcgtaaatgtatgcacggtcatcggctttcctttgggagccaacaccaccgccgtcaaggcctttgaaaccagggacgccatcgccaatggcgcggacgaagtggatatggtcatcaacatcggcgcgctgaaaagcggcgatctggccctgttggaaagcgatattcgcggtgtcgtggaagctgctgccggtacgctggtaaaggtcattatcgaatgctgctacctgaccgatgaggagaaggtgctcgcctgcaaggcttgcgtcaatgcaggcgccgactacgtcaaaaccagcaccggctttggtaccggcggcgcaaccgtgccggacgtccgcctgatgaaggcctccatccccgataccatgaaggtcaaggcctccggcggcatgcacagctggcaggaggccgtagacatggtggaggccggcgcgagccgtctggggaccagctctacgctggccattctggaaggcgccccggcttaacctgcggattccaaccgcatgcacacgaaaagcgcccggacagcgcaacagcgtccgggcgctttttaagcgccgcctgtaggtttgtcaaacatattggacagggaaggaggagagaacctctctgggagc

SEQ ID NO: 3669 - DNA, 11722 bp, Unknown
  16S sequences of unknown bacteria
aggcgcctgcttcctggatcaggcgcggagcctgcagataactgtcttgcccgaagatcacctgggtcggggcatgatattgaaaatggatcatcgcctcacagctcctctagttcgttcatccacagggcgaaggaagcgtcgctgggcatgcgccagtcgccgcggggagacaggcagaccgaaccgaccttgacgccgtccggcatgcagttgcgcttgaactgctgcgtgaagaaacggcggtagaatgtcttcagcgtgctgaggatgagcgatggatcacggtcgctgaacgcgatcttggccagggcgtagatcttgcgcggagcgaaatgattgcgcagcaggtgatagaggaagaaatcgtgcagatcgtaagagccgatggtctcttctgttttctgtgcgatcacgccttcgctggtcggcggaagcagttccggagagaccggcgtatcacaaatatccagcaaggtatccgccagcgccgtgtttccttgttcgcgctgttcctgtgcgtagctttccaccatgtagcggacgagcgtcttcgggatggaggcgttgacggcatacatcgacatatgatcgccgttgtatgtgcaccagcccagcgccagctcgctgaggtcgccggtgcccaggacgatcgcatcgtgctggttggccaggtccatcaggatctgggtgcgctcccgcgcctgtgcgttttcataggtgatgtcatggacgttcgcatcgtggcggatgtcctggaaatgctggctgaccgcatcatggatcggcacctccatgctggtgacgtgaaacaggtccatcagcgaagtggaattggtgtgggtgcgggtcgtcgtgccgaagcccggcatcgtgacagcgatgatgttttccgggggcaggccgttcatccggaacgcctcggccgcgatgatgagcgccagggtggagtctaatccgccgctgatgcccagcaccaggtggctgcaatggatcttgcgcaggcgctgagccagtccggatgcctggatggcgcgaatctcatgacagcggtggctgcggtcagcgctgtctgcgggaacgaagggatgcgaagagatcgagcggaccaggttcagcgtaccctgtgcaggggcgctgctggaaatgcgcacgcgtacgggatcgttatgcaggggagaacgcatggccgtgttgagccggatgcggtcttgttcacagcgttccagatcgatctctccatacaggatctccgtttcgtcatcgaatgctgcttcgctgatcacgctgccgcattccgcgatgatccgatgtccgctgaagaccaggtcgctggtgctttcgtccttgcctgcgctgcaatagatgtaaccgaaattgcagcgtgcgctctgtgcgcgcaccagattgcgccggtagcgctctttgccgatggtctcattggatgcggagagattgacgatgacattggcgcctgagagggcatgcagggagctgggcgggatcggcacccagaggtcctcgcacacatcgatgccgatcactgcgccgctggtatcgtcctggatcagcagcctggaggtgaacgggatcgtctttccgttcagctcgatcgtctcctcgctcagctcgaagctgtcggagaaccagcgcttttcgtaaaattcgttgtagttgggcagataagacttgacctggatgccgatgatctcgtgattgaagatcacggccgcgcagttgtagagccgtccgttttgccgcagcgggacgccgacgacgcagatcaggttttctctgatcgatgtgcaaagggtctgcagcgccttttcgcaggcgtcgagcagcagtgattcaaagaagaggtcgccgcacgtatacccgcagatgctcagctcgggaaatacgatcagctgtgtatccggcgcgcagctgttcgcgatccgttcgatctgcgcggcattggcgctgacatcgccgatgcatagcggcatgagggccgcagcgacatgataatagccataatttaacatgatgatctcaccttcctgtccattagtatagcagactttgcggcaaaacacaccgctgttttgcctggacgaaaaaaggacaccgaagtgtccctgatcgtttttatccgtgctcggtcagcaggttgaggttgtcactgtagtcagattcgctggagatctgcttgtcagcttccttgacatacttcttgacgagcgtgcttgacttcatgaccggctgcagcgttcccgctccggcaacgcatcctcccgggcatgccatgccttcgagcagataaccgttgagccgacctgccttggccatcatcagcatcgtcttgcagttcttgagcccttcggcagcctggaccttgacttccatgtccggatgatccttgaggatctgattcttgacggcttctgcgactcctccgctgactgcgaatccgcgtccggatccggttccttccgtcagcggctcgctgacgctgatctgttcgaggtttacccctttggccacgaacatgcccatcacttcttcgaaggtcaggacgaaatcgacgtcggaacgaatgcttcggcggctggcttccagcttcttggctgcgcacggtccgatgaatacgaccttggcgttaggcttttcctttttgatcagccttccggtcaataccatcggcgtcagcgccatggagatgtacggcttgaaatccgggaacagcttctttgccatcacggaccatgccgggcagcaggacgttgccatgaacggctgcttttccggaaccttgttcaggaagtcttctgcttcttcgatggtgcacaggtcagcgccgatggccacttcgaccacgtcggcgaagccgagctctttcaatgcgctcttgaccttgtccggcgttacgctcgggccgaactgtccgacgaatgccggcgcgatggccgcgatgacctcatggccgtccttgatcgcgtggatcgtctggaagatctggcctttgtcgacgatggcgccgaaaggacagttgaccaggcacatgccgcaggatacgcacttgtcatagtcgatctccgcgcagccgtcctcgtcggaatggatcgcatccatgccgcagcttgctgcgcaagggcgctccagcttgttgatggcgtgatacgggcacgcctccatgcagcgtccgcacttgatgcacttgtcctgatcgatctggcttttgccgttcacgatgtggatggcgtccttcgggcagacttccgtacactgatgggaaaggcatccctggcaggtgtctgtcacgacgatcttcttttccgggcaggcgttgcatgcgaacttgatgatgttgatcagcggatcatcataatatttctcggcgatcgcgctttcttcgatcccatcggacagcgtggactgttcctccatgctgcgaagcggaaggccgatgcccaggcgcaggcgctcgccgatgatggcgcgctccagaaagatgctgttgcggtagctcgccttgtgtccgggcaggatcttgtatgggagttcctcgatcttcttggcatagtctcccccttcgtatgccagtctggcgatttcagtgaagacttttctgcggatgtctgtcactgagttatagattcctctcattaaattcacctcagccctattatatctgattttttctcataaaaaaaccgcttttatcaaaaaagaaagggatctcgtatccggtttcaatggttaagtgtccatatcatttttcggatgcctcatagtctgaagcagagatgagaaatctcggaaagggaggaatcagagatgaactgtaacagaaacaactgcggatgcgcatcccgcggacagcatatccgcatcaaccagtgcacgagcaccagcatgagcggaggaccgtgctgctgccgcccgcagcagtgctgccagtgctgcagaagatgctgctgcaatcacgactcttcgtgccagcagatcgattatggctgcctgcgccgcgctgagcgtgattttgaacgccgcgtggccagatgcctgggcgtgagcccgtttgcggcagatgaggagtacaacgaggataacggccgcttcggccgctaccgcagcacattcggcgataacgaagacaaacagtagtctgatggcgcatgaccgggcgtatgcatttcccggtctttttcttgcactttttgcggctatcctctacaatgtgttgtcagaggtgagaagatggaagacatcacgaccatagtgtgggactggaacggcacattgctggacgatgtagagctgtgcatgacgtccatcaaccgcctgctgcaggagcatcacctgccgcagctggaccatgagcattatcagcgtgtgtttcagtttcccatcatcgaatattaccgcaaggccggatttgattttgaacaagagtcatttgagtcgcttgcgcatcgctatatgcggtattatcagccgcgcagcctgaactgcagcctgtatgcgcacgcgcaggatgtgctgcgcagctttcaggaaaaaggcaagcggcaggtgctgctgagcgcttcacggctggattatctgcatgatcagctttcgcgttatccgatcgcgccctttttcgaggaggtgtttggcatccatgatgtctatgcccgctcaaaggaaagcctggcgcagcgtttcatcgcgcacagcgggatcgatccgcagggtgtcgtgttcgccggggacagcgtgcatgattatgaagtggcgagcgcggcgggctgccgctgcgtgctgatcgccaacggacatgagcacaaagacaagctgaagcaatgcggctgcccggtcgtggatgacatcagcgcgtttgcttcactgttctgagcgtttctgccagaaggcgcggatcagcgtttccaggcgcaggttgtcacggacgcagagagcatggcggtaatgcggcggaaacagcgagcgatagagcggcgtgagatagcggtcatcgatcaggacgatgatgccgctgtctttttttgtgcggatgaccctgcccatggcctgcagcactttgttcatgccgggaaacgtataggcgaagtgatatccgggcttgccttgcgcgtcgaagtgctctttcacaaagccgatgatgatcgtgccgatgagccgctcgccgctgaaatcgatgccttcggcaaacatgccgcccagcacgcagaaatgcagctgcatctcaccgaaggtctcgaaccgctccaagaatgcctgacgctcttgcggcgtcatcgccgcgccctgcacatgcagcgggatggcgggataatgtctgcggaacagctcggcgcaagtctccatgtagcggaagctgggaaagaagacgatgtagttgccgggcttggggatcacgctgtgatagatagcgttcacgatctgcaaggcgctagctgcgcggtgctgccagcgggtggaaatgccttcgtggatgatcagggcatactgatccgtgctgaagatggagggcagggcgatgcgctttgccttttcctgttcgccaagcagcgtggcataatacagcgagggcgagagcgtcgcgctgaaatagacggcggccttgccgcaggagaggcgctcctggatgcgggcagccggattcaggcaatacaggcggaggtggaagccgcgtgcggcgtcattttcataccaggtgatgaaatcatcgtcatacagctcgaagatcctgcggcagctcaccaggtggaagtagatctccaggatggcgtcgcgatgctcttcctgcgaatgggtctgcagccacaggtcgcattcgtcgatgagccggttgagctgcaggctgaggtcatccatgggcgctttgcgagagtgcaaggcgccttcgcattcatcgctcagccgtttcaaggcgcgatcgagcggacgaagcgccgcgcggagcgcatctgcgtctgtcttgatcagcctgcgcagttcgcaaagctcctcttgccacaggtcggcgctgtacatctcgcgggcgcggtccaccagattgtgcgcttcatcgatcaggaagacatagctgcccttttcttcgaagaaccgcctgagatagacggctgggtcaaagacataattatagtcgcagacgatcaatgaggcgtacagggaagcgtccagcgagagctcgaagggacaaagcgacgcctcttctccatagcgggaaaaggtgtcggcgtcaagctcctggcattctgtgagcaggcggtaaagcacagggcgcacccgcccgtaatagttgtccgcatacgggcattcatcgcagcgtctctcctccatcggacagatcttgtctttggccgtgaggaagaccgtcttcagggaaagatcctgcgcatagaacagacgcatcgtgtcccgggcgacggcagcggtcatgttcttcgcgcatagatagaagatcttctcgcattttccttctcccagcgccttgagggcgggaaacaaggtcgagatggtcttgccgatgcctgtgggcgcctgcacgatgagggaggacgcattgatgatcgtctgatagacccaggccgcgaattcccgctggtggtcccgatagctgggaaaggggaactgcagcgcctttgtgctcgttctggcgctgatgtgcagatcacggcgcaggacggcccatctgcggtagttgtccaacagctgggcatagaacgcatccagctcgctgcgggacagcgtgcgctcaaagtgtttttcctgtccgctcttggcctggacataggtcacgcgggtgacgatctcttcctgctcagggtgctgaagcagacagaaatgggcatagacatagcactgggcaaaatggacgaagatgctgtcgtcgatctgttcgacaggcagcagggtggatttgatctcttccaccaggatccctccatcagtgatctcgatgccgtcggcacgtccttcgacgatgatcgtgatgtcgtccagcacgctttcatggcggaagaacacttcgctttgatagtcctttcctcgctggccctgcagcatgcggtggatgcgggcgcccagctgtgcgcgctgggcgctcatcccctgtgaagtcaggcttccttgcagatagctggtctccaccagctcgtggaccgagatccggcatgtgtacatgagctcatctcctcgcgttcttcattcaagtgtaacataatctgcttcattatgttatactaaacccggtgagaacatgaaggaaatcatcattgcgaaaaatgacgccgggcagcgggtcgaccgttttctgatgaaggcgtttcccgccctgcccagaagctatctgtataaggcggtgcgcagcaagaagatcaaggtgaaccgcaagcgctgtgagatcgctcagcggctgcaggagggagatcatgtgctgctgttcatcgatccgcggttcctgcaggacgagaaaaaggaacatgacttcctgcaggcgcctgcctctctcgatgtggtctatgaggatgagcatatcctggtgatcgacaagccgcagggactgcgctcacagcgtgatgaacaagggccgcaggactgcgcggtcagccgcatcctccattatctgtatgtgcgcggggaatatgatcctgatcaggagcagagctttgtcccggcgctgtgcaaccggcttgaccgcaatacgagagggctgctcatcgctggcaagcatgcccgtgcgctgcgcgacatgaatgccgccatccgcgcccatgaggtccataaatattacctggcgttatgcgagggcagggtctctccgccggaagggacgatcacgctgcgccatcgcaaggaagggatgaaggcagtgctgagcgaagatgagggaaaggactgcgcgctttcttaccgcctgctgcgtgcggacgacgcctgctcgctggtgatggtagagctgcacagcggacgtttccatcagatccgggcatcttttgcgcacatccatcatccgctgatcggcgatgtcaaatatggcgcgcgccggcagagcgggcatcaggccttatgcgcctttcgtctgtcgttttccctggatccggcgaattcgctttcttatctgaatacgcgtgtcatcgagcttcccaaagagaagctgcccaagcagatgcgcacgcttttgcaagacaggcatggctgagcatgtctgttttttttatcgacagcatgtgcgaagcgataggcgtaacatcagggtgaggtgaggtcatgaagatcatatggatcatgctgatgctgatcagtgcgtccatctccgcgtcgctgcgggaatatgcgcctttgcaagatgccatggtcgatcgtcaggacggggtgacgatcacgcagaaagtcactgctcaggatgacggcactttgcgcatccggctgcagatcgatatggaagaggagatcgccgccttgcaggcagaggccggcaagcacagcctgcaggaggtgcagccggtcgatccgatcgcgataggccggcgggaaagcgtgaatcggctgtccagcgggctgtggcagctgcatatcccgatgtgcgcgggggcgtatgtggtcgaggcggatactgcgctgcaggtgtcgagcgcgcgcgatgaggtctgctttgatgtcagcgcatggatgagcggagagaagacgctgccggcgcaagcggaatactgcatccggctgcagggagatccggcctatcgctctgagtcagggcacatctttcagatgcagagccggtttgcctatgtcatctcgctgcaaaaggagcttccgctcgtgaagcggatgtatgtcagcgcgccgaaagtgcgcatggtgcagtcatgagcaggggagcttgggcatagagtatcactgaggtcgataacatgaaaaagaaactgctgagtgcgctgctgagcgcggtgatggtgatgatgccgttgggcgttcatgccggagaaagcgagaccatcagccaggatgcggcagagctcgccccgagcgctcaggcagtatgcctgatcgaggcttcctccggcagacagctgtatgcccgtcaggaaaacaagcgcatgtatcccgcgtcgatgacgaagatgatggggctgctgctcatctatgaggaactgcattccggcgcattgaagctcagcgatcaagtcagcgccagcgcagaggcagcgggcatgggcggctctcagatctacctgaaagagggcgagacgatgagcgtggaggatctgctcaagagcatctgcatcgcttcggccaatgatgcgatggtcgccatggcagagcagatcagcggcacgcaggaagccttcgtcgagcggatgaacgaaaaggcgcaggagctgaagctgagcaacacgcatttcaccaatgccagcggcctgcacgatccgcagcattacagctgcgcgagcgatatggcgtgcatcgcgtcggcgctgctgcaggaagggggcgaagagctgctggccatcaccgggacatatgatgcgtatatccgcgaggacagcgcgcagaagttctggctggtcaataccaacaagctcatccggcagatgcaaggggcagacgggctgaagaccggctataccgatcaggccggctcctgcattacggcgacggcatgccgcaattcgctgcggctgatcgctgtggtgatgcatgaaccagacagcgccacgcgcaatcaggagacgatccagctgctggagtatggattttcccgttatgaacaaaagcagctgtatgcggcgggcgatgaggtggatacgctgaccatcgaaaagggcgatccttcccgcgtggggctgatcgccagagaggacgcctatttcatgtatgagaagggaaaagagagcaaggtgagctccacgaagatcgagctggtcaagaaggagctgccttatgatccgaaagacaccgtcgccagggcgcatgtgaagatgagcgacggctatacgttcacggtcgatctgggcgtgaaggaggcggtgcggccgatgagctttttgcagctgtggatccgcgcgctgcgcgaaatgttcgcttaggcggacattttttgtcatctggcgtcgaacggttttgctggcgcatcctgacaacttttgtcgcatttttcccatgccgcacagcgctgtggtaaagtggggacggagggatgaaatgaaacaccagtatcaggatgggacgctctgcctctattttgagggagagttcgacaacctgagcgtcatgaagctgaaagagcccagcatccgcctcatcgagcagtatcgtccccgggtgctgaagctggactttgagaaggtgagcttcgtggacagtaccggcatcggctatgtgctggcccgttataagcagatgaagaaggcaggcggagagacgatcgtatgcaatttgtcccggctcaacaagacgatctttgagatgtcgggcattttccggatcatccgctatgaaagaaatgagggaagacgatgaatgagatgaagctcgtgttcaagagcaagctggtcaacgaagtgttcgcccgcaccagcgtggtggccttcctcgccccgctgcatttgggcatggaaatgctgatggagatcaagacgatcgtggcggaagcggtcgtgaacgccatgatccacgggtatggcggcgatgaagacggggatatctatctggaggtctgctgtgatgaggaaatcgtgatcctcgacatttacgatcaaggctgcggcatcgaagacatcgatctggccatgcagccattatatacgagcagagaagatctggaacgcagcgggatgggatttacgatcatgcagagctttgcggatgtctttcacatcgagtccaggccgggcgtaggcacgagcctgcacatcgagaagaagctgcagtgaatttcagcgagctgagcaacgaagagctgatcgaggcaattcagcatggctctgatgaagctaaggatgtttttgtggagcgcaatcagccccttgtctatgccatggcaaggcggttttcttccagccgtatcccgtttgaggagctcgttcagatcggctgtgtcgggctgatgaaggcgctgaatcattttgacctgagctatcatgtcaagttttcgacttatgcggtgccgatgatcctgggcgagatgaagcgcttcttccgggatgacggcagcatgcgcatctcccgcagcatgaaggagaactatctgcagatgctgaagatccgcgatgagctgcagcagcgtctgggccgggaggtgcattatgaggagatcgccgcagaaggcggtttcgacctctctgaggtcatcctcgcctttgaggccaatcagtttaccttgtcgttcgatgaggtcatctatgagaatgacggctctcctatcgtgctgcaggacaaggtggccgatccgcgcgcgcaggatgtcgccatgcatgtgtcgctgatgcgggaggtgaagcggctaccgcagcgggatcagctgctgctgcactatcgttatgatctgggcatgaagcaggaggatatcgccgccaggctgcagatctcacaggtgcaggtgtccaggctggagcgccggatctgttactattcacagtcagccaaaacctgtcaagtggaaaactaaagaaattgtttttgtttgaaggcgaatcaaagactttctggccgatgtgatctgtctggttgt

SEQ ID NO: 3670 - DNA, 14719 bp, Unknown
  16S sequences of unknown bacteria
attacttttccttctattaataacgttcctttcttgagtatataggttgccatattgtcgcttgtccaaaactgcggtgtatagcacaacatacccatatcgacgcgattaccgccacttgcgcaagattcaaacaaaatattaggaaagcgttccgttaatgtttgcaatatagaatacaaaccgagcatatatctgtaagaaaattctttctgccttccgataagagtcggagaataacattcggtaacattacggttgcaatcccattttacataggcaatatttgtcgatgtaaacactcttgtcatcgagtcaataatatatttgcggacttcttcgttacataaatccaacacatattgactgcaatgcagtagcggcgtatagttcggattggcaacaacccaatcagggtgcgcgcgatataaatcgctatcgggattaaccatttcgggttctacccaaataccgaaatcaagtccgatcgcattcagttttttgcaaaggccgtcaagaccttcgggtaatctgtcacgattctcataccaatcgcccaatcctttcgtattatcggtacgtttgccgaaccaaccatcgtcaagcacaaacaattcagcgccgagagcctttgctcgctttgctattctcaatactatttcttccgaaatatcaaatcttgttgcttcccaattgttgcatatgatcgggcgaacgcggtttctccaatacccgcggacaatgtgattattgataaaagaatgatattgacaagtcaacccgtttgttcctaagtcactgaaacaaaccgtcgattcgggcgtatagaaagtttcgcccgcgccgagtatccacgaaaatccgacgtcgtttattccgtttattattctgactttgccaaataaacttttatcaagatacgttgcgtgattacctgaataaatcaaattaaaaccgtaacaatttccgttagaataaccgcaatcgggcttttttaatacgacgtatgggttacgttccgcagaagaaaagccgtagttgctgtcaatttttgtaacgccgcccgcaagtttagtcgtgttaatctgtctttcttttgcccaataaccgttaagcgtgtccactaaaaagtcatcgccgcaaacatcgagctgagccgaagcgagccgttcgattacgacttcactatccccttcgtttgtaagcgcggcgctttttacaattacgtcgctcccatccgttaaggaataatacaaccgcacagcgagtcttttcgctttatcgcgcaaggttatcatcaacgtttcggttttaccgtcgctttgcggcaagtcgggaatatgaaagttttctatcttctcaactttttcaaacagaaattcgtttacggaatctccgtcgcagttgacaagaatcgacggttcacgaaaatctccgcgccctcgtgtcgaatattcaagagattttgaatcgggatacatatcaacaaaaatctttttacaatccgcaacatatcggaaataagcgacgctatatttgtttcaaaaaactattttttagcttttttcaaacagaatatgaatatctcacctaaaaaatacattattgaaaagcggttggtttacgcccacgatatgcttttgtcaggtcaaaaaccgatggaaatatatgaaaaagtcgggtttgaaacatattcttctttctaccgcgcatatattgcaaaattcggaaaaaatccgtcatcggcagagagatagaatttttttcaattttagttaaatcaaaaacattttgcatttgaaaagaatcaacaaaatttcaattagaaaaagtcttttgaaaaatcaagggttcaaatccccttttttgaaaaaagtgctgaaatgcagctgttaaatacaaacatttcgcaaaatgcgcaaaccacaaaatatagtaacaaaaaagcacaagacctacaaaatcttgtgcttttttgttatgtagctttttcgtactacaaagatggtggacaggggtggattcgaaccaccgaagtcgaagacgtcagatttacagtctgatccatttggccgctctggaacctgtccgtttattatggtgtagcgcgcaagctgtggagccggtgattggactcgaacccacaacctgctgattacaaatcagctgctctgccaattgagctacaccggcgtgtggtgccttgaggtggaatcgaaccatcgacagaaggattttcagtcctttgctctaccaactgagctatcaaggcaaatggcgacccaaacgaggctcgaactcgtgacctccagcgtgacaggctggcgctctaaccaaactgagctattgggccataaaacgcgcacttcaaagaacgcttgattattataatctattttttcatattcgtcaagtatttttcggctttttttcaggcaaaacacaaatttttttcaggttttttcaaaaatatttctctaataaattttccaatgtcggctgttcgtattccagccaatagacgctgccgtccttctccctatcgagaaatttgtaatcgtacagctcgcgccgcaaagttgccggatcgtcgaacgtgtgccacgctttcaatacttcgtttacctctttttcggtatattttttatctcgttcaaatttttccgccagatagcaaagcgcgtaaatcttcgtttttctttttgcgggaaacgccgtgagtctgccgcgttcatccaaaaaattttttaaagccgtcttttccatgtgctttcctccgttaaaatcctcattcgtcaaagccctgccccgctcgtttttattatgatgcaaaagactccacttccattcgcctttcagaataattcgtcgagtaaaatgtaatatctgactttttcccaatcgggacaaatccctagttcgtcgaaaagccaagcggcatcggcgtattcgatcggtttcccgccgtatctgcccgcgaaattacttttcagacttctgtaacataaagcgatgtcctgatatctatccgcaacgccgcttcttcccagatcgagaaatccctcgattctttcttcccgcacgaaaatattgggcagacagcagtccccgtgagaaaaaacgagttcttctgcgggtttattttctttcagccacgccagcaattctgccggccccgcgaatcccttttcgccgtatgttccctcttcggtattttcgacgtcgcaaagattttttgtcactcgcgcctcggctcttttcaatttatttatcaaagaattgtcgtaaggacaagcggaaatatccactcgccacagcatttccaaaccttccgccatccattttatcaacttcttcggctctctcaaaaattcttccgcgcacgccatccgcccgccgaatctactcataagcagatactctacgccgttctctttttcctcgcagagaatttgcggcacgggaagcttgtcccgcagccatttcatcatgcgggattcgctgtccgattcctcgctctccttctgtatttttaaaacgcaatctttgaatagaatcacttgcgaatcggacatacccacggtatcggcgacatacgttttccctttgatcatccttcggattttttcgggcatatataagtctttcattccgccacctttgaaaacaaggcttttaaaaaaccccgcttattttttatatagctttgcaagaccgccttccgccgtttcccgatagcagcgggaaatatcctttcccgtttcatacatggtctgtatgactaaatcgaaagaaatcttccggctgtcggaaagaaaatcggcgagcgaaaccgcgttcatggcgcgcatcgccgccacggcgttcctttcgatgcaggggatctgcaccaaacctccgatcgggtcgcaggtcagtcccaaatggtgttccatcgcgatttccgccgcgtattcgatctgtcccagttccatttcatagagctcgccgagcgcggcagccgccatacagcaggcgctgcctatttccgcctgacagccgcactccgcgcccgaaatggaagcgttcgtcttgataagattgcccacgagccctcccgccgccaaggcgcggacgatatcctcgtccgaatacctgcggcgttcctgagcatatctgagcacggcgggcaaaacgccgctggcgccgcaggtgggagccgtcacgatcgtttccgccgccgcgttctgttcgctgacggcaaacgcataggcgcataccaaccgattttctttcgtttcggcgctttcgtcgatatgtttttgccgatacagtatccgcgctttgcgctccacattcaagccgcccggcagaatgccctgcgctttcagaccttccgcgatggaggttttcatcgttctccacacttcaaagagatactcgcgtattccctccccttcgcattcgaacacataatcggaaaggcgaagagaattttcctcgcaatagcttctgatttccgaaaaattttgcagcggatatacctccgcgtcctcttctcccacacgcccctctatgcggacagcgccgccgccgacgctgtatacgcgaaaaaacgcccgccgtccgccttcccgataggcgtagagatccatcgtattgggatgcggcacttccgcgtccgtatcgcaaatcacgtccacgtttttgagaacgctctttatcacgcggtccgtaccgtgaccgatccccgttttcgccaaggaaccgtataagattgctttaaaggaatccgcctcgggattttcggacgcgaaaagcttacaggcgcgttccggtccgatagtatgggaagaggaaggtcccttcccgattcgatacaattcttttaacgatttcatctttttagtatttgatctcatacctgctggcacccgattcgttaaaatcgacaagcccctgcacgctgttttcaatcatgctgtccatgctcagctgcgtatagaacgccatgtgctgcgtcagcactacgttggggaactgtcttaaatacgccatgtcgcggttccgtacgatatcgtcggtgagatcgacatgataaatcccgtcctccccttcgaatacgtccatagcgagagagccgattttacacgattcgattccctctatcagcgcttccgtttcaaacagttcgccgcgggcggtattgatgaggatcacgccctttttcagttttttcagcgagtccctgtttatcatgtgctttgtcgcaggcagcaaaggcagatgaaaggtgatgatgtcgctttcggcatagagggtatccaaatcggcaaattccgcagactgcgccactttcggatcgtaatccaccgaataaaataaaatccgacagccaaagcccgacaacaactcgatcactcgtccgccgatatgccccgttcccacgactcccaccgtcttatcccgaagaatatcgcctttaagatagtcgagcgcatagtcgttgacctgttgcagccaaagcgcctgtttatatttgcgcaaagacatcaacatcagcataagggtaaattccgccaccgaatcaggcggatattgagaattacagagccggaatccgtattttttagccgcttttaagtcgatatgattgtatccgatactgcgcgtagacaaatacctgatcccgtatccgtgtaaagtgcgcaaaagttcttcgtcgacggcgcattttcccaatacggatacgcccgcgcttcccttacacagagccgcgttgtccatagaaaggacgtcgttcgtcgcaacgcattcaaagccgtatttttgcgtgagttcgtttaacttggggcgttcgtcctcccaaagtccgtaaaaagtcagtttcatgaaacactcctcggcaatacttatctgcgtcatttatcatagcgtcgctgacgctatattcggatagctccgaaaatgccgccgcgcgcttttcccttccgcatttttcgtttctattatagcatatccgcttgtttttgtaaaacatcgcttcggtattttcccaaaaaattcccttttcttttctctgttttttatgccgaaaatatgttttttctgtgttttctccgcatactgtatgtaccctgaaatttcgttttgtaatacttttttatgcaatctgtaacatttgtatgaaaagcaattgactttctttatctactctgttatcatagtatatgaaacttcggcgcaaaaagcgttgcgtttttatacaccgttcgcagaatggtatcaataactcgaaggattatggtgaagcggcgccacgccgcaacggaaggagtttttatggctaaaacagctatcgttacagacagcaacagcggtattacgcaaaaggagggcaaggaactgggcattttcgttttgcccatgccttttttgatcgacaacgcctcttatttcgaggatatcgacctcactcaggaagagttttacgtccgtctttcgggcgattccaacgtttccacctcccagcccagcatcggggacgtttccgagctttggagcgacattctcaaaaattacgacgaactcgtgcatatccccatgtcttcgggattgagtcagtcctgcgccacggcgacggcgctcgccaaggatttcggaggaaaggtacacgtcgtcaacaatcagcgcatttccattacgcaaaaagagagcgtattcgacgctttaaaactgttggaaaagggcaaaacgggcagagaaatcaaggagtatctggaaaagacccgcttcgattcctctatctatatctctctcgacaccatgaagtatctcaaaaaaggcggccgagtcacccctgccgccgcggcgatcggatcgattttaaagatcaagcccgtgcttcaaatacaaggcgaaaagttagataaattcgctttggcaagaagcctgacaaaagcgaaagaaacgatgaaaaacgccgttcagaaggatttgcagacgcgattcaggaacttcgcggaaaacggggaaatgacgatctccgtggcgcatacggcgaatgatgaggaagcaaaaattttcgtcgaagagcttaaaggattgtttcccgacattcctttccgtttttccgatccgctttctctgagcgtagcctgtcatatcggtccgggcgcgctcgcggtcgcgtgtacgagagtcataaaataatcccgacaaaggggcgccctctttttaaaaagagggcgcttttcttttgcctatacggaccttttttgtcttcttattcatctccatcccaaactcatttcggctctattccataaatccaaaatttttctctatataagagctatgagaacgggtcggccgcaccgcttttaaccctatattttccgtcccggatcttttttggtacgaagaaagcgttttttcagcgccattctgccccgcccgttttctatggttacaatttcttgctttcgcgggaagaaattttttcgctgttaaaaatgacgcctgccacgaaacagatcatcagcacatacagccacagcataaagacgataatcgcgctcaaagcaccgtacagccttcccatattgcctattttaagatagatcgtaaagccgatcaaggtcaccgcccaggcagccatggtgatcagcgtaccgggcagcaattcccgcagttttgacttgtaaggacagatatagacgtttaaaagaagcacgagagcgaacgaaacgacgatgagaagggaataatccgccgtcacttccagccagcgcggaaagaggcgggagaagataaaggcgccgcccgcaaagatgagaacggaagccgcggcgacgagcatgacggcgaacaaaagcagcaaagctcccagccggacgagaatcccgtgtttttgacggcggtagtcatagatgatttcaccgctcctccgcatatgataaaagagattggtggcggaatagagagtcgtggcgatcagaaaaacagaagcccccgtcgtggctttgttcgcttcgtcgcggatatacagcagaatatttttcaccgattcaaacacgggaagttccagcatactctccgagctgatgttcagtttcccgaaaagaagagtcagccaaaacgcaaggggcgtaatggacatgatcaggaaatagaccagggtccccgcaatcgtcgtatattttttttccgccagtatttgatattgttctttcagccagcggatcgcatttcggatctttttcattgtattattatgcccaacgaaaaagatttttttaccatatttttctatcttgtcctatttttatgtaaaaattgattttgaagacggtgtttagagaatctaagaaaactttgtttcccttccgaaagaaagcgcacctttttaagatattaaaaaagcgctgtgaaacgctttgcaatgccgaaaagagtcgaaaaccgttaaaagtgtagcccctatcccttttagggaaattataagccacaaaaaacggaggcgaatccgtaaagatccgccccctttttcagacaacgtcaattgccgcagccgcaggtattggtcgcactgtaaggatacaatccatactgacgagcataataagaatcgaatccgccgccgtttgcattgacacccgtaaccgccgtattgcacatcgtgcatccgccgcccgttccggtcgtcgcttcggccgcctgagcgccgaacccgccgcaaggcagttcgagataaattctgcccgtgataggtacggcgacccttcttctgcaaccgcagccgcagccacagccgcagccgcagcagcccgaatttgcctgcgccgccgcctgcgcagctaccgcagcgcatctgcacgcgtttgcagccgcattgcgcgcgacacgagccgcgttgcagccgcagttgttgccgcaattgcagcactgacaagaatttccgaaaagagtgttaaaaagaccgccgccgcacgcattagcagtgttataggcgttgcaagtattacaacaagtattgcacataatccaacttcctcttgtgtatttgaggagaaacctcatattgtattatatgccgctttgcgctcttatgttatttttctctcgccgcgtattcctctttcgtcatttccagctttacgatgccgttttcctcctccacgatgcgaaatcccgcctgcaaatggaggtgtaaagctgtttctctcgatttttcgaacgtattgcaaagcgcgggaagggcgtatcttataaaggcggttttcagcaaaagctccaacgcctttttcccatagcccttttcccgcgattctttttcgaccacgacgcccatttcatagaattttccctctttcgtttgatgaaaattgacttcgcctacaaaccgcccgtccgccgcgcggacaatgtacgcataaaagcgcctctcgttcccgatccacgaatcgtaccaagttcgccagcgttctttcggaaaatcgatgcacccgctctctttatcatattctaaatcgcgggattcatatccccgattatacgccatcgtttccgcatccgccaatagttcctgccgataccaaagctcctcgaaacgaggcacgtgcaaaacgatttctacgcgttccgcctcgtttttcctttccgcttccttccatttcttccgatgtcccgcatgaatgccgatatgcccgatgccgagcacggcggcgcccgcaatcatccatacgacttttccgtaaatcccgagaaacagaaacgccgcgacgggaagggtggctcccgccaaggggatacatccgagattcccgtaaaaatcacgcagcctccgttcgcccgaaaaatacttgatccaccatatttcgtaacaaagcatcaaaagaaaagaggcgatcagccaaaggctccaaggcgaccatgcccgcaaattgaaatcggaaaatacgagcgccgcacagcagaccaaaacctctccgatccgttccagagcggcgagaaatttgttctccccatccgcggaatatccttcgggcttgcgctttgtccataaaagattggggataaacagcatcaaaagccatataaacccgacgtaagaaaagccgaaatgtcccatttcatctccttgtgcgaataggggaaagaatatttcgaccgctcaaaaaaagcgatcagttttttgtatataaggtgatgccgagccccgtatccctgacaaagacatcgcgcggcattttgatcacccgaaaggagatatagaaagcgcccaccgcgcttgacacattacacacctgccaaaggtaggcgacccagaaccacgcttcgggcaaaagcagatttaaaaggagaaaaacgactccccaaacgataaaaggcgcccaagtgatgatcagataggaaactttatcgaaaaacgtattttcgctgcccgcatagacgtacagccccgtaaagccgtattttattttctcggctttaaaaatcttcatacagacgcaaatcgccgcgccttgtaaaaacagataagcgatcattccgatgacgagtaccatcagccgcctcagcaaagcgcgcgaaagctcccatcggtaaggtcggcagattacggcgatcacaatcatcgtcacagcgatcacgatagaaaagacgtttaacagaatagataattttttgtccttttgaatatcgatatgcagtttttcagcatatccctccggaagctgcgaatatcctctcatttcaattttccctctctttttctctattttttattttttgcacagcgagtacgtttatatcctcatcgctgtcgtcaagacactcggatagaagttcgtccgtcagcatacgcagtttggacatctttgcgacggcataaaagcgacagcaggaacagcgcgaattttcataaatccacctcaacagctccttaggcggattcttcacgccccctttttcgaacagcgatagaactttgccgaccacggcgtgccaccctttatcctgactgaaagtcaacgtggaaacggcttgaaaaataaactccttatcctccttttcgtagttattgagaatcatgcagatcgccgcgctgcgcatttcctcgtccgttttcgccttgcgatacaactcgaatgcaaattcccgcacggctttgtctttcaattcgtccaggatttcaaaagccgaatcccgcactctctcgctttttgagtccgtcagcgagagaagcggcgcgatgaatttccgatttttttccagggaggaaactcttatccggctcagcagctccgcctgcttttcatcatctttttcctcaaaaaccgccgtcaaagtttgcgttccgtcctcctgctccgcttctaacccggaccattcctttatgtttcggctttcttcttccgacgcggccttctgcctcgcgtactcggcaatgcaggcatcccttttcgcgcgctttttaagctctgcgtcgatatgccgttttccgtaagtccgtttcccgtaccaggaaaaccaatcgaaatcgtcgccgctatacagtttgttttgcaaaaacaagcgcccgagatcgcgcgcgatgcggaaatattcctcctcgcccaaaaatacaaactcgatgcagagagtttcgaacgcgtccctctcgtaaaagataccgcgtcgcggacggcgttttcggtcagacaaagacgcgtataactgctcgtatttttttaaaaggagcgctcgtgcctccgaatttttttccgcagcgaacagacgaagcagcgaggcataatgctgaaaaagccatttcctttgcagatcgcacttttcaaagccctccgcaatcgcggagaagaagggcgcggggtcgtcgaagcaagctattaacttgcggatataatagcatttcgtcccttcgcactgcggatcgtaagaaatcacgtgcgtacacgcccagagcaccgaatccgaatattttgccggattttcagtttccttcaaggccgtcacgcatcggcccagaccgcatagcattgcccgacgaaattcctttttcgtcaattctctctttttcattttcctgttcctttatctttttttcatcttcaaaggtcatccttttttcgccaaagcataactttcgccgatgcgtctaaaaagttcctcgttcggcaccgtcccgtcaagacaaatggtgtaccaatgatttttattcatatgataacccgaaaaatacctttttccgtctacgagtgcggatatttcggagtgaggggctttgagatcgacgatttccgtttctccttcttcgtccaagcccaatttgcattttgatacgctcaaaacggcggcgtaccacttcgcgttgtcctttctccggaacacggcgttttccggtgtcttttcccaaagaaactcgggttcgtccccgtaagcgtcttttacataagcgcagagctcgtttgtctgtgtgtttttgaatagcgttttctcaaaacacttttccgcaacgacgcggaggacctcttcgcacgcctttctgacttttcccacaaaagccccgcacgcgtcgggcaggcgaatcaagacgtattcctcgcccgtttccgtatcacgcacctccgtatcgacctctccgctcttcgatacgtcgatcccgagggtaaactgcccctccaatacgcctgtgcggtacgtatatccctctttactttccgtaaacccgaaatcgagcaaacgcccgatatttgccttacgatttttgaatatctccttaaaacctgccatctttcccgtttctctttcctccgtaagcttcgctttctattttttagtcttgacttcgtatttcatcggagtatagcgaatcccgttcttttctcgttccccggaaagcgcttcaaaccccaggctccgataaaaaggtacgccgtagggcgaggcattgagcgtaatctcttctatttcgggattttccctcagccgttccgaaagcagaaaacgaaaaagcgcgcttcccacgccgcggcggtgatactctttatccacaaaggcgagattgacgtgaacgccgtctttccgcagccccattacgccgatgatcctttttccgtcgaacgctccgtacaacggacacatacccgcctgacaatccgcataaaaatcgatgttttctacaatatcgcgacggaacgtttccgtcccttcgggcgcgtattggggagattcgaattcgagaaatactttccaaaccatctttaaagccgcatccacttcttcgcccttcactttgcgtatttcgtattccatttctttttccgccatacctccaaagccgctcttcaaaaactcctgttcgccggaaaacaggcgttacatatatttgtccaattccctttcgcaagtcttgtttttcttcactttcggatttttaaaaattctgccgcgcacggaaaccaggcgaggcgtccgcagagcggaaaaatcctccaacggatttttttccgtaatgagaaaatccgcgcttttacccacctccacgcttcccgtttcgtccccgattcccgcgatttccgcgttgcgcttggttgccgtatacagcgcaaacgcgcggctgacgcccacgtattttctgaaatattcgagttcccgccacatatcgtaatgcgtgacgaagggacaggcggtatccgtgccaagccccacgggaatcccgttttcaagcgctcttttcgcgcacgcgacgatcccttcgaaaacgatattgccgttatactgcatcagttccgtcgcgcccgtcagcgcacgatcgaattttgcaagggggatcgcgggagagagcgtacagatgtcgtacgcctttttttctttaaacagcgagattatctcttcgtcgggctccgcgccgtgctctatcgtatcgactccgttttcgagagccacgcgcagcccttcgggactttcgacgtgcgcggcgacgcggtagcccgccttatgcgcctcctcgcagcacgccttcacgtattcgggcggcattttaagaacgcccggctcccctttgactttcgcgtccagcactccgcccgtaatcatcagtttgatccagtcgggtctgcccccgataatcttttggacgagaacgcggcattccgcttcgttttcggcggcgtatgccaccgagccggccatatgcccgccgggtacggaaacggcggtatcggaaaccaacatccgcggccccgcgattttccccgcgtcgatacggtcccgaatcgtcgaatcgaaattgccgagcccgcctaccgtgcggatggtagtgactcccgacaggagttccgtttttgcgtaatgttcgcacagcctgcgccccaaagctctcgtcagtgcgtttttcataacgaatttcgccgcttttgcgctgtcttgcggctttttcttgggatagccgctgccggggagatgcacgtgcagattgataagccccggcatcagataatttccgtcaagatctatgacttcgccgctatcggcggccgcgggcaaattcttttctatcgccgttatttttccgtcctcgacgatcaccgtcatatccggctgcgccgtcatgttttcactgccgtctaaaagaatgcagtgcaaataagccgtcttcatgttccttctccttcccttcttcaatctcattcgattgttcggaatttttattttttagaatccaaactcccgcgcggaa

SEQ ID NO: 3671 - DNA, 32759 bp, Unknown
  16S sequences of unknown bacteria
cccctatattttagccttttatcgcaaaaatccgatttattcagagtatccttagaacacatattacaaagcagcgaggaatttaaatggagataagatacgaaagactgaaccgcagcaatttctacgagcattcgcttgacagcttcatccgccgacagacagtgcatgagacgtggcagcatacggacgagggattaaagcttctgccgaaggaatatgtggagtcgtggtcggtagaggaatgccgcgaaatagcgagggatataatgctgcacatggaggacgaccagagcgcgttcggtgcgtttgccggagaggagcttgtcggatttgccacggtgtcgcacaacattttcggaaagagcgcgaaatacgccgagcttgtgtgctttcaggtgtcggagccgtacagacatcacggaatcggacggcagctgttcagtctcgcgagggaagaggcaaagaagataggcgcggaaaagctgtacatatcggcgtgctcggcaaaggagacgcaggcggcgtacaaagccctcggatgcactctcgcggaggagataaacgagcggcttgccgaggaagaaccgtgcgatattcagcttgaattggcgctgtgaacgaaattaagtaaagcctgcgaatgactgcggggattgggagcttatctcaaaccgcacgtcggcaggctttttctatgtaataacatttctcgcaataattcacggaaacggttgaaatatccgcggtattatgctacaatcagcataaagatatatcaaatatgacatacagtttatgcggaaagaaaggacattatcatggaaatttgtgataccatatccgaaaaagtacagggcggacgcgcaaaggaagtcgtcgctctcataaatcaggcgcttgaagagggaatagctcccgacacgatactcaccgaaggacttatcaccggcatgaatattatcggtcagaagttcaagaacaatgaggttttcgtgcctgagattctcgcagccgcagccgttacaatgatggacctctcccttgaagctgaggcgttcggatgcacactgcacacatcggaaaacgaagttcccacagtagtcggcgcgcttgttaccgatgaagacgaagcggacgagcttgaaataccgcaggtaggagacgcccgcacaggtctttacatagaagccgcgaaaaaagcaaagtcgagaataacagaccgtcctgttcttgcgggagtgataggtccgttttcccttgcgggacgacttatggatgtgacggaagctctcgccaactgcatatgcgaccccgactttgtccatgcggtcatgagaaaaactacgccgttccttatagaatacgcgaaagcatacaaagccgccggtcttgacggtatcgttatggcggaaccattgtcgggacttctctctcccgcgcttgaggaggagttttccgcaccgtactgcaaggagcttatagacgcggtacaggacgatagctttgccgtgatataccacaactgcggtccgaacacgcccaaaatgacggattcactctcgtctctcggagcgtcggcttatcacttcggagacgcggtgcagcttgaagaaatactcgataaaatgccctccgaccgcgttgttatgggcaacatctccccgtcaaagcagttcctcggaggtacaccggacagcatggctcaggcggtaaaggagcttctcgaaaaatgcgcgggacataagaatttcctgctctcgtcaggctgcgatattccgccgaaatcctcttgggacaacataagagcatttttccgcgcgtccgaagagttctatgcggagtgagggagcagtgctatgagtaaaatccccgaaatgacagcttccgaaagatttaaagcatacctttccggcaaagaagtggatcgcgctcccgcagttgaatgggctccgtggtggcaccttaccgtgaaccgctggcttgaagacggacttccccgtgacgccgcaggatatgagcagcttcagggattttcggactggacaaatgcctacagacaagcgtgaccgcgaaaacaggagctacgccgaatcctcccacatacggacttggtattatggacgacgaggacgactacgagacaaaagtaaaaccaacgctattcccgtctcccgaatcggttatatcggaagagcattacagctttttgaaaaccactcacgagcgcggcgatactcttcacttcttcacggtggaaggctttttctggtatccgcgcacactgttcggcatagaaaaccacctctacagcttctacgactatcccgagctgtacaagcagatgtgcgatgagtacgcggactggcttgtcgagctgttcagatacgttttctcaaaattccgctttgacttcatgagctttgcggaggatatgagctacaacaacggtcctatgatatcgaaggctctgtttgacgaattcctcgcgccgttttataaaaaggtcatcccggtgatacatgagtacggcgttcccgtgtttattgattccgacggagatatcacgatggctgtcgactggtacgcctctgtgggagctgacggaatgttcccgctcgagagacaggcaagagtggacgtttcgctctaccttgacaaacagccggacatggcgttcctcggtcactttgacaagatgtgcatgaagttcggcgaggaagcgatgagaaacgagtttgagagaatactcccgagtatgcgccgcggcaagttcatcccatccgttgaccaccagacgccgcccgacgttccgctcgattactacaagatttatgtaaagctgctgaaggaatacgccgcaaaggtaacgcacagcgatggaaaaatcactccctgccctgtattccgcgaaaagtgacaagaaaggacaataatatgagtatgactaaccgcgaacgtgcgatgaatcttttgcacttcaagcctgtcgaccgtgttcccgcagtgcatttcggatactggccggagcttctcacggaatgggctgagcagggaaaaatacccgcggagcttgctgtgggaaactacgacggcagcccgaaggatatggagcttgacaagctgataggatgggacttcaactggttccacaccgtcggatgcaacaacggactgtatccggcatttgaaacgaaggtgcttgaggttctccccgacggcacaaagcgcgtacaaaacggcgacggacttatcgagaggattcaccccggcgttgtctcaatcccgcaggaggacgattatcttctgaaggacagagaagcctttgaaactctctaccgcccccgtatgcagtacagtcccgaacgcgtcgatatagaatacttcaagcatttcaacgagaatgtctacgataaaatggacgttccgctcggactgaatctcggaagcgtgctcggcaatatacgaaacatcacgtcggtcatcggaatgagctacctcatgtacgacgaggacggggatttgttcgctgatattgtcgacacatacgccgatatgcagtacaaatgcgccgaagccatcctcgagacgggagcgaaattcgactttgcccactactgggaggatatctgcttcaacagcggtccgcttatttcccccgacatattcaacgagctttgcgcgaagcactacaaaaagcgaaacgacctctgccacaagtacggcattgacgtgatatctctcgactgcgacggagtgaccgaaaagctcctcccgacatggtttgagaacggcgttaacacaatgttcccgatagaaataggcacgtggggagaccagtttgaacctgcgcgcaagaaatacggaaacggaatgctcggcgtcggcggtatggacaaaacagcgctgcgcaaggataaggctgctgtcgaccgtgagatagagcgtctgacaaggctgacctccctcggcggattcatcccatgccccgaccacagacttatgcccggaacaaagtttgagcttgtgcagtattacgccgaagaaataaagaagatacgcatctgaaatgacgaaaataactataccatcctcctccgcgggtactcgacttaaggattatctcacggaaaacagaattaagatatctgctccgtgcggcggacgaggtgtgtgcaaaaaatgccttgtcaaggttgtctccggcggctttgtctcggctgtgaatggcgaagagctgtctcccgatgaaaacggcaatatcctcgcttgtcaggctgtgtgtacctcgggcggagcggagataacaacggacgaaatagcgggggacggtctgacgtgcagcggtgcggcttacgaggaacgtgaagataacggtgcagcatacggcatagctctcgacatcggcacgacaactctcgcgtctgctcttgtgaatcttgaaagcgggaaggtcgcggcgactgcgtcatgtctcaatccacagcagagctacggtgcggacgttatcagccgtatcgaagccgcgaagaacggtaagctgtccgccatgcagtcgtgtcttgttaaggcggtgcgcggacttatcgaaaagctcgttccgaacgactgtgaaataaaatctcttgccgctgccggaaacacaaccatgctgcatattttcagtggaacatcgccggtcagcatgggagcgtatccgtttacccctgtattcaccgacgcgagaactcttgacggctctgagcttaggctgaatgtcgggaaggttacgctgctcccgtctgtttccgcttttgtcgggggagacatcacggcgggaatgtacgtactgaagctcggcaagtccaatgttcccacgctccttcttgacataggaactaacggagaaatggtgcttgacactggaaaagagaggggaaaccgccttatctcgacctcaaccgcggcaggaccggcacttgaaggcgcaaatatttcatgcggaatgggcggagttgcgggcgctgtctctcaggttgagcgtggttcatcgggagagctaagatacaaaaccatcggtgacactgcggcgcgcggaatctgcggatgcggacttatcgacctgtgcgcacgtcttctcgaggatgaaacgattgacgaaagcggatatcttgacggtgaattcaccctgagcggcattcacatgacaaaatccggcgaaattgatgaaggcgagacggcggtgacgataacgcagaaggacatccgcgagattcagcttgcgaaaagtgcgattcgtgcaggaattgaagctctgctcgactcggcaggaatggacgtcggctcgtttgtctcatccggaggcagggtctgcattgcgggaggactggggtactatctgaatcctgtcagcgccgcgaagatagggcttctgccggaggaatttgtcgagagcaatatcgtcagtgcagtcggaaatacctctctcgcgggagcttgcggagctttgtctgacggcacggcaatagagcagatgtcgcggaccgcaaaaagctgcgaaagcatggaactgaaccgctcgagcgtgtttaacgacggattcatcgaatacatgatgtttcccgagcaatgaggattgatatgtctgttgaagctatactgaaagaatttttgagtgagccggattctctgccgtatatgatacatgagtccgcgttcattgaaccgtcggttataacgttttcgcaggatgtgcgtgacgcgtgcgaggcaaatctgtgcgggatgtacagcaagtgctggtcatgtccgcccggagttggaaaatggcaggaactgcgcgaccactacaagagctacagccatgcgtttgtcttcactacaaagcacgagcttgaggattcgttcgacatcgaaggaatgacggaaggacgcgccgagcacaacagcaccgagagggcaatagaagccgcgctgaaaaagcaggatgagaagttcgagatatgcggagcggaagggtgcagcctttgcgaaaaatgcacgtatccgagctccccgtgccgacatcccgacctcatgcaccactcgatggaagccacgggaatgaacgtagtaaagctcgcctccgacgcgggaatccactacatgaacggcgtgaacacagtaacgtatttttcggttatattttggtaaaacaaaacctccttcggcgatgctgctgcgggaggttttgaatatttagatgacagggttagtctgaacattgtttccaagatgcttcgtcactgtcgacagcgatactgtttcttgaattagagggatgagcatcgttgatactttcaaaagtgcgggaattctcgctgtgtcggacgtttacgaaggagtaatgtcgtgttttgcggcatacttatgagaggactcggagcctcttttattttttgctatgcgaacacttgcggtgaaagcgatagttttagtcccctataaatttacactactctcaaacctgcacgggtacgccgtagagcttgcaccagttttagtcccctataaatttacactactctcaaacgctcggtgtctacggggtcgcagttcagtggttttagtcccctataaatttacactactctcaaaccatacattagtacaagccattttttatacgttttagtcccctataaatttacactactctcaaacccttaatggtggatatgcacctgataaggtgttttagtcccctataaatttacactactctcaaactacgccactggtttgatgatgtggttgaccgttttagtcccctataaatttacactactctcaaacctccatgacagactacgcacttgtatccttgttttagtcccctataaatttacactactctcaaacccgctctcgacaatcggattcacctttgacgttttagtcccctataaatttacactactctcaaaccgtccgtcgagattgcgaacactgcggactgttttagtcccctataaatttacactactctcaaaccgctcggttgtaatttttgttggcttccaagttttagtcccctataaatttacactactctcaaacctcaaacctcaaattttgatcaaaatcaaacatatacggcactacgaagccgccgaagtccggcagatggggaataaaacatcgtctatattaattatatcatagctgtaaacctgatgtcaatcaaaattcacataaatcttcgtcgactgtacgtcttttttcctttgccaaaaccggataatctttgttttctatcatgaaaactttgtaatcatgcgcaagtacggtttccatgaattttaatatggtttcatcgttataatagctccgcagatttaccgtgataaacaacttgtcatggtcaaattcgcggacaagctccatatagtcgagaagcatatcaagaggatctttactgtcgcattgtattaaaataccggcgcttttcaaaattcccgacatatgtatctttgtaggaacaatatcgcacgaatattcaaaagcgagtgtatctatataactctcgacagatgacagcagctcttgtgtctgcatgaaattcgtttccgagtacgcctctttttcaagtgcggagactacacgcgtcaacagctcttttctgttaatgtcaaacgacagaaaatccgtgataatctccgcatattttgaaaaagaaagtgttactccttcatcggataaaaccgtattaccgtcgcatccctctgtttgtgattttatgtcaagcagaatttctctgaaaaatttttggctttctacaactaaagtatttaccgcttggttttcaataataaacacttccgagaggtatgggtaagacagtttcataattctataagcctttcatccgtactgataatatcgctgtgtgcttttccgcagatgtattccatatgtgaaaactgtttttctgtaacggtcagcacctgcacaatgccgtccggcggcttatttcggcgtatgatgtccaccaccgatttttcagccgtcggatttataagcattctgcaatataccgactcctgcatcatcaaaaatccgttttttataagcacttttcggaattttctgtagtctctacggttttcttccgtgattgtgggaagatcgaaaaatactatggttcgcataaatctgtaactcatatattgctgtaataactgatagctttggcgtcggctttttccaaagaatcgaaaacgcttcggatgtatattcgtattgcgttaagtaccgtttgctccgcaccgtttatcataaccgtattatttagaatgtttatgagccgccgctttatattattgtcaaactctgtaacgtccgagtaataaaccgctctgtcaacgagtattctgaaaggttccatgaggtcgctgctcaaattgaacgggttgaacacgttgtcgtgaaaaactccgatatgggttatatacccgcaggcgttaatttcacggttgaatgcggagagaagtattgtgtatccgtagttcagcgcggcgtttgtcggacagcttttctgacgtgaaaattccatgccgaaaaccgcgttgaaataaacctttgcggcgtgaccctctcggtttgtctcgtctccgaactctatttcggatatataggaaagaagcatttcagcctcgcgttcattgccaagttcgccgagaaattctgcctgctttcgtattttctccgatatgatgttcgtccagacgagtccttttgattcatcgtcccatgcgacttgtgaacgcaccttttttgaagtatcgtgagagcctctgtacggcacaagttcagccatgggattgtgggtgctgtcgcagaatattactttgattttgttttcaatcatagcttcaagcaggcagccggtcagagataccgccggattttcaatgagcagcaccgatatttcgtcgagaaaaacacggtgagtttcttctccgcggacaaccatgtagcccatttttaaatccagcttgcatcggttggatactaccacaatccgccagctcataacaggtcaagcaggttgcaggaacggtgttcaaacagtcccgacgcagtagtgtcgatgatacggacgtcgctgtaggatttcttccagttggatagataatagctaatttttgttcttgtttcacttgcaactggtgccaattttacagaagtctttcggttaaacagaccgaacatttttaataaaaagtctgtctggtcaaaaatgttcagttccataaacttatttttgtttttctccaattcattaacagtttttttggaatcaagtgggcggtttgaatgaactgtgttgctcaatttacttacaagaatgtcatataacatttcattatctttactattaatataatcgaatttttccgagtatatcatgttgggatttgagttttttctttcagagaaattctcaagctttttgcaataaaactcccatttactatcaacatttagtgatgtcagaggtgacaaatacagatagctattatcatacttacttgcaactaccattcgatatccgtcaatttctaacatagtattgatcttaattattctgtttcctagaggaaattctacacggtcaatttctattattttacttttatttgatttgttaagcatcttttggatttgactttttgcgtaatcaaaacggaattgtgaatcggatttatatttttcagcaatagccaagtcaaccggcatcagcatgacatccgactttttgccgaaataatattttaccaaaacaaagaatgtggcagtcggtttattatatccgccgtattttttagggtcaagatatatttcaccgttatttttcagcggagttaaatcagcatttttcttcagcggattctgcttgaaaagcccgccttttctgctaaacggatatatcgtataatgcaccgcgtttttgtgtacggttttccatacggtttcaagcgaatttacgccgtcccagatttttcttccgcctgccgtatacggtgtaaggctgtaaagcgatgtgagatttatactgtagttgtctttgtttaagagataccactgtttggtgcatttttcatgatatacgtttccggcgacaatgttcaggtacgcgtcttttgcatggtgaaggtcgtttacggtgcgcgatttccaaagctcggttttccaaggttcaatttgcgagtcgtcaagatatctttcttcttccggcagaatcgctttccagagtttcttttcatgcctgaattctgacacaagacctgctttgacgtatacaattttagtgttgggatagtattccttaagcagagttgcgacggcttttgtggactgtcttgtctcaaccatctgtcggttaatgaatccccacgcttcgtcatcggtgaatcctgtttttcttgtgagtcggcggtatttttcctctgtgattagcttgcagtcaagcagctttttccacattccgctcatgttttcacgtatgccttctggaacaggatatctgtcgcctttttggtggttaagctccgatttgacaagcactttgttattgaataagctgtcgtccttgacctttgactgcgggtatatatgatcaatatcataacgtttatcgcttgtcataagatcgctcagaataattttttcaccggagtacatacatcttccgcgctgtaagtaataaaggaaaagtctttcgctttgcagtctgctgtttgcttcgtcgcccatcttttcaagttcttgttcaagcctgcggacgtcgtctgtgtctatatttttatataaatccttgagcgtatcatatctggacgtttttctctgacctttttcatcgggtttgggaccgcgagccatttcaacgaaaatcttattcggggcttttccttcagctttgactatatcggagacaatgccgagcacacggtatatcggacgtctcacggcattcgacaaatacatatcgtccattctttcgtcaagagactttgctccgtttgccatatagtagttgtcggaatatctctttattgcatccgaatatgtgtagtcgtccgaaagaagctccataagatttttgtccgtgctccagagcgcgtcgataatgctgcatgcctctcctgtatctttacagcctccgattataccgcataagaatttttcagaaagacgtccgaagtccttgaatttcagtgaagtaatatattttacgtcattatcggacaaattcggatattcgccttcgagccatgctttaaaacgcggacggctttccatgtaagtcgatactttgattatcttttcaacatctgtctcgttcaaagttccgctttcaaggagtctgcggaaagatatatatgacgaaagagaagactttatcgaaatatctattcctgcgatggtttcaacgtcatctttagaatgattgttctgacggagagaatcctttattttctttacggatacttttttgtttttcttgaacacatcattgtaaatcagctgttttatctccggagatattctgagtccgtttatcgtgatattgttgatttcgttgagtacagtaaaacgctggtacaaaagagactgcttcggtaatactttctcacccggaagatatgagcatacacctatcaatttatttataaatccttgttcactctcgttgccgtcaaccatttcggaaaaattccacggagtgatacgtccggcttttctcttaatccaagcataaggcgagcttgcattcagcggacctacatagtacggtatgcggaaagtgaataccgacagagttttgtcttttgtaagatatccttcttcgtctgtttcgctcaaaaacggcagatacttttcggcgttttcgagtatcttcttcagctcaacataataaagttggtacggtattacacggttgtcgccgttaacctgcttaggcatgaaggtgtttacatctttttgcaatctggcaaccatgtcgtcgaagaaagctttgtcctctgcggcgggggttatattattaacaattttcagaatatatgcgcaaaaattttccggagtagcctttttccagtcagcctttgtgtttttgtcggattttatatttccggagtacgcactgtaatttgcggtgctcttgtcgactttcctgaatatttcattgtatttttcgggagcatatttttttataaactttttcagtcctaaccaatcaggagtgccgtataaatctttcctatgctgctcgtaagtctcgactttggcggcgggaataaatttgttttcaccgagaacatcatgaagcgtaacacagtcatatacggctttcaggcgcagaacaagctcggcgtcgtctccgagttccgaaaggtttgagtcaagttcgtcatcatcaagctttaagcttttgatttcggcatattcttccttgccgaacaagtcttttgcagaacagtctttgccgcaaagaagcttaatgattccgggtcggctgaacggaaaagcgtctgttatttcagtttcgggcttctttttgccgaataacaggttgttgagctcatttatttttgatgttgatttgatttttttgacgagaattttttcaatttcgtccggatctgcgttatcccatgcaggctcgcagccgatttcaaaagcaaaataatccgtcaggttatcgtaaacggttttaaaatcaacgaccgattccacattgtcgagtgaaacttcgcttaaaaaatgtcctctgtgtgcgacaagccatgcacatgcaagataaacaagtcttacgtcgtgcggagcggcatccgtcatcaactcattaataaggtggtgtattgtgggatagcttttgtggtattttttgtcagtatagccgatgtccgtgaataatccttttgatgtggaggcgtcctcggcaagaagtgcgctttcttcctcacgcttgtagaaatcagggtcaatttttgcgatttcttttgcgaatatttctctgataagcgtaactctctgctgtcttctgtctagacgtctgcgttcagtgcggtgctgtctgcgttcggttttaagatttgcctcttcaattatgtgacttccccatacaggttcgcccttgtatttgagaagacggtatgattcatccgctgccgcatatcctatagaatccgttccgatatcaagtccgatgtaataatttttactttccatattgacaacctttcaaaagcatgatataataacaatgcaagttgtagtcccctacaaatttgcactacgagttcaaataaaagatttctcaaatcgtcgttttacgacctcacagtgtgtgagaaaatcggcttcctgaataaggaggtcttttttatttactctcgccagaacaattgttttatggttttattatacataatcaattataatttgtcaatatatgtcgcaaaaattattctttatatctttaaaaacctgcaaaaattcgatttttcaactcaatcccgaacactttatctttcgtgacgggacattttgataatgcagaaaaatatgcagctttatcaaaaaacaaaaaaagccttgcgaaatatatcacaagactttttcggtattgctaccgtcatcggagtgactggattcgaaccagcggcctcttggtcccgaaccaagcactctaccggactgagccacaccccgattgcctgtatattatatcacaacgccgcgggattgtcaatagcattcgccaaaaaattagcatttccgtgagcggtcgcagatacaacgtctcctcctcatccgcctaaatcataccccacatagtaaaacgactttcgtgagtttcccttcttcacttcaaatccgtacctcacgagcctttccatgccgccaaagtcgcatttcacaaccacggatttcctcgccacacgcacagcctcttcaatgtgccgctcggttattctgtcgtccgcggcgtgctcacgtatcacctgaatcccgtgagacttcgcgttaggactctcgaacatgaaatcaaaataaaccgcgtcatagctcttgtcggggcaggacttcataaactcaagattgtcgccgttgtgaatgtcgattcggctgattgtctcccgcaaattcgggtaaagctccgcgtagcaggcaagcccttccttcaccaaaatgtaaatactgcggcttttctccactcctgtgcattttcccgacgagccgacggcatacgacagagtcaacgcgtccgacgccagaccgagagttgcgtcaaggcatgacatcccttctcctaaaccgcagacctcgacaagactgtcccgctcgcccctctccatgttctttatcctgagaaacgccatgttagggtgaaaaaacgcctcgctcttgccgctttcgtagtagctaagtccgcgcgcctcgttcacgacaaaaatctgctggtcgatattttcaagcaggtaagagagcgagcggttttggcggggaacgtactgcaagccgtatctctcagccacagagattgctttctcttcaagtttgtcgctcacccgcgatgatgttgtgactgtcatttgttctcccgtcctttcagctgtataacaaaaaaagcacagcttcatccctcgggacaaagttatgccggtgttatgctttgtaaaatccgcttaatatacagtatctcgtgccatgccgtcatgctacattgtcatctcatgtggatttgtgaaaactgtactaaaatccagctctcaattcatatgataccacatattttgccgtttgtcaagcactgcgggtcacaaatatctcctgcagcggaaacggtcggttatgaaatggaatgatgccttaccgcgtttgtttgcggcttcgcttatgtggatgtcctcagcggaggggacaagcggctctcccggatgtgcgtgtgcggtgaaaatctcttccgattccgcccgtatgtcgcaaatgtccgcgtttccgagcgaaaagtgccacttcatcggcgagagcaggttccaaaccgagaaaaacgccatgccaagctcgcccgagacgtcaacgtcttctctttcgttcatgatgtacgccgcggtttcaagaaggcatacacgcttttttctatacctgagtttcatcgtatccgatccctttttataattcggacgaatttttcgttattaaaaaagcggatttatgaatctgccgctgcttcggtaataatccgccagtgctataagtaccgatgtcggaatttcaatttcccctcgctcgtagttgctgtacacgcgctgactgcaatgaagtatttcgctgatttctgtctgtgtcagatcgtggtcttcccttaaatccctcactcttttgtataccatttaacttccgaaataccccaatcgtaattattatattactaataatatcaaattattgcccgttttgtctgattttagcggaaattccgctactattatttttgtaaaactctgctccgacgaggattatttcggataaatgatacgctgttccggacggtaaaacgatgttcccgaatgcgcgcgaacattgcgtctgctgatttcgtgaaatccaaataaaaccacattaaaaaagtgcaaaacatattgacaacaaacgattgttcggatataatataagacacaaacgcacaggtgtttatacaaaggaaatgctgtcaatgaacaggcttatgtattcggattacagcgcacagaaggacagggtgatactgcactgcgatctcaacaattattttgcttccgtggagcttcttgaaaagccggagcttcgcgaaaaaccggtaatagtcggcggctcgaccgaaaaccgtcacggaatagtcctcgcgaagaactatacggcaaaagcgttcgggataatgaccggcgaatccgtttcgaatgccctcggaaaatgtccgtcgctcaccatacttgaaccgcactacgacaaatatctttcatactcgcgcgcggttcgtgagatttacaagagatacaccgaccttgttgaagctatgggtatcgacgagtgctttcttgacgtgacggggagcggatatctgttcggctcgggcgtccgcattgcaaacgagatacgtgagagcgtgaagcgtgagacggggcttacgatatctgcgggagtttcgttcaacaagatattcgcgaagctcggctcggacatgaaaaaaccggatgccgtgactgtgataagccgtgacgactttcaggagaaaatatggaatctgcctgcaaacgagatgctcggcgtaggaatgaaaacgtacaaaaagctgtggtaccgcggaatacggacgataggcgatatagcgaactgcgacccggacagaatgcagacgtacctcggaaagatggggcaggtgctgtgggtatatgcgaacggatatgaaaactcgcccgtgatgcaggaaaacgaacgctgtcccataaaatccatcggacacggaacaacgactacggcagaccttgacacggagcgcgaggtttttgacactataatagagctgtcggaggagatagggacgaagctgcgcaagaatcggctgaaaagctgcggtgtggctgtcggaatacgcgaaaacgacctgtccgtgcgggaataccaaatgaagtttgcgcatcctactcagctgacgagggatgtggcgcgcggtgcgatgcaggtgttccgcgaaaagcacatatggcggtgtccgataaggagcgtcacggttcgcgcgatatacatttccgccgaggacgagccggagcagcttacgatatttgacgaatacgcatggcacggtgagcttctgcggcttgagaaaaccgtcgacgcgataagggaacagtacggcgatcacagtatcacaagcggagcgtatctcagaaacaagaagttaaattcacaacgcataggattcagggaccacagtgagatctactgaagaaaatcccactcgccgttggcgatcacagtatcacaagcggcgcgtacctgcggaacaagaagctgaactcacagcgtataggcttccgcgaccacagtgagatatattagtattgcaggatatattttaccacatcacggttaaaaaagcaaatattctctataaaaattcgcaaaacgtcattgattttttgtcatatgagccttataatctaaccaaagacaaaaatcacaaacgaaaggcgggcgtaatgtgaaaaattttgctttcgacggagagatgagcagggaagtgctgaacaattatctctcacgcgccgtgacccacataggactgggctacgacaacgacctgtactccgacacatttgaggatgacctgagaatgctgaaaaacgagggcgcaaagttcatcggaagagcggcgtatgtctgggcgaacagtgttcccgacaaggaaaatttcgccttcacgaagaaaagacttgcgagaggacacgaggttgatcccgaattcatcttccaggcgtgcgtgttcgagtgcatctacagaccgtttgtagactccaccgagataccggagtttgtgttccgcgagttcggtcttacgcctgagaagcgctgtttcagctacgactcgatgagacacacggacgaggaagagtgcagatggggttggcgcgagacttcgactcccgacatcacgaaaaccgaggcgcagatgtggttcttctaccgtgcggcgtcgtacattgactgcggctgtgaagcagtgcatctcggtcaggtggggcttatcggcaggaaggatgagggcttcgcctgcttcaagaaggtcatcggaatgatacgcgagtacgcaaagaagcacgcaagacggcattttgttcttatcgacgcgcacactctcggatggcttcgcgaggacgacacgatgttcgactacaacgcgttcccgataaggctgaaagaggtcgtagacgagcctatgcactgcgtgtgcgaggaaggctatctcgactccatgttcaacgagagagacggtaacgcgcgtccgttcatcgtagagtttgacaacttcggaatgtcgtctcaccccggtcaagcggatgtaaagtcccatttcgcgtggggatacgacgagataacgtggttctcgaagctcgacaaggactacagggcgtacttcctgaactacatctgggactgggtcaatgcgcgatatcccgagggatgggttcagatgccgtcgagaagatgccttgcgggaggagaacggtataactacagcgcaaacacaccctccgaagcgataccctacggctggggcgacgaggagacgataaaagcaatattcgcgagaggataacaaaacaggcgcatcgtaaaagctcacggtgtgcctgtgatttttttatttaactgtacgcctttacgcgttcttcattgcttcttctactgcaactgctacagctactgtcgcgcctaccatcgggttgttgcccatgccgatgagtcccatcatttcgacgtgagccggaacggaggaagagcctgcgaactgtgcgtcggagtgcattctgcccattgtatcggtcataccgtaggaagcggggcctgccgccatgttatcgggatggagtgtacgtcctgtgccgccgccggaagcaacggagaagtactttctgccgttctcaacacaccacttcttgtatgtgcctgcaacgggatgctggaatcttgtcgggttggtggagttgccggtgatggatacgccaacgttttcaagcttcatgatagcaacgccttcgggaacgttgtcagcgccgtagcacttaacagcagctctcggaccgtcggaatatgcggtttcggaaactaccttaacttcttctgtgtaggggtcgaattcggtcttaacatatgtaaagccgttgattctggagatgatgaaagcagcgtccttgccgagaccgttgaggataacgcggaggggctttactctgaccttgtttgcgttgagtgctatcttgattgcgccttcagctgccgcgaatgattcgtgacctgcgaggaagcagaagcagtcagtatcttcggagagaagcattgcgccgaggttgccgtgtccgagaccgaccttacggttttcggcaacggagccgggaatgcagaatgactgaagaccgataccgatagcggcagcagcatcagcagcctttgtgcagcccttctttattgcgatagctgcgcctacagtgtaagcccatacagcgttctcgaagcagataggctgtgtttcacgaacgatcttgtcgcagtcgataccctttgcgagagtgatctccttgcattcttcgatggaggagataccgtattcggcaagaacacccatgatcttgtcaacacgtctttcatagctttcaaataatgccatttttcaagtcctcctttgaattactgcttgcgcgggtcgatgtacttagccgcgccgtcgaatctgccgtatttgcccatagccttctggtatgcttcgttcggttccatgcccttcttgatgaagtcggtcatctttccgagggaaacaaattcgtagccgatgacttcgtcgttttcgtcgagagccattcttgttacataaccttcagccatttcgaggtaacgaacgcccttagcctttgtaccgtacatagtaccaacctgggaacgagtgcccttaccgaggtcttcaagacctgcgccgacgttaagaccgccttcggagaaagcagactgtgaacgtccgtaaactatctgtaagaagagctcacgcatagcggtgttgatagcgtcgcatacaaggtctgtgttgagagcttcgaggatagtcttgccggggaggatttcagcagccatagcggcggagtgagtcataccggaacatccgattgtttcaacaagagcttcttcgataacgccgttctttacattgagagagagcttgcaggcaccctgctgcggagcacaccagcccacaccgtgtgtgaaagcggaaatatctttgatttcataagcctttacccatttgccttcttccggaatcggagcgggaccatggtgaggaccttttgcaacgacacacatatcttcaacttcgcgtgtgtattcaatgctcattttattgtatctccttttgcataatatatggattttgctcagcctatattatatatcatttttcgagcaaaatcaagagcataatcccacaccttgcttttttctatagaaaattttcttttgcggcatattgaattaattgtagctatttataaatgatttattgaataaagctattgacattaaatacgtgcgatggtagaatattcacgaaataaaatatatacaaacgtcgtggtttgaaaagttgttagctgagtagattatcggtagtcggttcgattccgacgcaactgccacttttcgttatatgctatcgttaacggaaaaccgactgcggcgttcgacatatactcatggcagtagagtgtgtctttttgcgtctgttgatgtgaaaatgcacacttttttatatgcaaatttttatctaaaggagaaaaacaatgaaaaaacgtgtcatttcgtttgtgcttatgctggcgatggtcttctgccttgtgccttgtacggtatcggcggagggggagactcacactgtcacattcgagataacaaagctcgacggaagccttatcgacttttcgttagctcagtatgaggttaaaaacacgagcggaacaaaattctacgcggagcaggatgaatacggttgggatttaaactacttcttactccccgacggagactacacctaccgcgtagaatacagccagaaggaaaaagcggagggcgaattcaccgtctccggcagcgaccttacgattagggacaatacggaaacgatatactatcccatcacgtttgacgttcagcctgcaagagcggatatcaagctctacaaaagcggaagcagcggagcgtacggagaccccatcctgccgaacgaggacggagtttatctgattcctttcggatactacagatacataatcagcgcggaaggttatgagaccgtaaacaaatccttcaacgcaaccgacacttccctgaaaaacaacaactacgtcataaaggttaagcttaagtctctgtacgaggcgcttctcgaagatgtttatgacgcgcttgactacgaaaccggagaacctgtcattctgaacgagtttaccggaaacctttacgaatacggcgacgagttcattccgtgggacattgactcagactacgacgacaccaatgtgctcgattacgcttatgacatcatctcggacgaagaattcgagggcgtaactctcggaatcgccgatgtttacaaggacacattctactactacgacgacgatgacgaaagcacagactacagcgttatcgcagaggacggcactatcaactacaaggctgttgacgagagcaatatcacagaggacgaggactacggcacgggcgcgtactacatcgtagagtttacgataacatacggcggcgcaacctacgacagaaccgtggaattcacctttgttgttcccgagcacatcaagacccgctgcgaaagactcagcgaagcggctgattttgcagtagaaggcattcccgagacaacggaagaggacattgacctgccgaagctctcggaagacgacgactggagcgaatacttcatcgacacaaagtgggaatcaagcaacgagaacgttatttcgccaagcggaaaggtaactctccccgaaaaagatactgtagttaccctcaccatgactgcgttctacatggattggtacatcgaagacgcgggatatatgcttgaccccggacctgacggagacgacgttgtgcgtgaggtgagagttctcgtaccaggcacaaactttgacgttgccgtggaaaacagctatgcaaaagacagcggagaaggctcgtacaaggcgggagacaccgtaacggtacacgcgggaacaagggatggctatacattcgcgggatggacggcagagggcatagagcttgaagagggcaaaaatcccgacgcgacatttgttatgccgaagaacgacgtgaaactcaccgcagcatgggaaaagaacgaagaacctaagcctgacccgtcacctgataagccttcacgtgacgacaactcgggaaaaatcattgccgacctcatcagatacagaaatcagcaaaagaagagaggcacagcttcaaattcggacaagactgaagctgatacaaagaacgaagtctctccgtttaaagatgtaagcaagaccgacgcattctacgacgacgttctgtactgctatgaaaacgagataatgctcggcacatcagacgacgaattcacaccctacggaaacacaacaagagcgatgatagttaccgttctgtggcgcatggagggagaacccgtcgttaactcgatcaatatgttcactgacgtagaggacgacacatggtacagctatgcggttgtatgggccggggctaacggaatagtaaacggctacggagacggcagattcggatcgaatgacactataacacgcgaacagctggcagccatcatcgcaagatacgcgcgcttcctcggctgcgaaatgcctgcggaagaaacagcggactacgacgactttgacgcggtatccgattgggcggcggacgatgttgcgtctctcaccacactcggaatcgttgaagcggaagagtacaacacattctctccgaagtcagacgctctgcgttatcagatagctaaggctttgcatatgttctgcgaggcttttgccgaataaaataaaaaacggcgggtgctcagtttcgggcgtccgctgttttgcttgaagagtaccaaaaatatactcacttgtaaattacagtttaattttatgtcataaaaataatgttgaattttaatcccccgtgttgtataatacattttcagagaaggttgcagatgtgttagtctggactaactcgtatattacaatgaattaccgctctaaggtaatcacaggaggaattgttatgagtatcggaaaacttggtatttttgcggcaggacttcttttcggaaccgcgggagtaaagattcttacaagcaaggacgcaaagaaagtttacacacacacaacagccgctgtcctcagagctaaggaaagcgttatgaagaccgttaccgacgtaagagaaaacgccggagacatccttgcagacgctaaagaaatcaacgaacagcgcaaggaagaagaaaagccggaggttgtggaagacgaatccgaagaatgctgctgcgaggaagaaaagaaggacgactgctgcggcgaataaatacggcataagggcgtaacaacacatgaaatgcagtattttacatgagtcgcgcggaagaatgagagttcgcttttcgtgcggctcaatgacactgaatgaagccgatctcgccgaatattggctgagagaagcggacggcgtcgaaaaggtcagcgtatttgaccgtaccggcgacgctgtaattttatataaaggaaaaagagagagtataataaatgctctctccgctttctcctttgcacgcgcgagggagaaaaaactcgttcccgaccatactccgagagcgctcaaccgtgaatttgaggacaagctcgtgttctccgttgtgagaagagcaatattaaagctgttcttccccttctccatcagagctgtcatagcggcagttaagtccgtcaaatacatcaaagccggaattaaatccctgctcaaaggaaagctgtcagtagccgttctggacgcaactgcggttacggtttccatagttcgcggagacttcaatacggcgggcagcgttatgttcatgctcggaatcggcgagatgcttgaagactggacgcacaaaaagtccgttgcagaccttgccggcgctatgtctctcaacattgacaaggtatggctcaaaaccgacggctgcgaacagcttgttccgataaacgaagtacaggtcggcgacaggatagtggttcgcaccggcggaatgataccactcgacggcattgtaaccgagggagacatgacagtgaaccagtcctccatgacaggcgaatccattcccgtggcaaaatccgcaggaagctatgtttacgccggaactgtggttgaagagggcgagtgcgtcattaccgtagacaaaacaagcggcggcggacgttacgacagagttatcaagatgatcgaggactccgaaaagctcaagtccacgacggaagacaaggcgtacagactggcagacaggctcgtgccgtacactcttgcgggaactgtgctcgtgtatctcctgacgcgcaacgttacgaagatgctcgccgtgcttatggtggacttctcatgcgcgcttaagctgtcaatgccgattgcggttctctctgccatgcgagaatgcagctcacatcacatctcggtcaagggcggaaaattccttgaagccgcggcgggcgctgacactatcgtattcgataagacaggtacgctgacttacgctaatcctacagttgtagatataatcgcattcggcggacacagtgaaagcgatatgctccgtcttgccgcctgccttgaggaacactacccgcactccatggcaaacgctgtcgtggaagaggcgaagagacgcggactttcccatgaggagtaccattcctgcgtcgagtatgtcgttgctcacggaatctcaagcatggtcaacgatgagaaggtcgtcatcggaagcgcacacttcgtctttgaggatgaaaaatgcgtcattcccgagggcgaggaggataaataccattccattcccgcgcagtattcccacctctatctgtgcatagcgggagttctgtctgcggtaatatgcatattcgacccgcttagacgtgaagcccgtgacgcgctgaaagcactgcacgaatgcggaattaagaatatcgtcatgatgacgggcgacaaccacaagactgctcagtccgttgctgcggaggtcggagttgacgagttccacgccgaggttctgccggaggacaaagccggatacatcagagaagctaaaaagaacggtcacactgtcatgatgataggcgacggagtgaacgattctcccgcactgtccgaggctgacgtaggtatcgcgataaactccggcgcggcgattgcaaaggaaatagcggacgttaccatctcttccgaaagcctgtacgagatagttatgctaagacggctcagctccgcgcttatggacagaattcacggcaactaccgtttcattgtgggattcaacctgcttctcataatcctcggagtaggaggggtaataatgcccacaacctccgcgctcctgcataatatgtcaacgctcgctatcggaatgaagagcatgacaaaccttttgccggacgaaaccgaagaatgatgcaaaaaaatatcagacccacatatatcagcgaaaatctgacgtatgcgggtctgtttttttacataatccagaagctgtcggcgtcgcggaggtatattctgtcgtcggggagagtgatgttttccggcggatagtcgttcgggataagctcaatcggctgaacggcgttgtcgtcaagtccgtcctcatatttcattccgcgtctgaatcggaaggtgttctttatcatgtaatgcctgttctcgtccggattgaagccgcagcctgcgtgagaagcgtcgggattcgggataagctgctcgccgtttgccaaaatatcgcgcagtcttctcagagaaacgtatttaccctcggcgtcgcggtagtacagcctgttagacgggtcgaacataattctttctccgcttttcagctcgcagtccactacaacatggcagtcgtcaaagggattttcgtagggacagcaggttatgtggcgcgccctgaatccgttcagtctgagcagagaagcgagaagaagagcaagaccgcggcagttcatagcattgttcttttcgcggcagtattttataagtccttcgatattgcgttccgttccgcagcctgccgagccgttgtgattgaagtggtcacagacaaacgcaagcatggagaacgcaagctcgtcgccttccttaccggtcacatacttctcgtagtcgtattcatggagcattgcgggaacatctccgccgagcacatattccgccttgtatttcgtgtgttcgggatcgcttttgtcgggagtgtagctgtcgtatttttttcagtgcgtcgatgcgcttcatgccgtctgttccgggaatgacaggctcgtatcggtattcaccttcctcgggagcatcggagagcttttcaaacttgacatcagtggattttccgaactgcgtgtaatagccgccgagagtgcttccgtcatactttaagtagtagaccatgcggtaatacttgtcgttcagctcaaagcataagtatccgtccttttcgtaggagcagttcggcgccatgttgtagtatccgctgtagccgaacgacaggagcagctttggctcgccgtttacatattcgtcgaaaatattaattgttaatttcccgccggagtcataccatttgccgataatccgcttgtccataaaaatcctccaaagttctgtggaataatatgtaaatattatagcatattgcaaggttcgtgtcaatcaagctctgctttagtctcacatatgttgcatatttaatactgaaatgtccaaattaagcttgacaagatgacgatgttattttataatataaacagtagattttttcatatttaggaaggagaatgtgccaatgtctaaaaaatgctctaattgcggttttgatatggcggatgatgctgtattctgcaccgaatgcggaactaggatggaagcccccaagcagaatactacagagcagccccagccgcagaatgcccagcctcagaatcagaattccgctccgaacaaccagcagaatgcccagcctcagaatcagtactccgctccgagcagccagcagaatgcccagcctcagaatcagtactccgctccgaacagccagcagtatgctcagccgcagaatcagtattccgctccgtataatcagcagtatgctcaacctcagccggattattatagccagtctcccgaggattacgctcaaaatgcagttgtgacgaccggtgcgtttttcggattgaatttgctgttctctctccctgcaataggttggattatctgtattataatgtcgtttgcgccgaagaacaagaatattaaaaactttgcgcgttcaaaacttatctggattatcatcgcaataatccttggcgtaatatgcggcatcatatttgcctttgtatttaaaaatatgggagtggatattgacgattacttcagcagttacactatatgataatgtttcgcttaaggctatgagagtcggcggcttatacaacaattcattagaataaaaatacatagagggagtttgttgatatctcagcatgctccctttaaattaattaaagaagaaagagtatgaaaatcagaaaaaccgcactgtcagatgtacccgcggtactggaaatatacgagtgcgcgagaaaattcatggcggaaaacggaaacccgaatcagtggacagacggctatcccgataagagcacacttctgcacgatatagagcgcggagtaagctatgttatcaccgaggacagcgatacagccggcactttttcctttatcttaggtgaagaggagacataccgcgtgatagaaaacggctgttggcgcaaggatatgccatacggaacgatacaccgcttagcttcggctcaaaagtgcaggggagttgcgaatgcctgctttgactactgtagagaaagatgcggttatcttaggatagacacacaccgcgacaacaaacccatgcaggcggcgatagagaagtacggcttcagaaaatgcgggataatccacgtaaaaaacggctcggagagaatagcatacgattatataagggtaaaataaaaaacggtatgtatctcatgtacactgtcatgtaacaagatgcataccgatttttcttattcagcattcaatattctttgaccaaacgtcggagaattttccgtaaggtaaattctcgtgagtgggatggtattctctcctactcagcttaagctcattcccactcaatggttttaagacaaatgtcggagaattttccgtaaggtaaattctcgtgagtgggatggtattctttcctactcagcttaagctcattcccactcaatggttttgctccattatagcagagaggggaatgttttgcaagggcgcggaaagaacactttgttaaaattttctccgtcctattgatataagcgcggatttggtatataattaagaaaatatgttcagagaaacggagatacaaataaatggcaaaaagcaatactaaaaaaacagtggtcgatacctccgataagacccctgaggaaaagcagaaagcccttgaaaccgcgattagtcagatagagaaaaacttcggcaagggtactatcataaaaatgggcgagaacccgaagatgaacgtgtcgtcagtctcgacaggctcgatatctcttgacatggcgctcggcatcggcggacttccgaagggcagaatagtcgaggtgtacggtcccgaatcctccggtaagactaccctcacactccacgccatagcagaggtgcagaagacgggcggacaggctgcattcatcgacgcggagcacgcactcgacccggtttacgcgaagaatctcggggtggatattgacaatcttctcgtgtctcagccggactcgggcgagcaggctcttgagatatgcgacgcacttgtacgctcgggtgctgttgatattatcgtaatcgactccgttgcggctctcgttccacagcaggaaatcgacggcgatatgggcgcgtcccacgttggtttacaggcaagacttatgtcgcaggcactgagaaagctgtcgggtactatctccaaaaccaattgcatcgtaatattcataaaccagctcagagaaaaggtcggcgtagtctacggaaatcccgaaacaacaacgggcggtcgtgcgctgaaattctacgcgtcggtaagaatagagatacgcaaagccgaaagccttaaaaacggtacggaaatctacggcaaccgcgtaaagtgcaaggtcgtaaagaacaaggtcgcgcctccgttcaagacagcggaattcgatatcctctacggaagcggcatttccaaatccagtgaaatcgtcgagcttggcgtgaacctcggaattctcgacaagagcggcgcatggatatcctataacggcacgagaataggtcagggcagggacaacgcgagagctaccattgacaacgatccgtcccttgcggcagagcttgaagctaagattaaggaaaaagcgtccactgtcgatatgcttgagataggcgaggacgaaatcgaggacaatcttgacgaagaggacgtagactctgcgcttgacatcagacttatcgatctcgacggagtagacgaagaataattaatgtacgttagaaatatttcgctcgtgtcgtggagaaacattgccatgacctcggcggatttcgagcgcggtgttaatgtgctgtgggggatgaacgcgcagggtaagtccaacattctcgagagcatatactacttcgcaagaggtcgttctttccgcggcgggcgtgactccgagcttattcgtttcggcgcggactatgccacctcttccctcacatacaggcgcgacggatacgaaaacgacaccgtcctcgactgcgtgataccgaagagcggcaagaagaagctgagaaagaattccgtgaatctgtcttccgccgccgagatgatgggactgttccgcgcggtgctgttctgcccgaaggatctctcccttgtcacaggcggacctctcgagcggagaaccttccttgacgttgctctctctcagctctcggcgacgtatctcacgtatctcagacgctacacaaaggctcttaccgagagaaacgcgcttttgaaacgggcgtctgcgggtgagagcgtcacctctgccgaatgggaagtctacgccgaggtcatggcagaatccgcgggagtggtttgtgcttaccgtaacgactatgtctccatgctctcgcgcgaagtcggacgatatttttccgatatgacctcgggtggggaagtgccggagctgagatattcctcgcacgcgctgtatgacggcattcccgcgccgctgtcaacggttgacacgtcaaagattcagaatattctctacgacaggctgacagcaaatgttgacagagaatgcgccgcgggttctacgctgtggggaatacacaaggacgacgtctcgctcatgataaacggcagagaagccaagctgtacgcgtcgcagggtcagcagaggtcggtcgcgctgtctctaaagcttgccgaagcggagatagctaacaaactcggcggggaatatcccgtgattctgcttgacgacgtgttctcggagcttgacgaaaagcgcaggaagtatatcctcgatattctttcagccgacgacgaaagcaagcggcagattatcataacctcgtgcgagccggatataatcccgaaggagcgtctttcccacgtgaagttcaaccatgtctccggcggggagattgtgggagcggaggtcggagatgttcattaaatccgtcattgacgacagagagctctcgggcaaggttacatttgtagccgccaacgacatgggctcgggcgaggagctgtttgtgctgtcagccggagaagtgtcgcgcctgccgtttccgcttgatgaggggagcgaggtcgacgagaacatttacgacacgctgaaagccgcctcggagcgaacgggagcactcaccgaagccgcgcggatactctcgatagggcaaagaagccgcagaactcttctgtataagctgaaaacaaagggatattcccccgaagccgccgagcacgccgtgaagatactcgagaaaaaaggatatttgaacgacaacaaagcctgccgtgataccgcggaaatgctgctcaaaacaaagcactacggtcggcagaggatagtgtcgtatcttgtgtcgcacggattctcagcctgtgacgcgagagaggcgggagagcttgacgaaaacgagcttcacgacgcgcttatatataatattgaaagaaaattccccgatatcgaagagctgccgcgtgagaagcagcagaaagcggtgcagtctctcgtcagactcggcttttcggcgggggagataataaaagaagtaaaaaatcgtgcgtacagacgttaatttttgattatcgcctgtttttacgcgcggttttatgctataataaaccgaatacatatataaaataaaaatcatcggagctttataaaatggcaaacaaaacaaaagtcggattcatatccctcggatgttcaaagaacctgtgcgataccgagatcatgctcaagcatcttcttgacgcaggctacgagatcacaccggaagaaaccgaggcggatattgttatcgtaaacacctgtgcattcatcgaaagcgcgaaaaaagaatccatcgacaacataattgacgtgggctggctgaaaaagcaccacaagctgaagggcattatcgttaccggatgtctcgccgaaagatacaaggacgaggtgctcaaggaaatgccggaggttgacgctcttctcggtgtcggcagcatacacaagattgtcgaagcggtgcagtccattgaagccaacttcggtaagaaggattatcccaaatacacctgcttcgaggacaaggagagttcggttatcggcggcgagagactcctcacaacgggcgacagcatggcctacatcaagatagcggaaggctgcaacaaccgctgcacgtactgcgctatcccgctcatcagaggaaaaatgcgcagccgcacaatgaaggatataattgaagaagctacctcccttgacgctctcggagtaaaggagcttaacatcatagctcaggatacctccgcctacggtatcgacctctacggaaagtacgagctgccggagcttatccgcggtatctgcgacgctacgaacatcccgtggatacgcctgctctactgctaccccgacaagatcaccgatgagcttgttgcggaaatcagagacaatccgcgcgttgtgaagtacatcgacatcccgattcagcatatttccgaccgcgtgctcaaggcgatgaaccgtcacggtgactccgctatgattcgcgacgctgtgaagaggctcagagaaatccccggaatcgtactcagaagtaccgcgattgtaggcttcccctgcgagaccgaagaggattttgaggagctttgcaagttcatcaaggaagcgaagttcgagcgtttcggcgcgtttacatattcaagagaagaagacactcccgcatatgacttcccgaatcaggtggacgagcaggttaagcaggacagatacgacatcctcatgcagacccagcttgaaatcagcgaaaagttcaacgaaaagagaatcggcaag

SEQ ID NO: 3672 - DNA, 32759 bp, Unknown
  16S sequences of unknown bacteria
gggtttacggtggtcggagtgatgtgacttgaacacacggcctcttggtcccgaaccaagcgctctaccaaactgagctacaccccgaaataattgatttaaattctggttttttgaacccgaagtgcttggttaaactccttttaaagcacttggttcatccgttttgatagtatagcatacccggcaataaaatgcaagcaaaaacgtcgtaaatatggtgtatggaatcatcgaaatttacgctattatattcatttctgatttttgtgtaaaattaataaacttgctaaagggccccgggtggggccctttagcaagtttgtgtttatgcaataggcggtgactctggcggattgttggaggggggctctgccggcggttgttcttccctttgctggggatccagcggaacatgcgcttctaaagcaggatcctccaccgagatctgggacgtcgttccctgaacgctctcctccatgatcggctcctccggaagggccggcactgtcaagcgctcttttcttctcgtatacaacaccagaaaaacaagcagggccagggagatgagggagatgagggcgccggggatgaggccgcgggggaagaaggacaacacaatatcgtgttcaccctgcgccacgtcgaaggccagcatggcccccgcgcgctcgtcctccacatccgtttctcccacgccgtaggtgtccaccttcacaccgtccaccgtgactgtccagccggcatcatagggaatggaggtgaagaccgcgccgtcctccggcgccgtcagttttccgtcgatacgactgtcgctgaagctggacacctgcatgccgccggcggacagagtctgcatatcctgctgcagcaccgcatcgtccataatggccacgtaaatattgccggtggccgccgattcggcgcccacggtaacgcacacctcataatccgtccccaaagtgccggcgtcgatgatatacggctcgtgaggggtaacggtccagctgtcccgagtttcgcccgtgtccttgttccgcaccgagacgctgatgtccttggccgcgcggcagtccacatagataaagccctggccctttttggtgaccggcgcggtgaaatcggccgaagcggtatcgcccacggggttgactgaaaaattgtaaatcccgcccacgctggccatatccatgctgccttcgtccacctcgatcgcctggaactcatacaggtcggcataattgccggtcatggcggagagcagcccggactgggaggtgaaggggttccaggcgtcggccgaccaatcccggataccggccttgacaaagtagcccaccggcagcgccatggtgttttcatagatatagaagctgctcgatcctatctgcacgctgtcgatttttttaagctgcggatggctgctgagattgacgttcagcgccagatacttgatgccgaacagggaatcgaccggcgccacaaagctgtggtacaaatagctgttgactccgttgatggcatagcctaggctccccataaacttggtggtcttataggaattgctggaggcaaacacgctcagaccccggtaatgatacaaggcgggatccaccgtggtgcggcgggggagcttttccatacggtaaaacgcgccgtccgactgggcgtccccgtaccgcttcatcttgtccaccgccgcacggcccgcggcggtgatgtcgttatccacataatcgatgtgatcgatgtaatactcgttgccgttcaatgtcttgaaggtatcgccagcctggaaggtcatttccgccgtcaccaccacaagcagcagcgccacggccgtttttacacgcagatggcggcgggagacgaaggcgaggatcccgacgtacaccgccaccagcagcaggctgacataaatggaggtgaagccatacgcctcgtcgccaaaccgatcctcgatcatcaggtaagccagcagccccacaaaggtgccgccgacctgcttcaaggagatatccttcaggcgggtcaaggtttcaaaggcgataagcaggagcacaaaacaatacaggaaggagaagcggtagggcaggtcgttgggggcgtggaggccatgccaaatcaaatccatctggttgaccaccaggctcagcgccatgaccgccagcagccccagataggccgcccggcggcgcaagggaatcgaccgggtggtagcaaaaaccggcagcaggacaacggacagcaggccgcagtacagattgggcaggttgcccgaccggatggtgggagatgtttcgtacagatgccggcccaacagattgaagatatcgaaattggccttgatatccggcagggtgccgccggcggccgaggtctgccccagggccatggccaccgggatcagcaggaacatggccaggccgccgcccaaagcggagccgaccacaaaacgaaggaaggatttggcctgccggccggcttcccggcgcttgcgcaggaaataaaccgcgtagtacagcaccatgaacaggcaaatcatgaatccgatataatagttggcgtacagggcgtacgccagggacagcacgtaggtcaggaatttccccgtgcgcatcatccgctcaaatcccaggaccaccagcggcagaatcatcacgcaatccagccacatgatgttccaggaataggccagcaggtacatcatcatggagtacatgatcgccacgatgcacacgctcatatcccggcggcggtaaacatattggagacaggcggcgaacagcgctgccgtcagggcgtttttcagcagggtgatgaccagcagagcctcgggcagcaaatgctcggggaacagcaccaaaagcaggttgaaggggctggccagatagtaggcaaacaggggcagatagctgcttcccaggcccacatggaaggaatacagcgggctgccgccgtgcagaagcatatcccgcaaatctgccagaagaggggcgtattgatggtgcatgtccacaatcaggccggtttccaccccgaccggccacatgccgagatacgcgtaggccagggacatgcagacaaggccgagcaggccggccatcagcggatagaaccacgctttgcgggcggcctccggcttgttgggatcctgcgtggcaatccccaggaacaaagtgatcagggcggccaacagtccggccatgccaatgggatacacccactgctgcgcggtagtgctcagccccgtatcctcccgcagcagcatgaaggcggccaaggcggcgatcaaaaagatgatggcaagcacgcatcctttgaccagctggaacgtcgaaatggaggaaagactcgtctttttcatagcggcatcctttttcatcgtagtatggcggcccgttcatcccgccggaattcatacaggcacaattataccatacattaccggtgcaaacaaccactaaacggcgggcagacaagcaaaaggcccgccgttctccaaggagaacggcaggcccggcgcagtgaagaattattcgatcgtcacaacgttgctgatcttatcgacgcgctgtttgctgaagatgttcttttccgcatagaaggtaacacacagacgataatcggcatgcatgagaacacggaggtcctctttagtgaaggagaagcggttggtgttggtggcaaaatagtcgtcgaactgaatatagtcttcccaaacgtggttgtccgtattgaacttctgcagcttgaaatccacgatgccgatttttttcacgacctccaaggattccgaggaaagagtaaaggacagggagccgcccgtaaattgcttgtcatgataaaaatcaatcccatagtaggaaagcagggccgcgcggggtgccgcctcgccggcagccacctcactgaggacatacccgccgttgggagcggggacgtagacaaaaggattgtcggcagtctccgcgctcacctgaggaatcgccacaacggcgaacaggcaggccatggccagggtcagactcagcagtcttttgattttggatgatcttttcattgttttacccccattttcttttctaaccattggtcggattcctcagattacatcagaatctgccaacgcatacaattttacgtcatttttagataaatttccatatattcccttgattcttacattattccaggttataaccagtttttggtacatgtcacctgcttgacatttgttaaatttagtaattattggaataattagcatatgaatccctggtatattcctcctgtttaaataaattcaggattttaagggggttatatgtaagaaaagtgaagaaaaacgcaatattgtgttgtttcacgcggtttttatgcaaaaatccggaaataatcggcggttttttcgcaaaaaagcgatttttaacgcatgatagcggtcaatttcgcacgaaatcacacgggtagctctacatcgggaggaatacccggcgaaaaaacagacaggcgaggggaaaagccgggcgtggagggagcagcgcccaaggtaagtgatgattaaatccagtggatggattggtgaagggaattttccccactgcaaggaaaaaccgcaggaatactatcgtattccgagggcttttgacgcagaagtgggggagatttccccgccgagccgccgccgagccgccaggcgcgatttattcagcgcttaaggtgagggggaggcgaaacggacagcgaaaacggcggaacagaccgcgcccccggtgcggcgccaagcgctgaaccgggggcgatagggggaacgtacgaaaggccatccccgaaggcgggcccaatacacagcaaaaggccccgccttgacggcggggccttttgctgtgtgggaaaaaagtatggccttgtgggaggctcgatactagcgggttttggggagactggcagccgccaccgactggccgacacggcggatcttctcatcggggagatgcagctccatggaggccgcggcgggatattcctcatccagcacccggcgggcctcggcaatcacgatgtcgccgccttcgccggacatgacgcggccgagcagcagcacgtgggaaatatcatagaagttggcgtaataggccagggtgtggcccagatagacgccgatagagcgatagatgtcccgggcggtctcgctgcccttgttcatctcgccctgcaccaccttgagcttctccgccggagacagagaggcgtcgagctggatgccggcgcggggggccagcttaatcacgctgtcctgcgagaaatacttcacgccgcagccgatgtcgcccgaccactcgtcctccatggcgtcctcctggagatccacgggggcgaaggccagttcgttgagccagccggtgatgttgccgtcgccgtcgacgtagccggcggcctcggaggtgcccatggcgatgccgaggatgcggttttcctccagggacatggccccggccagggcggtgacgtcgccgtcattggccacttccaggggcacgtcgcccagttccttggcggcgcggatatagatgtctttcacctgtttatcaaactcgtcccggggcacctgcaggaacagggaggccaccatggcgcggttatcgacatagatgccagcggaggacacgccgatggcgtccacccggggcattttggaagcggcggatttgaaagcggaaaggatcccttcataatgataggcggggtcgctgttggtcttgggataccagaccacctcttcggaatagacgggcacgccgtccaccaccgcggagaccttgcggtcgcttccgccggcgtcgaagccgatgcggcagccgtccaaattccggcccaccggtgcggaggcggaataggcctccggcgtttcggacagggggcggatttccacggtgaagtcccgctcatacacgcggcccatgaagtccgcgtcgaacgcgcgggcgccgccgggggcgtaggcttcggcgatataacggcccagggcctcgtcgccgcagaccaccactttccagccgccgtaagcccacagcagcattttcacggtgcgttccacatacaccttgtccgccttatccatggcgggggtgccgtgaatcttcagacggcgcacagccacctggccctggttgcgctccacggccacggcgatgtctttgccgtttttggcggaggcctcaaaggcggaggtgaaggcggccatggggataaaccccttgtccaacacaggggtattttttatcgcgacctcaatgccgtaaacattcatcggggatcctcctcaatatggaatgcaggcgcgcggcctagcgcggagcctgtcgggcggggctttcccctgccgcgactctgtacctccactatagcaaaaccggccggaaaaacaagagaaccgggccgggtatgccggcgaagtcaaaatttccgcccgaatgtgcaaatgcacgttcgggcggtgaatcatgcaaatgcgcctgccggcgcggcccctccttagtctgcgccgcccgggaggaaaatacccgccgcgccatgaaaaattttccacgggaaagcgattccatggcatggcgggggacagggccgcatatataagggatgtacgcccttgggagcgacggctgggggcaaagagagggaatccgcggcagccgggcgaaggggcccgcaaagaaatggaggttaaaaatgaaccgatttttaccggagggggcgcttttggacaccccccacaatcaactgaccattcggtcggccaccaacctggcggaggccgccatggaggggcgggtggtggaggcgcgggccgtcctgtgcgacgcggatcacaatctgcatgtggaaatgccctgcatggagggcatcatcccctattatgagggggccgtgggcatcgcggagggaacgacgcgggacatcgccctgatttcccgggtgagcaagccggtttgctttacggtttcgggcttcgagcatctgccggacggacggcggcgggcggtgctgtcccgccgggacgcccaggaacggtgccggtacgaatacatacaaaacatgcggtgcggagacattgtgcccgcgcggatcacccggctggagactttcggggctttctgcgacatcgggtgcgggctgccggcgctgctgcccatcgcggggatttcggtcagccggatctcacatccctccgatcggtttgtgccggggatggacattttcggcgtggtgtcctccctggaaaacaaccggatttgcctgtcccagcgggagctgctgggcacgtgggaggaaaacgcggcgctgttctcccagggggagacggtggcgggagtcgtccgctcggtggaaagctacggcatatttgtggagctgacccccaatctggcggggctggcggagccccgggaaggagtccgggtggggcagcacgcgggcgtgtacatcaagagcatcctgcccgacaagatgaagatgaagctgatcatcatcgacgcgcaggattccgacaagtccctggcgccgccccggtattttctcaccgggggacacatggaccggtgggtctattccccgccggactgcccgaaaatcatcgagacacggttctcggcggaagaggcggcctgcgccgcgacataaaatagagattaggggctgttgcaaaagggatttttacccctttcgcaacagccccaatttgttcaggcagtcaaaaaagtcgataagcggccggacggggacgatggatcgcggcggccttgtaggggcgcgcatcggggccaggctggcgctggctctttggaacgaggagtgaagcggcaaaagggggatctatccgcggtgtagataggcggggtgggatcacctcgagaggaaggctatgcccaccgctgtgctttacctatcctatgcagcggaagggcgcttgtttttatttggttttgattgacgttcatttaacaagggactatactgaggtttgaacgcgccgcttttgactatactatattcatataaggagtggaaacgcatgggaatctttgatggaaaagtcgccattatcaccggcggcgggaaagccaaatccattggttacggcatcgccgtcgcctacgccaaggagggcgcggatctggtgctgaccggacgcaacgagcagaagcttctggacgccaaggaggagctggaacggctctacggcatccgggtgctggccctgcaggcggacgtcacccccgacgacgagtcggaggaccgggtcaaggaggtggtgcgaaagaccatcgaggtcttcgggcgcatcgacgtgctgatcaacaacgcccaggcgtccgcatctggcatcccgctggccatccagaccaaggatcatttcgatctcggcatgtattccggcctgtacgccaccttctactacatgcgggaatgctacccatacctgaaggaaacgcaggggtcggtcatcaacttcgcctcgggcgccggcctgttcggcaacgcggggcaatgctcctacgccgccgcgaaggagggcatccggggcctgtcccgggtggcggccaccgaatggggcaaggacaacatcaacgtcaacgtggtctgccccctggccatgacctcccagctggagaattttcaggtctcctaccccgaggcgtacgagaagaacctgcgggcggtgcctatgggccggttcggcgacccggagcaggacatcggccgggtgtgcgtgcacctgggctcccccgacttcaaatacatgtcgggcgagaccatcaccctggagggcggcatgggactgcggccctaaaacagagacgcaaggggccgcggcagggatgccgcggcccctttattttctggttgcaaatcccgccctgtgtgctatactgagcatcggaaaatcggtgagaacagagggacgggcatgaaacggacgaacgatttgggcaacgacagcatcccccggctggtgctgcggctggcgattccggccatggtggcgcagctggtcaacgtgctgtacggcattgtggatcgcatgtatatcgggaacatcccggacatcggagaaacggcgctggcgggggcgggcatctgcggccccatcgtgacgctgctgtcctccttcggcacgttggtggggctgggcggcgcgccgctgctcaccatccggatgggcgaaaagaacctcaaaggggcgcggcagatcctggccaactgctttttgctgctgctggtgctggccggcgtgctgacggggctgctcctgctcatcaaacgaccgctgctgctttggttcggggcgagcgccgccaccctgccctatgccgacacgtatctgaccatctacacggcggggacattttttgccctgctggcggcggggcttaactatttcatcatctgccaggggtattccaccaccggcatggccacggtgctgctgggggcggtgctgaacatcctgctggatcccctattcatcttcacgctgcgcatgggggtggcgggggcggcgctggccacagtgctgtcccaggtggcgagctgcgcgttcgtgctgctgttcctgttccaccggaacacgccggtgcgcatcaccttcggcgggtattcggcgcggattatccggcgggtgctggccttcggcctctcccccttcatcatcctggccaccgacagcctgctgctcatcgtgctcaacgcggtgctgcagcggtacggcgggcagggcgagggcgaccggctgatcaccggggcgaccattgtgcagagctacatgatgatcatcaccatgcccatggcggggatcacgggcgggacgcagcccatcctcagctacaactacggcgcccggcagacggcgcggatccggcagggaatccgctggattctgctgctgtgcctggttttcaccggggggatgttcgcggtttcccagctggcgccacgggtgttcgtgcggatattcaccgccgatccggcgcttatcgacctatccagctgggggatccggacgttcaccctggcgattatcccgctggggttccagtacacctttgtggacgcgatgacggcgctgggaatcacccgggtgtcggtatcgctcagcctgttccgcaagatctcctatatggcggggacgctggcgttcgcggcgctttggggcgcgcgggcggccttctacgccgagccggcggcggatcttctgggggcggcggtgtccacgctggtgttcagccggctgttcgggcggctgatgcgccggcgggacgccatgccggaaggacaggcgctgtacacatgaggcctagggccggcaggcatacagccgctcgagggcggcatgggcccgctcgagaaaggcggagacggacatagcccgctcgtaccggccgaaggcctgcacctccagggtgagagccccgtcgtagccagtcgcggccagccgggccatgagagcgggccagtccacggcgccgtcaaagggcaggaggtgctgatcccgcgtgccgtcgttatcgtggagatggagagcggcgaggcgggagccataccgttccagatagggctccccctttccccagccgaaatgatggccgctgtcgtagcagaagcgggtgaaggggccggtcagcgcggacagggcggcgtgcagatgggcggcgtggcgcaggttttccagcgcgaggacaacgccgcggcgttcggcggcggcctccacccgccggaggcggtcgatccccaggggagacggcggcggcggggcggggccgtccgtcagatgggccaccaggacggggacgccggaggcggcgcagccctccagggcctcgacaagggaggcggcgtagcggtcgccgtcgtcgccgggcgtccacagggcattgaccccgtcaaagggagcgtgggcattctcaacccgcaggccggcgcggcgggccagctccggctgacgatgcaggggcgggccgccgtcgaacgcgccccagaagagggacacggtatcgaagccggcggcgacgaggcggcgcagggattcctccaggggcagatcgtacccgaaataggcgaagataccgaagcctgtcatgcggctccccctttccacccgatggggcggcacaactcacccggatggcggctcgtccacgcggggagaaggggccgccgctccgattggataagaaaacggacctattttatcaggaatttaagaaaaatgcaattggacatacagggacgcacttggtataataaaagggttcataggaacggtacgaaagggggcgaaggctgttgcacggaaaatggggcagatccttgctggctgtcctgctggcgggcgcagccctgctggggctggcgggatgccatagggacacgccgctgggcaagagctttcgcttcccgctgagcgcggagccgcggcagctggatccccaggtctccaccgacgcggcgtcggtgacgctggtggcggcgctgttcgagggactggcccggctgaacgagaacggcgaggcggtgccggcggcggcggactggacggtttccgacgacgggcgggtgtacaccttccggctgaaggaatcctactggagcaccctgcccaaggcgaagaagggggaaacccccacggtctgggagcagccggtgaaggtgacggccgcggatttcgtgttcgggatgcagcgggcggtgatgcctgaaaccgggtcggccctggcggcccagctgttcgggatccagaacgcgcaggccgttagcgaagggaaaaaggcggcggaggagctgggggtcaaggcggtggacgaggacaccctgaccatcacgctgaccgaggcggacgcggggtttcccgttaagctggcggggacgcccttcatgccctgcaaccgggaattcttcgagtacaccgccgggcggtacgggctggaaaaggcctatgtgctgaccaatgggccgttcagcttgggggcgtggaaccacggccagtccctgctgctgaacaagaacgagcagtaccacgaggcggaggacgtgtatccggcgacggtgcggtacgtcatccagccggaggcggagacgggcgaggcgctgctggccgggacgctggacgcggcggcgctgcggccggatcagctggaggcggcccgggagcaggcgttccatctggaggtcatggacgacaccatcgagtatgtctggctgaacaacagcgtgaccgctttgtcgaacgcctccatccgccgggcgctgcgggacgcgctggcctacgatcggatcgcggagcagctggacaagaccatctgcaccctggcccaagggtatatcgcccccgacgccatcctgaaggggacggagccctaccggaacgcggacaattcccgggcggtgaccaccgaccgggacaaggcgcgccgcgagctgagcgaggggatggcggccctctcgctgaccgccatgccggcgctcaaggtgctgtgcgccgacgacgcttacagcatcaacctcgcgcggtacgtcatccagtcctggcagagccatctgacgctgtatttcaccctggatccggttcccgccgaccagctgcgcgcccgcctccaggtgggaaattatcagatagccatcggcgcccagacggggggctccctgtacgccatgggcgggctggcggccttcctgtccgacgcgccggcaggaaacctggccaagtacagcagcgcacggttcgacgagcagtacaaaaagctgtcggtgggagacgtgagccgggcggacgtggacgcgctggaaaagctgctggtggaggaatgcccctccatcccgctggattttcagaaacggaccatcggcatccccgcgaaaaacagcggcatcatcctgcgccccttcaacggcggagcctacggcgcggccgtcgatttccgccacgcggggaagctggactaacaaagaaaggaacggatatatggaagacaagcattccgccaaggattgccggttggccgtcctcatcgacgcggacaacgtgtcagacaaatacatcaagtatattctcgacgaattatccaatgacggcaccaccacctacaagcggatttacggggatttcaccaaatcggccctggggtcgtggaaaaacgtgctgctggacaattccatcacgccggttcagcagtatgggtacaccacggggaaaaacgccaccgactcggccatgatcatcgacgcgatggacattctctattccgggaacgtggagggcttctgcctggtgtcgagcgacagcgatttcacccggctggcggtgcggctgcgggagtcggggatgtacgtcatcgggatgggcgagaaaaagacgcccaacgctttcatcgcggcctgcaacaagttcaagtacctggaggtgctcgagcaggccaaccggcccaagccggagcccaaggccgccccggcaccggtggagccggtggaatcggaaatgacgcccctgtccaccatcaaacgggccatcctcaccatcgtggacgaggtgtccgacgaggacgagtgggtacccattgcggaaatcggcaaccggctgcctaagcggtttccggagtttgacgtgcgcaactacgggttcaaaaagctgaccccgtttgtcaagtcgctggggatcctggacgtgcagtccagcccctccagcgcgggaaacagccggctggtattcgtccggctgaagaacaactgagaaaccatagcatcggttgacaaaggggccgcacggtttgcccttgtcaatgaatgctaccatagaaggagaggacgcgtatgaagaaaattgccatgacgacgccgctggtggagatggacggggacgaaatgacccgcattctctggcagggaatcaaagacaagctgctgaccccgtttgtggatctgcaatgcgaatactacgacctggggctgcggcatcgggacgacaccgacgaccaggtgacggtagacgcggccaacgccatcaagaaatacggcgtgggcgtcaaatgcgccaccatcacccccaacgcccagcgggtagaggagtacggccttaaacaaatgtggaagagccccaacggcaccatccgggccatgctcgatggcacagtgttccgcgcgccggtcatcgtcaagggaatcacgcccagcgtgtccacttggaagaagcccatcaccatcgcccgtcacgcctatggtgacatctacaagaacaccgaaatccgggtggagaacgcggccaaggcggagctggtggtcaccggcaaggacggacgggagacccgccggctgatccacgatttcgcgggcggcggcgtggtcatggggatgcacaacaccgacgcgtccatcagcagcttcgcccgctcctgcttcagctatgccctgtcgattaagcaggacctgtggttctccaccaaggacaccatttcgaagatttacgatcaccggtttaaggacatctttgccgagatcttcgaggcggagtacaaggaggcttttgagaaggcgggaatcacctatttctacaccctcatcgacgacgcggtggcccgggttatccggtcggagggcgggttcatctgggcctgcaagaactacgacggggacgtgatgagcgacatggtggccacggccttcggctctctggccatgatgaccagcgtgctggtttccccggacgggaaatacgaatatgaggcggcgcacggcaccgtcacccggcactattaccgccatctgaagggggaggccacctccaccaactcggtggccaccattttcgcctggtcgggcgcactgcgcaagcgggcgcagctggacgggctggccgacctggaagccttcgccgaccgactggaggccgcgaccctaggcaccatcgaggacggcgtgatgaccaaggatttggcgctgctgtccaccctgccgaacaagacggcagtgggctccatggagttcctggacgcggtggccgcgcggctggcggaataaaaaacagacagggcccgtgccggaaggcagtagcccataaggaaacattgcaaaacttatgacgaatgtcaggtaaacggaaaaagaacaactgctatgcaaaaggtttatccgatgcatagcagttttcttttgttcttctatttggttatattttttcagcgttccaacggaacgcgcagccattgccagcggcaatgatctcagaggtttggggatatgtcaccaacaagcatgaaaaaatagagaaggtggctttgcagatcacaaacggtgtttatccccaagaggacgttacgctggtttcgcatatcattgggctgttggggcaaagactttggttttaccgaaagacaaatggatattccaataaactaaagatcaacaataccctttttattttcagtatggattgtaatgagattgtaagaagtggccgctatactaaaatcataaaaagaacttggaggttttagttatggcaatccttgaaacaaaagatttacgcaagatatatggcagtggagaaagcgaagtccacgctttggacggggtgtctatctctgtagaagaaggcgagtttgttgctatcatcggtacatcgggcagcggtaaatccaccctcttaaatatgatcggcgggttagacctccccacttccggcagcgtcacgattcggggcaaagagcttttgaaaatgaaggacgaggaattgacaattttccgccgcaggaatatcggctttgtctttcagaactacaatctgctcccggtcctcaatgtatatgagaacatcgtgtaccccattgaaatcgacggcggcaagaccgatacaggttttgtgcaagagattatccacaccctcggtttggagcgaaaactcaaaaatatgccgaacaatctctccggcggtcagcagcagagagtggcgattgcccgtgcccttgcaacaaaacccgctattatccttgcggatgagccgaccggcaatctggactccaaaacaagcatggatgttattctgctgatgcaggctatcagccgtcagttccaccagaccaccattatgattactcacaatgaggaaatcgctcaaatggcagaccgcacgatccgcattgaggacggcaaggttgtttcgggaggtgtcaggtatgcacgctaaccggaataaaagcgcagttaagcgagtggaaaagggaatgatgaaagcaaaccgcacccgtaacctgtttgcggtgtttgcaatcgtcctcaccacgtttatgattaccaccgtgttcagtttgggcattaactatatggaaaatatgaagttaatgcaggtacgaacagccggtacaaccgcgaatgtatcccttgcgatgccgacagcagagcaggagcagcagatccggaacttggattatgtcaaaaccgtcggtatgcagtatatggtcggctcggttgccgaggagaacggcgaggggcgtgagctttccattgcgctccagtattacgacaccactgaatgggaaaaacactatcaggaagccattaaggatttggagggcaaataccccgcaagcgaaaatgaaatcatgctgtcggaggatgccctttcacagctcggcattacagaaccgaaactgaatatggaaattcctctgtcctactatgataaaaacggtcagcaggaaaaaactttcacattaagcggctggtttcattcctatacaggcacgggaatgggctttgtttccgaggcgtattgtaaaaacgcaggctacacaatggcacaggacggcattctctctttatcgctgaaaaaaatgcccgatgattttcaccgtattcaacgagatgtggagttaaacgaaaaccaatctttcagcggttcggtttcgatgaaaacatcaaacggctcggttatcgccatggtgatccttttggtgttcttcattatcggcagcggttatctgcttatttacaatgtcctgtatatctccatttcaaaagacacccggttttacggtttgatgaaaacgctgggtacaacacaggcgcagatcaaatcgctggttaaaaatcaggcagtcaagtttgcctgtatcggtatcccgattggcattttgttagctactgccgtttcttttggcattgttccccttgtcttgaatgagggctttgaacagggcaagtcgatgatggaggccgaggtgttcttccatccgtcgatctatattctgtctatcctcttttcggcggtaacggtttggattgcctgcaacgcaccggcaaaagcggcggcgaaaatttcgcctgtggaagcgctgaaattccagaacttcgcgccgaagaaaacgaaaagcagaaattccatcaatggcggcaagctgcacgcgatggcgttccacaatgtattccgtgacaaaaagcgcgctattcttgtgtttatgtccctgtttatgggtatcaccatgatcttaggcgtgaacggagtcatcggaagtatgaatgccgaaaactttattaaagcatatatggactatcactttgaatacaacgatatccagtttgaacagcctgagcagcccaacaaggaagtaccgcagtttgacgaacactttatagagcagattgagcaaatcgacggcattgaaaatgtagatattcaaaaaaccgtctgggcaggcattaagtttgatgaagccgctttagaaggctttatgaaaatcaaatatgaggacagcaaatataagtccaaagggcagtcctatgaacagatgatagaggcgcttaaagggtatgctgacgccggtgagtacggctgctatattacaactctcgacgatgataaggcgctggaagaatacaacgccaagcatccggatacgcccattgacattgcggcatttaagcgcggcgaaacagcgactgcaggaaaagatacagaacatcttgctcccaataccgctttggtgggtaaaacactgacgctgaccgctgacagtacagacggcaaagcaaccgatttcaaaatcgacggagctttttactatgacgattatgggaataatctttccgatagtattggcagacgcaaggacatttatatggtgcccaatatcatctttgtcagcgaagcgggtatggaacgcctgacgaaagaatcgatcatttccgcaatcggcgtggatattaagaatttcaatgacttggaacagattgacagcgaattgcaggcaatcaacagtaccttgaccacatcggagtggcagatgaaatctgccgtgaatcagaaagaactatttaatcagacgttctattctatcaacctgttagggaatggcgcggcgattctgctcattgtcatcggcttgattaactttgtcaatgtgatgctgaccggcgtagtggcaagaaaaaatgaatttgccatgatggaaagtatcggcacaacgaaaaagcagatcagaaagatactgaccttggaaggcggcatttatgccctcatctctacgctgctgattatgaccttcggcaatgcgtttctgctgctggtggcggacgccgttccccacatagcaaactatgcggtgtttgagtaccctgttgcacttgtcatcggtttgattgcggcaatctttgtgatctgcctgagcgttcccgccattgtttacaaggcgacttctgatgaaacggtcattgaacggctgcacaattttgataactaagtgagtttgcggaacagacgcagcgctgctgcgtctgctcctgcaattctatctatgaggaaaggcggtgagttttgcagctatggcaaatatttttctccttgaagatgacaaaattttgagcaagggcatttctatcgccttaaaaaaggacgagcatacggttacagcagtctatggctatctggaagccttgcagcaataccaaaaacaaaaatatgatttgttcctgctcgatattaacctgcccgacggcagcggtcttgcgctttgcgaaaaaatccgtgaaacttccgaaacgcctgtgctgttcctgaccgccaatgacaccgaggaagatatgctttccggcttttcggcgggctgtgacgactatatttccaaaccctttcccattaaggttttgcggaaaaaggtactggcagtcttaaaacggacgggtggcggagctgcccgtattcgatatcgggatttagaagtggataaagaaaaatgccttgttttgatgaagggccaggaaatacacctgacatcaacggaatacaaactgctcctttatctaatggaaaacaggggcagggttgttacaaaggccatgcttttagaccagctttgggatatagacgggaactttgtggacgacaatacggtgcgtgtgaatattaagcggctgcggcagaaactgaatgatgaaaagcaggaatacattgtgacggtttttggtatgggctatacccttggagaatgacgatgaagcattttggaatttacagaaaactgattttgattgcaggtactgccacggcggcggtatctgttggcgcgttcttttttatggaggacagcttttcccgtatgctttttgtcgtttctggctttgtgcttttatgcggtctgctttttctgctggactttctgcacaaccgctataacgataatctgttggaggagatcacactgctcattgaggctttggtggagcagcaggaacggacggtcttttcagaagccgaggacaccctgaccgcacggttgcagcaccagcttctaaaactccgcaatattttaagagcgcagaatcaaatgctggcgcaggaaaaagagcatatcaagaccttgatttccgatatatcccaccaaatcaaaacgccggtagcggcggcaaatacctttgcgcagctgctcggtgataaagcgttatccgatgaggagcgaaacgaatatgttgccaccctgcaaacatcccttgaaaagctgacctttttgacaaacagcctgattaaaatgtcccgtctggaaagcggcattatcagtctgaaacctgaaagaaacagcctgaatgatattgttctgcaagcagtaaaaactgtctacgcaaaagcaaaagagaaaaacataacgatcacctttgactgtgaacagatctttgaggcggtgcttgattttaactggacggcggaggccattaccaatgtgcttgacaatgctgtgaaatacacgcctaacggcggcgttgtgggtttaaaaatcaccgaatacccatcctatctgcggctggatatatctgataatgggattggtattcccgaagaagaacaggcaaagatcttcggcaggttttaccgtggaaagcagtcggcaggggttgacggtgtaggaatcggcttatatcttacccgtgatattgtgaataagcagaacgggtacatcaaggtggcatccgatgaaaacggcagcaccttttccctgttcctgaagaaataatatgaagagaaccatgcaatataaagaaggtggtcatatgggacattatctgtttttgacatagaagaattcggcaaacagattggagaaaaactatttatgcttcttgacgaggaacaaaagaatgctctggcacaatatgttttggggaaagcggtcgcaaatatccaacaaacctcttacaaattttgaaagtttctccgtataaattttctttgggtgcagacaataaccttgctatgaaaaagcaacggcggcggccggccttagaaaacgacagacggaggataagcgatgaaagcaacaggaattgtcagaagaatcgacgacttaggtcgtgtggtcataccgaaagaaatccggcgcaccatgcggatccgcgaaggggacccgctcgaaattttcaccgataacgacggcgaggtcgtctttaagaaatattccccagtgggcgaaatgtctccctttgcggcccagtacgcggacgtgatgtcccgggcctgcgggctgacggtgctcatctgcgatcgggatcacgtggtggccgcggcgggcggcgccaagaaggatttcctggagcggcggatttccggccagctcgaggaggtcatggaccagcggcagacccacgtggccaaggcgggtgacgcgagacggctgcagccggtggaatcggtggatcggtacgcggcggtggtggcccccatcgtggcggcgggcgacgtgaccggcgcggtatgcatgatgctgcccgagagcggcgccatcccgggcgagagcgacgtgaagctctgccaggtggcggcggcgttcctcggcaagcagatggaggaataaacgcaaaagccgggagatgcttggtctcccggcttttgttttaactcccgcagacataaaaggccgccgcggcagagggcgcccctcttccgcggcggtctcttggcattaccggcccagaatcccctcgtccaggaattcgtcgggattgtcccggatgtattccacgcacttttccaggggctgctcgacctcggcctgctccaggaaatcggcgtggagttccgcccgctcctcctcggaggaggcggtgaggacgctccgcaccgcggcggcgcagcccggcgcgcccacggcgtcaaaaccgtcggccgccagctccaggaacacagcggaggggccctcgagcacctcctcaaagctgcccgcgtccagctccttgcagatgagccacacgcagtacaccgcgttgcggccgtgggacagctgagacaccgttttataggcatcaggacggcgcttgtccaccttggccatgatgttggccaccacagcctccaccagctcctcgtccggcacctcggccagcttatccgcgtccatcaagccgtaccggcgctgaagcatttcggcccggctgtccttgcccttataatggctgccccagatgtacagcaccaccacgccgaccaccatcacgccgagcatgatgtaattgcccacccccagctgggaaaagaatccgtccaaaagcattgccgtcatatcttgtccttcctctccgcaggcgctcccggcgccgctattccatcaacaggcggtagatatcgccctttttcagcccggtctcggccgccgcgcgcttggcggcctcggagggagacagcccctcccgcacgtacgctccggccagggccgccccgtcctccggagaggcgggcggggcctgtggcggggcagcgccctcgaccaccaccacgaattccccccggggcgcttcctcccggtaccgggcggcggcctcggccaaggtggtgcgcaccacttcctcgtggatcttggtcagctcccgcaccagagcgatacgccgatcgcccagggcctccaggagatccgccagggtatagggcagcttgtggggcgcctcgtagaacaccatggtgcggggctcggctttcagcgacgccagatgctcccgccggctgcgcttgttcatactgagaaacccctcgaaggtgaaacggccggtgggcaggccggcgatggccagggcggtgaccaccgcgctgggaccgggcaccacccccaccggaatgcccttttcatggcagagggccaccagatcctccccgggatcggagatagcaggcatccccgcgtcgctgaccagcaccccgttctcccccgcgagcagacgggcgcacagcgcctctcccctcgtccgcttattgtgctcataatagctgaccaggggctttttgacgccgaaatggttcagcaggcggagggtgacgcgggtatcctccgcggcgataaaatcgcaggcctccagggcctccaccgcccggggagacatatccgacaggttgccgatgggcgtgcccaccaaagtcaaacggccgctcatagccgatttcacctcaacagtccgtatagtatttacggcgtatccccgccgtatatctcccgcatctgcgccggatggtcctggagccagggcggttcccatcgcaagccgggtttgccgccctttttggcctccaggagcagcagccagggggcggacgcggcggcgccctgcacggtgcgcagccgcttgggctccagcccgcggcggcgcagggcggccacgacatccgccagccgctccggccggtggcagaggcagaaccggccgccgaagcgcagcagccgggacgcggcggcaaccacctcgtccagggtgcccggctgctcgtgccgggccaggcgggcggcggacgacgcgctttcccgcccggatccgggcgggaaatagggcgggttgcacaccaccaggtgaaacccttcccggggcaggagaccatccaaatccgtccaggaggcgcagaggacggcggcccggccgtccaggccgctgcgcgccaccgatcggcgggcgagcgcggcggcggcgggctgaatttccacgccggtcacatgggcggcggcggaatcccgcaggaggagaaccggcagaatgccgcagccggtgccgagatccaccacccgctcgccggaccgcggcgaggcgaagcgggccaggaacagggcgtcggcgccgaagccgcagaagtcgtccaccgccacggccatgccgccgtccagaggctcataccggatggccacggccgtcccccccttccaatagaataccagacgggtagccccgcctaaaacgacaattgccgggcgtccccgctggggccgcccggcaacgcgttacgaaatcacttattcgccctgaggagcgccaacggggcaaacatccgcgcagctgccgcactcggtgcaaagctcggggttgatttcatatttgccatccccttcggagatagcggacacggggcattccgcctcgcacgcaccgcaagaaatgcagtcgtcggaaatcttatatgccattgaaaagcacctcctatattatgttcttttttataataccataccgcggcgaaattgcaaccggttttgtgttaaaatttctgccaggcgggcattattcttccaggttcgacaaattggcccgctcctccttgcccaccttgagcttgccgtcccggatgaccttgacatccttgcgatccatcaccacgggcggggaatcgggggatttgtccagccgcaccttgaccacgccggtgagaatattggcgtcgcagaccacgcccttgccctccttggtggtaaccaaagcacccaccttgggggtcatgcgcagcagggactcatacgcgtcctgctcatatttcaggcagcacatcaggcggccgcaggagccggaaatcttggtggggttcagggacaggccctgctccttggccatcttgatggacacgggctgaaaatcgctgagaaactgggagcagcagaagggacggccgcagatgccaaggccccccagcatcttggcctcgtcccgcacgccaatttgccgcagctcgatgcgggtgcggaaaacggaggcgagatccttgaccaaatcccggaaatcgacccggccgtcggcggtaaagtaaaacaggatcttggaattgtcaaaggtgtattccacgtccaccagcttcatatccagcttatgggccgcgattttctcctggcagacccgcatggcccgctgttccttttccgcgttctccttggcccgccgcttatcctccggcgtggcggggcgcagcaccggcttcaggggcttgacgatggtggaatcggccacctccttattggggatgaccacctcgccgcattcgatgccgcgggcggtttccaccaccaccagactgcccttttccagctggttttggccgggatcgaaataatagaccttgccggtattcttaaaacggacgccgataatcacagccattcgcttgtctcctatcgtttatagaaaagttcaccgcccggccgcggcccgcaggcgggcgcagaacagggtgacaaacagggtggcgttcatgttgcgcaggcgggcctgctccagcccctccaccgtttccagcagggccatgagctgcgcccgggtgagggcgcgggccagcttgtccgccgtttcaggcgaggtggacagacgggaagcggccccgcagcgggcggccagcgcgtcgcggaagatccaccgcagcgccccgagcaccccatccagagcctccttgtccttatccaggccagcggtcaggcggagcagctcgatttcgtccggggcggcgacggcggccgccagggcgggggccaactccagcacccgacggaacgtgccctcctccatcccgtggagaacctggccaatcacgccgccgaacacgatgagggcccgcttcagctcctcctcgccggcatcgggcagccgctgccgcagcaggggcagggcttcctcctccggcacgccgcccagggggatgcacaccgaccgggactgaacggtgggcagcagctgggcgcggttgtcgcaggtcaggagaaacaccacgtgggacgggggttcctccaaaattttcagcagggcgttctgcgcctgctcggtcatattgtgggccccgatgagcagaatggcgcggcggggcgcctcattgggcaggacataggcgtcctcccgcacggcccgcacggcgtcgatatgaaaggaccgggccgacccgtccccgcccacctcgatgatatccgggtggccgccggccgcggccttgacgcagccggggcagacgccgcaaggcttgtcccccgccccctggcagacggccgctttggccagcaggcgggccagggtgcgccggccgctcccctgcgggccctccagcacgagggcgtggggaaaccgcccggcgtcgatatcggcggccagctgccgcttggccgcctcgttgcccgcaaagccttcaaatcgcatccttacagcttctcgtaccgctcaatgtcggtgacgaagacagtggcgccgcccaccgtgacctccacggggaaggaggcgtaggtggaggtgccgtaggtggagctgggcaccatctgggtgcgctttttggagtgcttctcgatgatggagatgatctcatccacccggctgtcatcggtccctaccaggaaggtggtgttgccggccatcaggaagccgccggtggtggccagcttggtcaccgagaacccggcgcgggtcagcgcggacgacaccgatccgctgtcgtccttattcacaatggcgaagatcagtttcatagaacaaatcctccgtttcatttagagaacgcgtcgcgcggcaggttgccgcttttatattatactgtattttatgcgccgttacaaggtttttaatacaacaatctgggaaaatccggcgatttccagcatccgcgccagagccggcgacagccgttcccccgggacagcggcggcgattccgggcgggcagggacacacgctgcgcgcggcgatccggccggccgcctcccctaccggcacggtttcggcggggcggaggagggcatcccggggggacagcaccgcctcgggccgttcgtccgccaaaaaaggggtgaagccggcggcggcgcctacggacaggcgggcggcgggcagctcccgcagggcccgctctaggcgggcgaactcctcctcggtgttgaagggggtggggatgaggatcgcataccggctgtcggtgtactccggttcgcagccccgggcgcgcagataggcccccagggcctccccgctgacgccgccgggcgcgccatccagcaccaggcggacgggatcccgcagggcggcgggccgctcggaaaaggcggcgcgtacgacgccggatgcgtccgccgcgcggcgcagggcttccacccgctccgccagggcgcggaaggcggcgggcccgctctcctcccaccaccggcgggccaaatccagggaggccagcaccggaaaggcgggcgaggtggatccgaacagagccatggcggccttggcctccacccggctgacgggagctccgggccggatatgaagccaagcgccgccggtgagtaccgggagggttttgtgcgccgaatcggcggtcatcgccgcccccagggccaggggatgccgctcgaaggcccccaagtgactgccgtgggcgttatccaccagcagggggacgccggcccgccggcagaccacggccatgccggcgatgtcgcacagattgccggcatagtcgggactggtgacatatacggcgcgtatacgcctgtccgccttcagcgaactttccacactttccacagagggctgttgaaaaccgttgatttccgtcatatccggccacagccaggtcacgtcaagaccgaggagggcggcggcgtgaagggcgctgcggtgggcgttccgggccatcagcacccggccgccggcccccgcgcccaggagcagcatggcctggatacacagggtacagccgccgccgctgaaaaacgtctgggaggcgccgaaggcgcgcgccgcctggatttccgcggcctcgatggcgtcgccgccgtcgtacaaactgccggtatcgggcagctcggtgaggtcggcggacagggtggacagacttttcaacacaggggcccggcccttgtggccaggggtgtggaaagatgccgtttttcgataaagatgagcgccgatggcgttcgcgagtggcgtatcggcgttatacatcggggaaagttccacgggcagcatctcctttatatgctaaggactccagaggcttccagggcgttatgtatcgataaacgataattttttgttgacaaatagattcctgtatgctattgtggctcttggaaatgcaaatttcaagtagtggaaagcaaggaggaacctgctatggactatgggatagacaggccggccgagctggcggtagaggcgacggcccggccggcagccaaaaattataccctgggggacggactattcgcgctgttctgcctggcggccggctatatgggggtgcgatggtattttttcgggagctacggcatcggcaccaccctgctgttttttacgctgggagtgggaatcagcgtgtatctgcggggcaagggctgcgccctcggccgcgcctactgggcggggatactcctgctgctggggttcggtacggtgttttccctgttccggcccagcttcgtcaccttctgcacggcggtgtttttgctgctgctgctcaccctctgggcgtaccgcaccgccatggacgatggcaaggggctgatccgccgccactggccggcggatcaggcgcgggccttcctggtgatgccgtttgcctctttcggggcggcggccggctccttcggcgggctgttccgccgggtgcccgccgggaaacagacgaagcgggtggcgctggggcttctcatcgcgataccggtgacggcggcgacgggcgtgctgctgtttcaggcggatgcggccttcgcggggctgctgaccacggtatgggacacgctgttcggcggctttgagctcaacatcttccgcagcgtaatgcgggcggcgctggcggtgccaggagcgttcctgctgttcagcgcggtgtattccgggcggagccgctgctgccccacggccttcaccgacgaggggatggacgagacccggcggcagctgcgggtgatgccccgcacggtggcggtggcagccatgacgccggtgtgcctgctgtatctcgtgtatttcgcgtcccagtcggcgtattttttgtcggcgtttcaaaacctgctgccggcggggtacacttacgccgattacgcgcggcgggggtttttcgagctgtgcggggtggcggtgctcaacctgacgctcatcgcgctgctgcaactgttcagccggcgggacgcggacaccggcaaaaagccggcagcggtgcgggtgtacacggtaatcctggcggtgttcaccctggcgcttattgtcacggcgctgcgcaagatgctgctgtacatcgatgggtatgggctgacggcgctgcgggtgtacacctcctggttcatggtgctgctgggaatggtgttcctgttggtcatcgccagccagttggcgacccggctgcatttggcgcgcggcatcggggcggcgttcatcctgctgttcgcgctgctgaatttcgcggacgtggatgcccggatggcggcctacaatgtggagcattaccgcagcggggacttggagacgatcgacgtggcccatctgcgggggctgtcggaggcggcggtgccggcggcctatcccctgctgcgggatcaggacgccgaagtggcgcggcaggtgcggcagtggtatcgggagttggagacagagctggagaaccggccgcccatggagtggtcgctggcgtcctaccgggcggagaaggcgatccggctggccaggcgggatcatctgttagccgacgggacggagatcctccccccggcggcgggagaccgcccggtggatgaaatagatatatggcaggccgaggttggtttccagcagggagttgacgataagcgggcctagcccctgggcgcggataccggtcaccagcagcacggcctcccaggcgaactggaccaggatgccaatggcgagaatccaggggatggggattttgcgggaggggtcctgagcgcgcaggttgtgcaggcacaggatggcatagcccacgaacaggaggagggccatgaccccatgatagctgtcgctgccccgggaaatggcgatttcaccgaagccggcgccgaaattccggctgagcagcgcggtggcaaaccagccggagacgatgagcagcgaccattcgagcgtgtggccgtcccggtcgagccagagccagatccacacgaagttggtaaagccgtaactcatactcagccagagcagaaaccagaagggatcggccccggtgacggtgcgggtaccaaggagctgatagaagattccgtagtccacggcgaagtagagcaggccgcccagaaagccgaaaatcgcggcggcgtaccgcttcagcacgagaagcgtcacggccaggaaaaggagaaagccgatgtcgaggtagatatacagagtgttgagcacacgggaggctacgatttcgcccataggtttcggctcctttgcgtttttgttggagatcgtgcagaatcctggttgttagtataccacaaaagcaagcaaacgacgtttgcggggggcatgacagtgccccgccctgccgcagcagggtcttttgatggtacaatgttctccgtaacggaaagcgccgctttccgttagccgcgcagccgcgcggttcggcgcgtaccaccgcgccggtcacggaggttattataccacaaggcggtgcggagcgccgccctccttagtacggaacggctctgcccgttccggagtggttcaatgttctcccagccgtcggaaatctcggatttccgtttacggcgtgaggttattataccataacagagtaaaaaatgcgcgcagccggtttcggctgcgcgcgtcttttatagggagcttatttgaccagctcgataatcgccatttcggcggcgtcgccgcggcgggcgcaggtcttgatgatgcgggtatagccgccattgcgctccatatatttgggcgcaatttcatcaaacagcttcttggaaacgctctccttggtcacgaaggcgtaaaccaggcgcttgttcgccagggtggggttcttggcaatggtgatcattttttccgtcatgctccgcacctctttggcacgggtcacggtggtttcaatccggcccttctcaagcaggaaggtgaccatcgcgcgcagcatcgccatacgggaagccgtgggtctgccgagctttctggttccaggcattgggattcactccttttccgaattcttggaagacattccggggatccctagggttcccggcgggtttattcttcctcgtcgtacaggccgaagcccaacgacgccaatttattgataacttcctccagcgatttgcggccgaggttgcggaccttcatcatatcgtcttcgctcttgttgatgaggtcttccacggtgttaatgcccgcacgcttgaggcaattgaaggatcggacggacaaatccagttcctcgatggtcatctccagaaccttttccttgcccttgtcgtccttttcgaccatgatggagtcgccggaataggtctctcccgacaaatccacaaacaggttcaggtgctcggtgagcaccttagcgcccagagacacggcctccttggcgctgatggtgccgttggtccacacttccatggtcagcttatcgtagtcggtgatctgaccgacacgggtgttctccaccgtgtagttgaccttgagaaccggggtgtagatggaatccaccgggataacgccgatgaccggagccatctgctgcttattccgctcggccgggacatagccgcggcccttatccagggtgatttccatatacagcttggcaccctcgcccaacgtggcgatgtgcatgtcgggctcgagaatctccacctcgctgtcgcatttgatggagccggccgtgacttcgccggggccttccgcttcaatatatacaaccttggggccgtcgccgttgatcttgacgatcagacccttgatgttcaatataatttcggtaacgtcctctttcacaccctcgatggtggaaaattcgtggaggatgccgtcgattttcacggaggtcaccgccacgccgggcagggaggacagcagcacgcggcgcaggctgtttcccaaagtggtgccatagccccgctcaaggggttccacgacaaacttcccgtacgtgccgttgggcgcaaggtccacggcttcaattctgggcttctcaatctcaatcattcaaaaccctccttataaaaaacggattgggggaacggacacaaggcttctcccccacgtccgcggttggatgtcggtcagaaccggcccgccgggacggcggaaacccgccgccggccggtggttcttacttcgagtacaactcgacgatgagggtttcttcgatggggagatcgatgtcctcgcggttgggcaccgcgacgattttcgcttccagagtctcacggttgagctccagccacttcgggatgggccggcccgcgttggcctcgacaatcgccttcatcttatccagggaacggctgccgtccttcatggcgacaacctggccgggacgggtcaggaaggaagggatattgaccttgcggccgttgacggtgaagtggccgtgatccaccagctggcgcgcctcggcgcgggagctggccatacccagacggtacaccacgttgtccaggcgggattcgagcagacgcagcaggttttcgccggtcacgccctgcattttctcagccatttcgaaatagtggcggaactggccttccagaacgccgtagtagcgcttggcatactgcttggtgcgcagctggcggccatattcggacgccttcttgttgcgggcctggccatgctggccaggggcgtaagcgcggcgggccacggagcatttagccgtatagcaccgctcgcctttcaaaaagagtttctgtccttcacggcggcagagtctgcacaccgcaccggtatatctagccatattggttgcacctcctgaattggatgatcagacgcgtcttcttttgggaggacggc

SEQ ID NO: 3673 - DNA, 32759 bp, Unknown
  16S sequences of unknown bacteria
tatgcaattaatagtgaaagggatttccgaaaaacacaacaaaaaatatcaaataacatagaaaacagccttcaaatgatagcataaagtcggatattcgtaaaagaatgttcgactttttgatttaatataaaaaacagaaagagagaacaatgcaaaagttttctcttttttatgccgttttgaggggtgatttcctgtttgcagtgagaaaaattataataaaaatagtaaagataaaggaaaacttatgaaatataaagaatgtttgcatgagatgtttaggtaactaataaataaattaagttaccctatgctaaccatttgatttttttgttgtcaatctgtataatataattaaagaagaaaatgattttggacaatggacggattttgccggaatgttaaaaagagataatgcttgtcaattcgtgatagttaataaaacatattctaatgtggtgcaagtaatacttgcaagagcaaacatagaggagaaaaggtattcgttacagaataaaaatgagatagagaagcgaaaaagataactgaattgtaattcagaacttaataagttttaatcgttgcaaaggagaaggtatgaaaaagattcatttcgaggtgaaaacggacggattttacggcgcgtattggaaaaataaaaaagagacgaacagcgcgataattgccatgctcggtgacgatgcggatgattatatggcgaagtcatgcgtaaaatggcttatgaagaaaggcgtaaacgtgcttacgatgtctccgggaaagaaaaattacagccaccataattatccgctcgaaaggatcgaaaaagctatagagtggctcaaaaacaacggaaacaaaaaaataggcatcgtgggtggctctaccaccggtacgcttgcgcttaccgcggcttcgtattttcctgatattactttgaccattgcaatgactcccagcgactttgtctggcaaggtttcgagcaaggcaaaaaagacggctgcgacgagtggcccgttgagggagaatctctgtttacttatcgcggaaaaccgcttgctaatatgccgttttgttataagcacccgggatattggcaagtgattaaggcggaatcgaaaaaaaacggcgatatggtaaattcgcgtaagatttttgacgattccgaagccgctcacccgatagaggaggacgagttcatcaagatagaaaacataaaaggcaaacttgttctgattggagcggaagacgacgccttgtgggataccgcgaagtatataagaagagcagaaaaacgtctttcggaaaagccgcattcctgcaatgcggaatttttcgtgtacaagcacggaacgcattacgtttttcccgaaagtttgctgagaagcattttaccgataggcgggggattgtttttaaaacttgcctttaaggcggcaaaagatttcccgaaggaatgcaagcaaacgcgcgtcgatatagacagaaaggtggtaaaagtcataaaggagtggaaaaaatgaagtacggttttatgccgaagttaatgtgggtggcatacaaaggaacattcaaaaaacaactgacaaaaacgcttggggaagactctccgaacggagtgatgaaacttgcccatagaaagtataaagaaatacttttcggcatcgacgaatttgagaaaggcgacagatttttgataaatattttaagttgcgcaatgctgtccgctgttttgttgtctgtcaaaaacaaatatacggttgaagaagtccgcgtgtattaccgcaaggcaatgtgcgaaaattttattaccaagtctgcggcaacaaagagtaaatcctatacggagaaaggcagagcgaaacttaaagaacacgctgctaaaagccaaagcggtacaaatccgtattcatggaagttcaccgtcgaggacggcaaaacgataaatcaatacacagcgacgttttatacatgcggaatttgttaccttatgaccaaactcggcttaaaggaatatatctccgccatgtgtacgttcgattacgatatggcggcgatgaacaatacagtctttacgcgcgagtatactttggcaagcggcggaaaatattgcgattgtcactacgaccacaaggggtaaaatgacgaatcaatatctcaaagaaacgaaaatgctcgattattcgcataaatcgatacaaaaattgataagagagcggaagtggagcgattttcccgaaaaagaaagagttaaaaagatttacgacttcgtgaaagacgaaatactgttcggatataatacggacgataaaatcaaggcaagcagggtattaaaagacggctatgggcaatgcaacacaaaagggacgcttttgatggctcttcttcgcgcctgcggcattccttgccgaatacatggttttatgatagataaaattctgcagaaaggtgcgatgacgggtttggtttataagtttgcgcccgacgagattttccacagttatgtcgaagcgtacgtttgcggggaatggtataacctcgaagggtttattctcgataaaaaatacctttccgcattgcaaaaaatatttaagccgaataatgacggttcgtttatcggttacggcgttgcgacgaaaaactttttaaatccgccggtcgaatttaattgttgcaatacctatatacaaaaagagggaattgtgcgagacttcggagtatatgacgatcccgattctcttttgagagaacacggacagacgatgaacttattaaaaaagtgcgtttatcgacttataggcagacgtttgatgaataataacgtaaataaaatacgaaaaacgaactaaaaaaaaggcaaaatttttgccggtttatagcacgaaaactcttgacaaaataaaataacagcgttataataacatcgttattaaaaagcggcggtgcagaatgcgtaaaaaggacgaacttgcgatagataaaattatagagtgcgcgaagcgggagttttcagaaaaaagtttcgagggcgcgtctatgcgcagggttgccgaaaatgcggggtatactaccggcatgctttacggcagatttgcagataaaggcgaactgtttaaagcgatcgtcagtggcgttgccgacggctttatttctttttttactaaggctcaaagcgattttgccttgcttacaccagaagatcagtataaaaacatgcacggatacgtcgataaaaaagtggaagaaatgctcggtatcgtttacgataattttgacgttttcaaactgattatctgcaaaagcaagggtagcgaatacgaaaaattcgtcgataaacttatcgaaatagaaacggaaaacaccatgcgctttatcggcgaattaagcgcggcggggataaaaatcaacgacgttcgcgcggatttatctcacatgctcgcgacggctatgataaacggaatgttcgaggtcgtcgaacacgatttcacgaaagcggacgccgttaaatacgttaaagatctgcaatgtttctttaacgcgggctgggatagtttgttaggcttatcttaagggatttaacgccgaaaaaatcttttataagaaagggcgatcccttttttatttgatcggcggttagcatacgctgaccatatgtttcagcccgaggtaaaagacatcggacgaattcaaaaaacgaaaacgtaaaaaactcataggagaaaaacaataatggcaatagtagaattaaaaaacgtcagccgcgtatacacgagcggcgaccacgagttaaaggctctcgacggcgtaaatctgtctctcgacgaaggcaagttcgtagttatcttaggaccttcgggcgcggggaagagtactcttctgaacctgctcggcgggttggacagtccgacttcggggacgatcaccgtttgcggaaatgacatttcaactctcacccaaaacgaactcgccgattacagagcggagacggtaggattcgtatttcagttttacaatcttattcctacgcttaccgttcacgaaaacgtaacgctcgtaaaagaaatcgtaaaaaatccgctttcggcgacgaaaatgctggaagaagtggggcttgcggatcacgcaaaaaacttcccgtcggaactttcgggcggggaacaacagcgcgtttccattgcgagagcgctcgcgaagaatccgaaaattcttttatgcgacgagccgacgggcgcgctcgattccgcaaccggcgtgcttgtattgaaacttcttcttaaaatggcgcgcgaatacggcaaaaccattgttatcgttactcataatcagaacatagcgaaaatggcagacaccgttattcacgttaaaaacgggaaaatagtttcttcggaaaatcagggaaatcccgtttccgccgacgaaatagactggtaataaggagcagggtatgttagtaaagaaaatgcttcgcactgcgtggctgtataaagcgcagtttatctctatgattcttatggtaatgctcggcgtgggtgtgttcgtcgggtttaatatggaatgggcgagtatagaaagaaatatgttttcctttttcgacgattgtaattttgccgactatcgccttgtaaacgagcgcggttattccgcagaggacgccgaaaaaattgccgatataaaaggagtggattccgtcggcagatttttaaccgtcaacgtagacgtgaaaaacgcggcgggtaacagcgtcgcgcttgcggttacgacgaattttaacgtatcgtcgttcgttcttacaagcggcgacgaatacgacccggaaagcgcggacggagtgtggatttcagacagatacgccgaaaaaaacggtattaaaaaaggcgatgccatatcttttgtatacggcaaagcggaaatcacgggcaaaataaaaggatttataaaagccgccgaacagatgatttgcgttcgcgataaaacgcagctgatgcccgacttttccacgcacggatacgcttacgtttcgcccgcgttatataaaaacgcgacggggcttgattattatccgcaaatcaacgttgtttcaaacttgaaaaaagacgatttttcggaaaaagtaaacgccgctctgggtaaaacgactatcgttttaacaaaagaagacaccatcgcatattcgcaggcggaaggggaagtagacgaagggaaaaccatgggcagcgttctgcccgcgctcttccttctgataggacttcttacgatggttaccacgatgcacaggcttaccgctaaagaaaaaacgcagataggcactttaaaatctctcggcttccacgacggaaaaatcgccgctcattatacttcgtttgcgtttttcgtggcgataatcggtacggcgcttggtatcggtttaggatttctgattgctcatatgattatgaatccgaacggaatgatggggacttacctcgatcttcccgaatggaaattagttattccggggttttgcgcggcaattatcgtcgctatagtactgattcttacgttgataggttatttgtcggtaagaaaaatgcttgcaggcaccgccgccgacgctcttcgcccgtacacgccgaaaaaagtcaagcctatgctgatagaaaaaaccaaattcttccataaactttctttcggcacgcgctggaatatgcgtgatatcgtaaggcacaaatcgagaacggctatgagccttataggcattatcggctgtacgattctgattctcgcctctttgggaatgaaagacacgatgaattcgtttctgaatatttattacgataacgggcttaattattcttcgagaatattctttaccgaaacggctaccgacgaacaaaagcgagaaataataaacaaatacgaaggtgacttcggcggttcggtcagcgttcaggtggaaggaaagaccgtttctctcgatatttacgacattacgcgcgacaaagtaagattcgtcaacgacaacgacgaaaagtttactctcggcgacgacggcgcgtacatctgtatgcgtattgccgaaaaattcggtctgaaaaagggcgattcgttttcggttagtccgttcggaacggacgacgtttatcatctcgtggttgcgggattgttcagaagcgtttccgagaatatcgttataaccgataaatacgccgcaaaaacgggaataccttacgttatcgattccgtgtataccgacgtggtcaaatccgacgtattgcagtcggacgctattaaatcggtgcagtccaagcaaatgataatggattctttcgaagttttcctttctatgatggatatgatggtatatctgctcgtaggcggagcgttgcttctcggaattgttgtcctttataatctcggcacgatgagttataccgaacgttaccgcgaaatggcaacgcttaaagtcgtcggattccgagataaaaggataggtaaacttctcgccgaacaaaatcttgttctatccgtgataggcattataataggcgttccgctcggcgcgctgactttgtcgtatcttttgaaagttttagcgtccgaatacgaaatgaaaatggctataagcgtagtttcttatcttataacggcggctcttacaataggaatgtctttactcgtcagtcttttggttgctcgcaaaaacaaaaagatagatatggttgaggcgcttaaagggcaggagtaatcaaaccgccgaaaaaatttgattttcagggagtttttatgaaaaaacaatcggttctttcaagacttatggggtatgcggggaaacataaatattttacgtatgcttcgtggtttctttcggcgataagcgcgcttatcgcgcttcttccgtttatttatatctggaagataataaaagaagtgcttgacgttgctccgaacctttccgcgtcgacgggtcttgtgcataacggaattatggcaatggtttccgctattgcgtcttttcttatttatatatgcgcgctcatgtgttcgcatcttgcggcgttcagagtcgccacgaatatgcgtatagccgttacggagcatatagcgaaacttccgctcggatttgcggatagtttcggcagcggaaaattgagaaaaatcataaatgattccacaggtgcgacggagacttatcttgcgcatcaacttcccgacaaatatgccgctttggcaacgcccgcagggctgctcgttttgctgttcgcgttcgactggcgtttgggacttttaagcctcgttcccgtaattctcgcatttctgatcatgtctgcgatgacgggcaagcgcatggcggaaaagatgaaacaatataacaacgcgcttgaaaatatgtctaatgaagcggttgaatacgttcgcggaataccggtagtaaaaacgttcgggcagtccgtgttttcattcaaaaaatttaaaagtacgatagacgaatatcagaaatgggtagtcgcttacacgaaggatatgcgcgtgcctatgatgttttacacagccgcgataaacggcgtatttgcctttttgattgccggggcgttatggtttacggcagacggcgtgacaaacgcatttttgctcaatcttattttttatatcgtgattactccggtcatatcgcttactttaaccaaaatgatgtatatgagcgaaaataatatgatcgtcaaagacgcgcttgaacgcatcgacggcgttttatccgtcggtcccatgagtgaaagtaaaacccctgagcatcccgccgattcgtccgtcgagcttaacgacgtgcatttttcctacgacggtaaaaacgaagtgattcgcggcgtatcgatgaatataggcgcggggcagactgtggctctcatcggtccgtcgggcggagggaaatccacgcttgcggggcttattgcaaggtttttcgacgtgaaaagcggaagcataaaggtcggcggcgcggatatacgggaaattccgaaagaggaacttatgaacgccgtttcgtttgtttttcaggattcaaagcttatcaaagcaactatcgccgaaaacgtgaaactcggaaaacccgacgcaacggacgaagaagtggcggcggctcttcatgccgcgcagtgcgacgatatcatacaaaaatttcccgacggagcgggcacgacgatagggacgaaaggagtatatctttcgggcggcgagaggcagcgaatagcaatcgcccgtgccgtattgaaaaacgcgcctattattattcttgacgaggcaacggcttttgccgaccccgataacgaagccaaagtgcagaaagcgttttccgaactttcaaagggtaaaacggttattatgattgctcataggctttcgaccgtggcggacgccgattgtatatacgtaataaaagacggtcttatagcggaaagcggcaggcgcgacgaacttctcgaaaagaacggagtatttgccgaaatgtggaaagaatatgccgcgtcggtagaatggaaagtggcaaaggagggtgaaagcaatgtcgctcgttaaaacgatacaaaaaaagacggcttcttcaaagcagggagcaaaggggattattaagggaataatcgcctgcgcgtttcagaatatggcgttcatgttgccgaccacgcttttatactttctcgtttccgatatgcttggcggcggagtgcaaggtggaagaataactttttacgtcgtcggatgcgtgatatgctttgcgcttatctttttaaccacatggttccagtataacaacacgtattttaccacttacgaagaaagcggaaaaagaagacttagtttagccgaaagacttcgtaaacttcctctatcgttcttcggcaaaagagatcttgccgacctgacgagtacgattatgtccgactgcgaagtgatagaaaagagtacttcgcattttatcccgggactgttcggctcgttgatttcaactattcttatcgccgcagggcttttcgttttcgattggcgaatggctcttgccgcgctttgggttattcccgtttcggttcttatcgtcattttaagttataaggtacaggataaagtgcttgttaaatttatgacggcaaaaatgtcgtgcgcggacggtatacaggaatatatcgaaacggtacgcgatcttaaagcaaacaacgccgaaggaaactacctttcgggattaaagaataagattaagggcgttgaaaagagtaacataaaagcggaactcactaccgccgtgttcgtaacgggcgcgggaatggttttaaaactcggcatagccaccgtggctttggttggttcggctctgctcgtaaacggaacgctcggagttttaaccttctttatgtttttgcttgtcgcttcccgtctttacgatccgatgcaggcggcgcttcagaatcttgcggcaatcatcgcaatgcgaacaaacgttgcgcgtatgaacgaaattctggaatatcccgttcagaccggaaacgacacgcttacgaatagcggttacgatgtcgttttcgatcacgtcggctttgcgtatccgggcggcgaagttgtattaaaagacgtttcattcaccgcaaagcaaggtgaagtcaccgcgcttgtcggtccttcgggcggcggaaaaacaacggtttcaaggcttgccgcaaggttttgggatattcggaaaggtaaaattaccgtcggcggaatggacgttgccgaaatcgaccccgaaaaattgatgagtctttattctatcgtttttcaggacgtaactttgtttgataacacgattatggaaaatatccgtctcggcaaaaagggcgcgacggacgaagaagttatgtcggcggctcggcttgcaaacgtggacgagtttgccgaaaaacttcccgataaatggaacactaatatcggcgaaaacggatgcgaactttcgggcggcgagagacagcgaatttcgatcgcgcgcgcgtttctgaaagacgcccccgttattcttctcgacgaggcgacggcaagtttagacgtggaaaacgaaacgatgatacaatcggcgctttcccgtcttataaaagataaaaccgtgcttgtgatagctcacagaatgagaacggtcgcgggagctgataaaatcgtggttttggcggacggcgtcgtggcggagcagggaaaacctagtgagttgtacaataaaaacggcatttacgctcgtatggtggatttgcaatcggcaagcggaaagtggaaaattaaataattgtgccgtccttcggaggaaaatccgacttaaagcccggacggaattttcaattgcttttttcaaagtaacgtgatataatgtataaaaagcgcgggagaaaaatatggtagacaacgaatcgcaggaaatgtatctcgaaacgatacttagattaaaaaagaaaaagggtagtgtaagggcgatagatatagcggaagaactcggttattctaagccgagcgtttcccgcgccgtgggaataatgaaaaaagacggttttatagtcgtgcatgccgacggacttatagaccttaccgaaacgggtaaggataaagccgaaaatattttttcccggcataaatcgctgactcaagcccttgtagtgatggggctttcgcccgaggcagcggaagaaaacgcctgccgcgtggaacacgttatcaccgaagaagcgttcgaggctatcaaaaaatattttaacgtgtaaatacaaaaaaattttagtcaaccgctaactttcggttgacttttttctatatacgagtataataaaaaatggctttgggaaaaaaggccgttaatttttgcgcaaaagttagccttaactaaccgcttctgtgtaagcatggcgcaaaatttttttaggaatggttagcgcgggctaaccaaataaaacggatggtgagttacatatgagttcgtcggaattaaggtatctgatagcggcaaacgaccttgccaaagagctgcagtcggttaaacagactgatatagcaaacagacttcacgtaacaaaggtgagtgcgtataacgcgattgaaaggttgcgggaaaaagaatatatcgagaagaatgataggaaaatcgttcttacggatcgcggaagggaagttctgaacgagtatatgacgattatacgttttatgtcggcgcatttgtcgttacattgcggaacgactgaaaatcaggcttatgaagacgctcttaacgccacctgcgcgttttcggacgtaacccgtaacggagtggcaaattttataaagtcagaaatgaagggcgcgcagcaagcactgattgattaagacaaggagcaaacaaatgatagacaaagaactatttaaactcatcggcggaaataagaagtacatatttatcgccgtattgttgcaggcgataggtttaatcgcgaacgttacgataacggggagcgtctgctatgccgtgtacctgttgacgcagaacgccgaatggatacaatttatttatccgcttatcggcgcggttatcggtattatcgtaagatatagctgttcacgcgctacgggcgatataaaggacaagcttggcagaagcgttaaaaaagatttacgcgaaagagtatacaataaaatcgtaaaactcggcgttaagactaccgacgggatgagtatggcgggcttgacgcaggtttcggtagaaggcgtagaacaactcgacctttactattcgtcatatctgccgcagttcttttttgcgatgatcgcgcccgtaatattgttcttgatatgcgtatggatcgattggagaacggctctcgttcttatcgcctgcgttccgcttatccctgtatctattgtagcggtaagtaagtatgcgaagaagattttcgcaaaatattggggcaaatacacttcgatgggcgataagttcctcgacagcgtgcagggactgaaagaactcaaaatctttcaggcagacgcggctcaacacgttaagatcaacgaaagcgcggaagaattcagagtcatcacaatgaaggttcttgtcatgcaacttgcaagcaccacgatcatggacttggttgcatacggcggcgcgggcgtgggtatcgcgcttgcaatcagtggcgcggcgttttggggactgaacccgattgctgcattgttcctgtgccttgtggcggttgaatttttcctgccgcttcgggcgttcggttcggcattccacgttgcgatgaacggcgcaagcgcgggtaaaaagattatttcgctgctaaacgcacccgaccccgaatggggaacggaaaccgttgacggcaaagagattaaactcgaaaacgttacgttctcttacgacggcaaacgcgacgttctgaaaaacgtgaatatgaccttccccgaaaagggaatgacggctatcgtcggagagagcggttgcggaaaatctacggtcgtcaatatgctgatcggcgcgttccgtccgcaaaagggcgaagtgaccgtcggcggcaaacagcttgaaaagctgtcgcgcgagaattggtattcgcacctttcggcggtcagttacaatacctatatcttcaacgaaagcgtgagagataactttaagatggcgaaagaaaatgtttccgacgaagaaatcttcgccgcactcgaaaaggtgaacctgaaagagtttatcgaagaaaacggcgggttggataaggttatcacagaggacgcgaacaacatttcgggcggacaaaaacaacgccttgcgcttgcgatcgcgcttgtatcgggtaaagatatttacgttttcgacgaagcaacgagcaatatcgacatcgaaagcgaagccgttattatgaagaatatcaaggcgatttcggaaagcaaaagcgttatcgttatttcgcaccgcttagcaaacgtcgttcccgcagacaatatctattatatggaagagggcgagataaaggaaagcggttcgcacgaaaagcttatggcggcacggcaaggatacgcgcgcctttataccgcgcagaaaacgcttgaacaggcttatgcggaggtggtagaatgagtacgcagaaaaagactttgagaagaagcggcgcgaaaataatggcaagtctaatacttcttctcggtagtttgtcttacataatgattttagccgttataaacggaagcgtgggtttcgtctgcgcgatgggcgtaacggtattcggcgcggtaggagttgcgaaggcactcggagaagcaattgcgctttcctatgggtggattatcgggcttacgataggttgcggagttcttcgcggtctgcttcgctatttcgagcagtacagcaatcactatatcgcgttcagacttcttgcggttttgagagataaaatcttcggcgcattacgcgttctttgccccgcaaaacttgaaagcaaacaaaagggcagtattatcgcaatgataacttcggacatcgaaacgcttgaagttttctatgcgcataccatttcgcccatctgtattgccgtgcttgtatctacggctgtgttcctgttcgtagggttcgtttcgagctggtatctcgcgctcgtggctctcgcaggtttccttacaatcggcattgtagttccacttatctcgtcgggaaaactcaaggaaagcggcgtaaaataccgcgcggaatttgcttcgttctcggcatatttccttgacagtatcaagggtatcaaagatattgttttaaacaatgcgggcgaggaaagagaaaaggaagtaaacaggcgttcggacggactcctgaaagaaaccaaaaagatgaagcacaacattacctgcgcgggttcggcaatcgaacttatggtgtccgtgttcgtgctgatcacgcttgcggtgggaattttgcttgtcaaaaaagatatgctgcctttaggcagaatgattatcggtatggtaacggtgttctcgtcgttcggtccggtaatcgcggtcggttcgcttcccggcaaccttacgcagactttcgcaagcggcgacagagtgcttaatcttctcgcggaaaaacctgcggtggaagcggttaaaagcggtaaagatttcgattacgaaaaactcgacgtaaaagatctttcgttcagttacgacggacagaccgaggtgctgaaagatatcaaaatgcacgccgaaaagggcgagattataggtatcgtgggcgaaagcggttgcggcaagtcaacgtttttgaaacttcttttgagattttgggagagaagcggcggcgaaataaattacgacgatatagatatcgataaaatcaacacaaattcgcttttgaaaaacgtaactatggtttcgcaaagcacctatttgtttgaagaaacgatagaggataatcttcgtatcgcgaagcccgacgcaacgccggaagaaatcgaaaacgcctgtaaaatggcttcgattcacgactttataatgactttacccgacggatataaaacgcaggtcggcgcgctcggcgataatctttccgcaggcgaaaaacagcgtatcgggcttgcccgcgccttccttcgcggcagcgaacttattcttctcgacgagccgacgagcaacgtagacagtatcaacgaaggtattatcttaaaggcgttaaaagagcaaaagaacaaaaagagtattattctcgtatcgcacagagaatctacaatggcgattgccgacagaatctataaggttgactgcggcgttatgacggaggaagcgtaaaatggacgaacaaaagaaattgagtgatatagaagaagcggcggcggctcttattgcaaattccgaagatgaaaaccccgcctataagtcgataaacaaacaaaaatcggcgacatcggaagagaaaaacgacaaaaagatattcaagaaatacaaaattaaagacatcgtatttcttgcgataatcacggcttgcacgcttattacgggcgcggtgatgccgttacttgtaaacgtgccattctttggtatcgtgcaacttggtttgggacttcaattttcgatttttcccgtaatcgggatgatgaaagtaagaaagccgggtgcgcttctgtttcagtcgatatttatatctgtattcctgatttttatgttcccgccgatggctctgattatcgtgtgcgcgcttgtttcggaaacgcttgcgcttctcatcttccgcgggtataaaaacgattgggcgtgcgtatttgcgggaacgctttatatgccgctcacccttcctttgatgtggctttattacaacgcgttttacacggttacgggcgaagaaaaagcggctacgagtatgtttctcggcggagcgaaccccggcgtggttgtcggcatttcgattgccgtcgtcgcgctctgtttcgtcggctcggtggtcggtatgcttatcgcaagggagctcaaaaaagccggagttctgaaaaaatgagattttggtctttcaaaaagaagatatatcccatattcgtatttcttgcgagcctgtttttgattatattcggattgtgcatggcaaggaacgtcaaatgttcttactttctggcgggatgtttcgtgtggcttatgctgttcggatgccgaaaaggttgctttcgggtgcttcctgtatatattgtggtcggcggactgtttgtcgtaatctcatactttgcttacggaaaggacggaaatgcggctatggcaatggctaaccgtttcgcttccgtatttcttgccgccgcgctcggtatgagcgtagaacctgcggatatgacgagaaatctttccacgctcaaaacgccgaggggcgtaacgctcggtatgctgattgcaacgtcttttccgcccgtactcggcgcggagataaaaagggtgagagaggcgatgaaaacgcgcggcgcgggcagcgtgttaaacccgaaaattttttacagagcgtttttggtgccgttcgtaatgagactcgtaaacatatcggatacgttgtcgctgtcggtggaaacgcgcggattttcgcttgaaaaggttccgtatacggtatataaaaaggaaatcgtttgtctgtcggacgtattgtttattttgggacttgccgcgggcgcggtttgcacggtgatcttatgaacgcgatagaacttaaaaacgtaaacttttcttacgacgggaaagttcaaatattagaaaacgtaaatatcgcgctgaattacggcgaagtcaaccttatttcggggcattcaggcgaaggtaaaagcacgcttttgtatatcataagcggcattatccctaatatcacggacggaaaactttcgggcgaagtgctgataaacggcgaggatataaaaggcaaacgccttggcgaagtctgccgcaaagtgggcgtcgttttacaaaatgccgacgaacaaattatacaaaaaacggtagaggatgaaatcgctttcggatgcgaaaatcttgcgttttcacccgaaaaaataagcaaacagatagacacggtttgtcgccttatgaagctggataagtcgtggcaaagccgcaaactttcgggcggacagaagcaaagactgataaccgcttccacgcttgcgatggggcagaagatagtaattttggacgaaccgcttgcaaatctcgacacggcgggcgcggaaatgctgatgtccacattaaaatctcttgcgaaagcgggatattgtattattgtaatagaacacagactggacgtcgttttgccgttcgtggataaggtatttcatgtcggaaacagaaaagtaaacgagataacggacagagaaaaatacctgaaagagcagtcaaccgaaatagaagatgcctgttcgacttttagcggaacgctacccgcgttttcgctttcggacgtagcgttttctgtaaaagaccgcgacatattgaacggagttactttcgatatattaaaaggctcgcgagctgttcttctcggcgaaaacggttgcggtaagacaacccttttaagacttatttcccgtcttgaaaagcctactcgcggcgtgattttgcagaatatagacgacaaattcggacaaaagagtaaacagagcaaaaagtggtataaaaaggtgggcgtggtttatcagaaccccgactatcagctttttatgcagacggtcgaaaaggagattaaattcggcgctaaatccgacgaatacgccgacgaaatagccgaaaaattcggaataaagcatctgtacgcccgtcacccgcagtcgctttcggaaggacaaaagcgaagagtttctatcgcggcggtcgtggcaactaaccccgaagttttgattctggacgagccgacggtggggcaggactacaaaggcttgtgcgaaatggttgaagtgctgaatcgtattcacgaagaaacgcataacacgatgattaccgttacgcacgacaagcgctgtgcggcggcattatgcaaccgcgccgtgtggataaaagacggaaaaacctataaaacgggcgataaacgacttatagacgagtttttcacgaattgtcaaggcaaaattagcgcaggctaattttgttgaaaagacagactttttattgacacgatgctatgacggtgttataatatccatgttgttagcaagtgctaaccgatataaacgataaacagtcggcaccgcgcaaaagcgcggttataaaacggaatttggttagtcttgactaaccaaataaagaggcattaaacaaggagcaaaaacattgctgttaaacttaaaaaacatagggaaaatatatgacagcaacgatattctgacgatcggtatacgcggaatcaatcttgatttcgactataacgaattcgtaacaattgagggcgagagcggaagcggtaaatctacgcttctgaacgtcatcggcgcaaacgacagttacgaagagggcgagctgtatataaacggcgaggaaacgtcgcattacggcgcggcagaatgggaaaaataccgcgaaaagtatatcgcaaccgtctttcaggatttcaacatcatagaaaaccttaccgtgcttgaaaacgtcgagcttgctcttctgcgtttcgacgataaaaaagtacgccgtgaaaaggcgagagaactcatcgaaaaggtggggcttttggggcaaatcaatcaacgcggcagtaaactttcgggcggtgaaaaacagcgtaccgtaatagctcgagcactcgcaaaggacgcgccgattattttggcggacgagcctacgggtaacttggacgttaaatcttcgagagaaatcgcaaaacttctgaaagacgtttccaaagacaaactcgtcatcgtggttacgcacaatcccgaattttttgtagaatacgcaacgagaagaattaccattttcgacggctcggtaaaacaagataaagtcatcgaaaagccgacgggaacgaagaacgttgaaattcccgaagtaaaaaaaagcaaaaagaaaaatattaaggacaccttgcatatcggtgttttgaattacaaaagcagaccgaaattcacggcaatgatgagctttgctttgcttgtttgtgcagtaacgctgtttgtcgtgttgtcggtgttcggaagttcgcttataaaacccgttacaaattcgctcgatactgtgggcgtgaacggaaaggtaatcgtttcaagcgaaaagggaaaccttacaaacgacgatcttgacaaagcggcggggaatactggtgcaggtttttatcttttggataaggaattttccgaatttacggtaaacgttcccaagaaaagcggtatgctttcggcttacagcgtcacttgtctgtatgcaccttatcaatataacttaaagagaagcgaagcggttttggtgctgccgaaatctgcggaaaaagataaaaacgcaatcatcgaaacgtttgtaaacgcaaacgctggaatagagagtattagcgtaaaaacgacgctttcttccgacagcgttcttctttacttatcccacgcggacgcggaagagaacggaatcaaaatcaaggcaattaacacgacgatgaaactcggagaaacggtcgtcacggtgtatgcctttgaaaaagacgaagcggttgaaagcgggaaaataaaccttgtaaattccaatacctatcaggcaacgaaatattcggcggttttttcggtaaagacaaataaatcttacgaagtggcgtccgacagtgaaaaagatgaaacaagaaccggaaaactgatcgtcaaaatgaatcccgatgactacgccgctatttttgaaacagaacaatcaaacgcaagtcagtcggtactgtattatgccgacgatcagacggcggaaaacgcgcttggaaaattcccggacggaatgatgggtatgctttccacaagtaaagtatacgtccaaagcgcgggcgacgtttacgcgatgaacgtaatctactatatcgcgctgattgcaatctgccttttgtttggcgcgctcatatccgtaattttcggcagaagcgtaaaggttttccaaaccgacttcgcggtttatagaacgctcggcatttcaagcaaaatttcgtcgcgctctttgtatattcagatggcgctcatattcctgccgacaatcgtatttttgccgctcgtcagtctgattgcggctgtgataccgggaggcggaatcgcatttatttcggcgggcaactacttctttatagaaataatgctgctcataatcgtcgagtttgtcgcattcggctttaaccgcgcgatagcgggacagagtatcagaaaatcactaagaagggggtcgaaaggttaatatgtctaaaattaaagtagaaaacattgtaaaaacgtttaaccgacactcccgcaacgcaaacaaggtattaaaaggcgtatcgtttgaacttcccgatagtgggcttgtgtgtatcttcggtaaatcgggaagcggtaaaacaacccttctcaatattatcggcggacttgaaaaagccgatagcggtaaggtttatatcgacggcgaatgtacgagcggcaaaatcgacaaaataagaaacgcaaaaatcggcttcattttccaaaactactatcttgaaaaaggctacacgatagcggaaatcctcagaaatcagatgattatcgcggggttcaaggatgaaaaagagatagagagaagaaccgaagatgcgttgaagctcgtcgatatggagcgtttcaaaaacaaactcggcgacgcgctttcgggcggacagcaacaaagagtcgcaatcgcccgtgcaatcgtaaaaggtagcgacgttatccttgccgacgaaccgacaggcaaccttgacgcggaaaacacaatgaaggttatggatatattaaaggaaatatccaaaacccaactcgtggttatcgtaacgcacgaggtttcgcttatcaaaaagtatgccgacagccatatcaaaatcgtggacggcgagcttgtagaggacggcgaaatagaagaaaccgacctcgcgcccgcaacttacgatagcgttcaagaggggaacgaaacgcatggcgttctgatcacctttacaaaaagtacggcgaagcgaaacggcaggctgtttacattaaagacgattttcaatcgtaataacgcggacggcgaaaaggcgtattcggtcggtaacgtattcaagcagatatttattcttgcgcttgccgtggtaatgacgtttttctcgttctcggtgttcgaggcactttcggcagttaccgaaaacaaaacgctcggaaaaaataccgtttatacaaatctgaactcttattcggtactcaggaaaacggacgaaagccattacaagagcattgatttcttcgatacggaaaagagaacgggaagtttctcatacggcggacttgcaagtctttcgggtatagaagtcaaatatacgccgaaagcaatcgaagaaggcgacgaaattgccgtagactacggcagacttcccgaaaaaggcgaagcgattgtttcccgcaaaatggcggaagaactcaaaagagagtttcgcctgaaagaattgaatacggataaagcaatcacgctgatgacctttgacggcgaatatccgattacgggtatcacgggcggcgacgataaaatcatttatctgaacaaagaagattacgtcaattttctcggtgtgtataacaaaatcggtttctcggacggggaagagatcttcttcaaagatacttacggttcggcttcgtttacggcagagattctgctgtacgacggtgagatcgcaaacgataaagtcagagtggaaatcaacagaaattcgctctacaaaatgatgaccgataccacgcaggcagattttgaagtcaacaaaacgaactctcgtttgaaaaatactccttacgcaatacaggtaacgggcagtaaagtttatgtcgaacagttcgtagtcacgcgtgacgtaatggatacggacattcgggtttacgtcaacaaaaacgttcttcataatattttcgtttacatatcgccaaacctcgacgcgctttcgtccacgggctcgcagtattatttcgagataacgacggaaagtccggagcaacttgcttcgctgaaatccgatttaagggatttgggcgtaacggctgtgaacgtcggcgcggcgtatgaacaggagaacgaagaagaaaaacaagacgcggcaagcgggttgtatctctatcttctcgttatcgtcctgcttctcattatctatttcttcatagagaagtcggcaagcatcaaaaacagtaaagagtacggaatttaccgcgcaatcggcgtcaatcgcggcaatcttttgttcaaagagagcgtcacggcagtcgttcacaacgttttgagtttctttgtattctcggtggtaacggttgcgctcgttgcggtaagatacgcgattatgaacgtagcgtttgcgggctttataggtcttgcggcggcaagttttgccataggcgcagtgcttatgactttcatatcgctcattccttatttgttcgttctcaccgagtccccgtcggagattctggcgagatacgatatttaatcaggtgtcaatccacatggatttacatacaataaaaattttttaggaggtcattcaaaatgacaaaaatcagaaagaacgtcatcggtgctattttgtgtcttgtgatgcttcttgtcggtgtctgcgcgtttacggcgtgcggaagcaaggatctgtcggttacgtttaccgttgaaggcaaaacgcaaacgttagacgtggtgaacggtaaggtgactatgcctgccgatccggaaaaggaattttatgaattccgcggttggtacacaacctcgaccttcgacgagggtacagagtttaccaaagataccgaagtaaaagaaaatcttacggtatacgcgtattttgcgcctgttcacgtcggcatttccgtgaacggcgaagccgctaccgatataaagctcgaagaccttgccggaaagacaacagaatacacggaggacgcgacaagcaaaaaccttacgttcgacggttggtatatcgacgccgcttacggaacgaagtacagcacgcaggatacggacaatctttatgctcgttactgcgctactgttacgttcgataacggttatgaaatcttaaagagcgttcaggtcggaatcaattcgacaatgaaagctcccgataaggaatatgaagatttcgttccttattatatggataaagaagatttgtcttatgtggacgagaaaggaaacgttgttgattttacgtcgctcgtgattacgaaaaatacggctatcaaggttatgtggaaatcgccctatcttacatatcagaagattgaaggtacggcaaacgattatgctgtcgtcggtttcgactataagtcgggcaattcggaagaattgcagaatatcaagagattccctgcgatttctttcctgtccaaaaacgtaacgattaacggcgaaaaaggttgtaacgtagttactgccgatttctctgtttcctccggaatgtatgttgcaggaccggatcagtgcgattccgtggtttacgcttcttttgaagacgggattcaatatatcaacggattccagacgtgtgctaagctcgaaaacgtaacattacccgcaagtcttaaagtgcttgaaaaatcgttctggaacatgaaaaacctgaagtctctcgaacttccggaaggacttgaaatcattatcgattcgctctggggcgattatatggaagggatggtcggttattacagaggagcgagcgcgttcccgtttaccgtaaacattcccgcaagcgttaatacgctcgtaaccgttccgtctaacctcaaatttgcggaaggtagcgaatattattacgaggaaggcgaacttttcagaaaccgtactgtcggcgacgtaacttataaaacgcttgtttgtacttatcaggataaagttgccgatgaaaccctcaccgttgcggaaggcgttgaagccgtatccgtcggagcatttaaaggtctgaacgttaaatatatttcgcttccgtccacgtttaagaaaatttcttatacatcggacgaaaacaacgcaacgtacgaactttcgtattatacgggttctatgcttaccgatatgcagagagtgcaagcccccgatgaaaaatcggcgatcgattcttattccgtgttcagcgggcttacgtcaaacgatttcggatacgtttatctgaacgtcgcttctatgcccgaaggaatcagcgaatatgcattcacacagggcagaacgccttataccgaacttaccgaaagcgacggaactactctcgaaaaagttgtttgcataggtgcggttaagaaaaataaagcggttatcattcatatcgtaggcgaagacacaagagattcttcgactaagagaacctattcgataacgggcaaaaaatcatccaaagccctgacggtggatgaaattcttgatgcaatcggtatcaatgacggaagctattcttatgagattaccgagctcggcaagccttacaccccgggaacgttggatcataatttatatctcagggtaaactatacaagaaatattctcggcgtaacttacacaaaagacgatgcgaccaaaacgattaccgtaacgggattcgataaagataccgcgttcgatcttggcggggtttacagaatttgtatcagtttcgacgatgaagcattgaagacttacaaggtcgttattgcagacaatgctttcaaagacaataactatatttcggaagtttacgtcggttctcaggtggtaagtatcggcgaaaaggcgtttgcaaacacgtcaaaccttacgaaattcattgtttcggacggcgggcttgaagagattaaaacaagagcgtttgaaaatgcgggatgcgttgtaaacggagaaacgattaccgtaaatgaaaacatcaaaaacagcggaatcaaattcgtattgccgcttgcaaaaatgaagaatatcgagccttatgcatttaagacgaaaggtatctttatgtttacggcaacgggatcggaaggcaatgaggataatccgagaaagctgacggcggcggcgaaagccggtgaatatttcttcgtggaaagcatgtcgggtgattattacggtattatgcagtatgtgaaaaataccgacacgcaaacgatgaaagacaacaacggaaacgacgatttgattacgatttacgatgtccgttatgtggcgacagcaggcggattcaatgacgcaagcggacatatgggaatcggttattcgcttcgcggcaaagcctacgaatggggagcatggagtgaggatttcgcggcaaaacagcattacgtttatcgttacgaagtgatggaaggctcggtatactatctcggaaacgctttcaattatatctctttcggtatcttctccaggattcacaagaatgctttcaccgatatggaagaaacgcattatgccatatacaataactgcgcatttgatatctggatggacgcggataaagtcaagaatcaggattcttccctctttgaagaaggctggttcaacggcagagcaaactccgaaaatacatttatgagtacacttcaggatcacgaagatttttacctgtaaaaaccaaaggaacggtatacgcccgcgaaaacgggcgtatacgattccgcttttatagagggtgcaatgaaaaagtttttgtctaaagttgttatatttatattgtgcgccgcaagtttcgtcgcactttccgcttgcggtaaaaccgacgtaaagacgccgcaggatgtaatcaaagaggcatacggcgatacggaatataaaatctctttttcgtccgaagggcttgacgaacctttggaagatttgacgtacacggcaaaaagcatccccgttttaccttcgccgcagaaagtcggctatgttttcggcggctggttttttgataaggaatatcatacgcaatatcaggataatctgctacttatgacaatgagcgacgtaacgctttatgcaaagtggcttaaagaagatatgactgtaagcggaacgtacgatatagattttgaagccgaaattctcgaagatacgataaaaaaagggcagaccgcggatgaattcggcggttataaaaaattccccgaaaatatttcggttgaaaatacatacattgaaaaatcggataacgatttattgcttaaaatcgaatacgactgcattgatccggagccttacggcgcgcttgccgattcttataaagtaacggtaaacgcgactaaaaatccgtcaagcgtttatataaaagaaagcgtgaattcgctttcggatacggtgaaaacgatatatatccgcataacggatatggacttatcaaaccctgtatatctcgatatcgaaaccacaaactggaaagcggaagggctttccgatgaagaaagatacggaacgaccacaacttataccgtcgaattcagaataacaaggctgataggatttaagacgccttacgtcgatacaagcgttccgcttgaggacggatattatcttgtaagaagttataataagacgatagaaaacaaatcgtctatgggcgacggcttcaattcggttttttcttatctgaaagcggaaaacggaaaatataaactgattaagccttttacgccttatgcggggcttgttaagtttacgctcgggaaactcgaagaaccttattatcaaaatctgttttacagaatgatgtcttttatgccgaatcagtattgtttcgagcttgacacgacgggctttaacggagaagtcgaatcgagttattatcccgaaacttataaagcgaagaaatatgtggattattcggtggaatttcatacggacgactataaggtatattcggttatcgatctcggaacaaacttcaagcgcgaattcggaattatgtattccgtttcgggctttatggaggttgccggcggtatgggatcgggcgtgcaaattttgtatatggattacgaccatatcataaaactatccgacaaaaacgtcgattataaagaactttcgggcgatagctattcttttgaaacatcgggaagtttttatcccggaaactattccgatcttaacgataaaaacctgacttatgacgaaacgctgaaaaacggtttgtcaacgaggatgatcaacttctggtattcggcaagcgatgcaaacgcaccgtatgccgcgagaaaagtgtataacagtaaaataacgttcagacctaccgacgaaacaaactcggaaaacgtatccgaagcaagatatgagatagcccatttcgatattcagacaaatatatacggatatgacgccgaggagggcagaaagaacggggaagaattatactatgattctatgtccgtgcagacgtttggcaataacggaatgcgtgaatcgtcgaaattcaggctcggaaaaaccgttaatcagggagatgttttaaggctcgaagatatttaccgcgagaaagtatccaaagataccgatttttcgaccgttcgatacaaagggtttgctttaagcggcgataaaattgatttttcaaaagaaatcacggtaaataaggctttcacgttttcttccgattgcgcgatcgtattcgtttctaccgacgatgccggtaacaagcaaacggcaatcgtggaaattgttaagaaatgcaatccggattatcgaattacggatgagaatcacgattggaaatggtcggaagatgacaacgcatacgtttccgatacgatagacaaagaaggaacagaggtggagttgccgacgcttacttactcgtggacgggcgtgaaaaacgtgcgattcagaaataattggtacgacgacgaatcgtgcataaatccgcttcacgtcggaatctttacgaatatgaacggcgtttattctttgacgtatatcgggcatcagaaaaaagattttacggcgtccgcatatgaaacttatgtgtgttacgaactcgtaaacatatacggggaaactgattttgttcggttcaaatacgttacttcgcaaaaggaaacgtatcgtatcgagtccgataacggtgaaattatggacgagggcgacgttaaatacgacgagtacggaaaaatcaaagacgtcaaagcaagcgagtcggtatatctgactaaagataactgcgacgaaaagctttcgagatccttcagtatgattattggtggcgacgctccttcccgtatgagcctgacaggattttctgcctttttagcggataaaaacaatcgtggtacgacaatttcgcgtgatattgcaaacgacgatatagactccgtaattaaagaaataaaaggctatatggaaaattattcctggtttaccgtatcgcttgaattttcgtatttcggaaacaaattcaacagcaattatatttacggcgtaggattttcgggcgaaaaaactacggatatgcttaaatataattcgtattttgccaacactttgtatacgatgagcattccgcgcctttacagcgataacggtagcgaaatagcaaagtcgtatgtaagcgttaagcacagaatcggcggtaaaaccgacaacagtttttatgcgagcagaacttatactcttaataaaggagaatacgaatattctttaaagtttaacgaggcgggcgagttttacgtaggtttcggttttgcgataaacggaacgtcttattcgttcggacaggtcgtcaacgttttatcggataactgcgacgttacaatcacgtttgttacggataaggatcatcctttttccgacgggcttttagagcggacggtaacatacaatttaagcaataacatcaacgcgcttaacgaaaaggaatttgcgggaaacgatattctgttcggttggacgcagtatgtcggcagaaacgcaacgtctaaagacgtcgttaaaaacggtatatcggattttatcggtaagtataattcgcagaacgtaacgttgtatgcaatatgggacggcggtatttccgttaccgcaaaatcggaaggaaacgacgacagaataaaacattatttcagggattcgtcaagcggttattatattatcgatttgtccgtgtacaaagtttatgcgcctgcaggaatggttcttgcgggatggacaggcggtttcctgggcgatgccgttaaaaacgggaaaatttatctgaacgaagtatccggcgatagcgattattttacgatcaacgccgtatacaaaaaaatgcttaccgtaaaatattcaatcaatgcggcatattccgcttcggttataagaaacgattccgtaattgaaggaaacggtcttgaatcgaacagaacagtcgtagcaaaaacgggttatgcgtttaagggttggtttgttcagggcgatgaaagcagaactataattgacttatcgacctataagtttacgaaagataccgttcttgttgcggtgtttacggacggcgagggaaatgaagtatggtaaaattcaaaaaaatctttgctgtaagtatagcgatatttgaacttgtcctttgcggattgtttcaatcggctttaattagctatgctgcaagcgagcaggtgataagcggcggtgacggaacgtataccgttcccgtaaatcttgatttgaagatgggcgcggataattttacaaaccccgtcaccatggagaaacaagacggcaagtattatatgacgttcgggttctcttctgcgataggctatctgaatctgaaccttgacggaaaggaagtcggtaaaacaagcgaaaagaaagacggttggacgtattatacctatacgctttccgaaaataatctgaaaagcaaactttcgttttcggcgtacatcaacgcgatgtcgcgtgagatgagttttacggcaacgctaaatttatcttcgtcggaaaaaacttccgataccgttcgtaatttaggcgaacgccctgcggaatttgttcccgtgatttctacgaaagcggcggctgaatattctttgaaggtcggcacggtttttccgattcccgaagcgacggcaaccttaggtaacgaggacagccctgttgtgattacggctgttttcggaaatgagcccgtagatgtttcgggcggaaaacttacgctcggtaatgtcggtgagtataaaataatctacaaagcaacgaactcacggtataaaacttctctcggaaacgattcgttttcggagtatgttgtaaccgtccacgctgtcacgggcgagaacgacattgttaaattcagagataccaatcatgtgttgcctgaaaaagcaggaattcttgcgggaaaagttaccgaaggatccggcgtatacgaaaaggcggcttccgcgatgaaaaagattgcggataatttcgaggtttattcggctgaatttctgagcgaagacggcgaagtcatacccttgagcgataaagttaagttattgttccgtgcggacgattattttgatcgcacgaaagccgaagtttactatatggatgaaaacggcggtctgacaagactttcagcgagcggatacggaagatacgtcgctaccgaaaccgacaagacgggaacgtttatcgtctgtattccgggcgtggcgtttcatatgccgatgtggggatacgtgttgattttggccggagcggtagttatcgttggtggcggaggagttgctatttttctgatagcaaggcgtaagaaacaaaaacaaaaataatattgaaataagaccaatcacaaatacggtaatgctggtagtgattggatgatgatttatactacgcaaaaaagaaataaccatatagttaataataggaggaaatatgagtttttttgaaaatacacgaaagccacaaggtttcggcggaagaataatggtgaaaatgatgaacagcggtcatagtaagttggcaaagtggggctttactaaaatttacgcaaagtcgaacgccaaagtattggatatcggttgtggaggtggggcaaatattgccaattggctagcaaaatgtacaaacggacacgtgacgggaatagactattctaaggttagcgtagaggaatcgaaaaaactaaacgcaatcgcaatcaaacaaggcaagtgtgatatcgtttatggcgacgtatcgtctatgccgtttgacgaagagtcttttgattgtgtttctgcttttgagacggtatatttttggacagacctcgaaaaatgctttgccgaagtaaaccgtgttatgaaaagcggcggtacgtttcttatttgcaacgagagcgatggaacaaattccaaggacgaaaaatgggcaaaaaaaataggcggaatgaaaatctacaacgaaatgcaacttcgcacaatgctagaaaaagttggattttgtgatattaagagttttgcagatgctaaaaaacattggctgtgcattgttgcgaataaataagaggcaggttgttttataggagaaatatataaaatcctaaaataatgtaaataacttataaaaccaaaacgcaccttaaaagataatagataaatttggtatatcgtgaccgttaacgatgttcctttagggcagagacaaaaaattgttgtcgagcgcaactttcaagaaattcataatattataagggtgtaaataaaaaagtgcagaaaacaacccttctgcatttaatggtaaaacttacatttcacgcaaaacgacgccgtatagattgcaaaatgcgataggatatggtataatataactataaaaataaagaaagcggttgaaaaaccgaacggaaaagaagcagaagcacatactattcatttattagcaagaaaaaaagaggcttaatttacaagcaaaagactgacagacaagatataataatcaactaacaagcaagcggagcaaggcgattgctcccgacacgtgcagacagaaagacacggcaacttatgcagaaatgcaccgactaatctacgccccgaatagagcgcaaaaagcggcgaacgtctttgcaaggtttcgccaaaggaaagaagtttgcgaagcgtcgggaacgaagccttgcttttttgttatttacagagtgggtaaaagaaaccgagtataaaggattaattaagataaaatgaaccgtagaacaatttttatttttataaccgttgtgatagcggcgtgcgtagcagccgtcctttctgcgtgcaactttttggggaatagcgtttgcggaaacaaccacgaatacggagagataacggaaataaaagtccccacctgcactgaagaaggagaggggaaaaaagtatgttccgtttgcggatatgaaaaaagaggatttgttttacctaaaaaacagcatacgttcggcgaggcggagatagaagaggaggcgacttgcgtaaagaaaggcaaagagagcaagacttgttccgtatgcggagttaaggaagaacgcgttattccgcagaaatcgcacgaattagggggatgggagataaaagtcgaacccacctgtacggacaacggcgagagggtaaaaaaatgtaagttttgcgattacgaagagacggagaagttaggggcgacttctcatgactataaagagacggaaaggaaagaagccacctgcgaagagccgggttacgttaagcgcgtttgttccgtgtgcggaaaaacgcagaccgaggttacggaaaggctctatcattctttccccgaaggtactgatataaagtacgattatagggataattcggacgaaaactactgttattatgcgtatagagaatgcgcaaggtgccataaggacgttttttataagacgcagtcgcacagtatgaagaaagacgcagaatttttcgtcgaagccacctgctcgtctacgggcgtggacgcgaaaaagtgtctttattgcaacaggcgtacgacggaaactattcccgtggttccgtacaatcataaaagaggagccgccgcatacggcgaaagaaacgccgaaaactgcaccgtacaagcgacggtatcgtgtaccctttgcggcgaagaaatagatagttggtacgaacctcgccacgactatgacgcagagactttcgtgtgtacgagagaaggttgcggtaacgtgaaagagatgccgtcctcttactttacg

SEQ ID NO: 3674 - DNA, 15559 bp, Unknown
  16S sequences of unknown bacteria
ccgcgctgcatacccgccgagcctgcacctcctcttcgtgcagccgcgcttccagttctgcttgtcgcctttctgcctcttccttcaaagtcgcgcgcagtacattttcttcccgcgccaattcctcctgcgctgtgcggaggatcttcgcacattcctgttccgtttccttccgccgctgccgtgccgcgtcctccgccgcgcgcacacgctgcattgcttccatcagcatgatcaatctcgccccgctttctgttcgttattcttttcccaaatcttccaaactatacggcgtttcagcgcaaaaaagcattcccggcgcttttgcgccaggaatgcttcgatccagatctctgatgcagcatctgcaaaatataaaaaaaacgcgcggccttaacaggccgcgcatacgtaatgttttcttatttcagggtacgatcacatagctgccgccggagatcggctgtgccgtctccgctacaaaaaaccgggtgccatccacatcggtacgcagcgcagagaccgccgcgcgagcactgtccgccgccgtttggtctgccgcgtccatataaattcggtccacccgttgagcgatggaactcaaatcccaaccggccgcaccattcacagtattttccaacagctgcgaaggcaacgcaatggaaagggtaacctcatcgcccacagcggtttttaccgcatccagaaaagcattgatcgccgcaatgcggctctcatcgctgtcttgcccgggctcatatacaatgcgctccgtccggccgtaatccggaaactgcacatcatccagaacgatttcctcgaagccaagatctgcgcattccttcaccacagccgtcaaatactccgtagcatccgaggcataggggctgagccaggcgttgccttccggatccttccatgtgctgccgctgacgctcatcagtgccatcgccgtatccgcaccggcctgctgggtatcggcaaagcaggagatccgtgcgacggcatgtttacccgcaattttttcgcgtaccatgttcgctgcggcctcctctgtgttgccgaacagcagcgtgccgttggccgctttcatggccaaaaccgggctttctccgttcagaagcgcggaaaatgtctcctccggcagcgcagccgcatccaatgtccggccatgcagttcccgcacttccggttccttctcgtcgatcaccaaatcttcttccggcagcggctgggcagactccggcgcgggttcgttttcgtcaccaggcaaacgcaaatgaattccgtcggcatcaaacacctggtatttctgcagaaccaaaaaagcacacgcaccgataagaattaaaaccagcactgccatcagcgcctttttccaccgcggcatacggcctcgataggtctggtagccttttgtcgccatagctcccaccctccaatcagcactgtttcacatccggacgctcagggttcgatcgcatccatctccgccacacggcgcgcgtggcggccgccctcaaacggcgtggtcagaaacacttccacacaccgctcagccagattgaaacccgtaatcccagcgcccagcgccagcatatttgcatcattgtgccggcggcacatttccgcgcacaggctgtcgcatacatgggcacagcgaataccctttactttattggccgcaatggaaatgccaataccggtggtacagacgacaatgccgcgctcacattcacccgaagccaccgcccgggccgccgcctcgccaaacaccggataatcgcagctctccttgctgtatgttccgcagtcttttacttcataacctttttcctttaaaaatgcaaccaggtgctctttgagttcatatccaccgtgatcgcagccaatggcaattttcatgattttatcctcccggatcaaagtttgtggtaaaccggcacgaggcggtcgaacgtggcgaagtaatcaaacccgcacgcgcgcagcaacgcctgccggtcggtaatggcgcagcctacatactccggcgtatgggcatcactgcccagcgtgatgatctcaccgcccaaatcccggtacagccgcaggatcggctcgtctggcaaaggcgtgtggccccgattggtattcagctcgatgccgcggccagcagggataatacatttgaaaatctctgcgacctgctcttcaaaccccttaaaggtcatatgcatacccagattttcgttgaaatagcgcaacggcagcgtcaaatggcccagcacgctgaaccgcccccaccgggccagagccagcatttcatccaggtattcaccgatggcacggcgggcaaaaacttcgtctgcttcttcgacggtgcagaaatccctgcgcccgtattcccaggacaaattatgaagcgatgcgatgataaagtcaagggggggcgcgtcatccagaaaacggttcgcccgggaaacatcctctgtggcctgtcccagctccacacccaactgaattttgatccggctgccaagggccgcgcgtgctgcggcaaactgttccaccgcagcacgccaggagtgctcgcgcacctggtcgcccagccatgtaaccacatccagatgatccgtcaggcaaatttcatgcagcccggcagacagcgccgcggcagccatttccgtcatggtattgtgcccgtcgtcgctgcaggttgaatgggtgtgataatctgcaagatacatactccgtccccctcttcgcaggccgctgatccgtttattttctgcgctttttcccgaaaaatcccttacgctcttcgccgtaattggtctcgcccagggtttcgccaaattttttcagcgcttcgcgctgctccgccgtcagattgcgcggcgtttctacgtacaccgttacaaactggtcgccccggcccttaccgttcaggtttggaatgcctttgccccgcagccggaacaccgtaccgctctgagtgccctcaggaatgctgtactgcacttttccatcgatggtgggaatctccatttccgcgcccagcgctgcctgtacgaagctgatcggcgcctcgcagagaacagaattcccttcccggcggaaaatctcatggggccgcaccgtaacggtaatgtgcagatcgcccgccgggccgccgttgcggcctgcgtgtccctgtccccgcagggaaatggtctgtccgttgtcaataccggcaggaattgctgccttgatggtacggcttctgcgttcggtgccgactccccggcacttcgggcagggctggtggataatcttgccccggcctccgcacttggggcaggtctgtgtggtagcaaaaatacccatgggcgtctggcggcgcacttgtgtggtgccgtttccgtgacactcagggcaaacttccgccgtcgtccccttggcgcatccactgccgccgcattccgaacaattctccgtgcgctcaatcaccacttctttttcgcagccgaaagccgcttcctcaaaactgatggaaaccgaggtccggatcgtttccccacgcaccgggccgttgcgccgggcctgcccgccgccgaacccgccgccgaagaaactgccgaaaatatcacccagatcgccgaaatcgaaatcgccggtaaaaccgccgccatagccgcccgcaccaccgtaattgggatcgacgccggcaaagccgaactgatcatacttcgcctttttgtccggattgcttagtacttcgtaggcctcgttggcctctttgaagcgcgcttcgcacgccttgtcgccggggtgcaggtcagggtggttttccttggccagcttgcggtacgcacgcttgatatccgcatcgctggcgtttttggaaaccccgagcacttcgtaataatctcgtttttgttcagccatatctcattcaccttgcatacaagctccaaatggggcggggaaattccccgtcccattggcagagcggtattcgctttctttactggttgttcttattctcatcctcgtcgacgaccttgtaatccgcgtcgtaatactggccgccgttctgggctgcgccgtcgccggcagtacctgcgcccgcctgcgctgcgccgtccgggttgacgtttttatacatctgctcggacactgcatagaacgcctgctgcaacgcctcggtatcggttttgatggcagcgatatcgtcgccctttaccgtttccttcagcttattgagcgccgtctcaatcttgtttttatcgtcagcgctgattttatccgccatttccgccagagtcttctcgctctggtagatcgcctgatcggcggtattgcgcacctcaacgccttccttgatcttggcatcctcggcggcatactgctcagcgtctttgacagccttttcaatgtcttccttgctcatgttggtggaagacgtaatggtgatatgctgctctttgcctgtacccagatccttggcagacacgttcacaataccgttggcgtcgatgtcgaaggtgacttcaatctggggcacgccgcggcgggccggggcaataccatccaagtggaacttacccagggacttgttgtactgcgccatctcgcgctcaccctggagcacgttgacttccacggaagtctggttgtcggcggcagtggagaagatctggctcttcttcacggggatggtggtgttgcgctcgatcaggcgggtgcacacaccgcccatggtctcaatacccagggacaggggcgtgacgtccagcagcagcaaatctttcttggcagagggatcgtcgcccaggatgccgccctggatcgcagcgccgatggccacgcactcatcagggttgatgcccttgaagccttccttgccggtaatgttcttcacagcctcctgcactgcggggatgcggctggaacctcccaccagcaggactttggaaatatcgctggctttcaggcctgcatcattgagcgcattgcgcaccggcaccatggtagcctccaccaaatcatgcgtcagctcgttgaacttggcgcggctcagcgttacatccagatgcttgggtcccgtagcgtccgcagtgatataaggcagattaatattggtggtagtcatgccggacagttcaatcttggccttttccgcagcctccttcaggcgctgcatagcaaccttgtcactgctcaggtcgataccgttctccttctggaactcgctggccagatatttcataatggcttcatcaaagtcatcgccacccaaacgggtgttgccgttggtggacagcacttccaccacgccgtcgccgatgtccagaatggacacatcgaaggtgccgccgcccagatcgtaaaccatgatcttctggctggcttccttttctgcgccgtaggccaaggccgcggcggtcggctcgttgatgatgcgcttgacctccaggccggcgatcttgccggcgtccttggtggcctggcgctgggaatcgttgaagtaagcgggcacagtgatgaccgcttctgtgatcgtctgtcccagatatgcctcggcgtctttcttcagcttggtcagaaccatggcgctgatctcctgaggcgtgtatgccttgccgtccacattgactttgtaatccgtacccatgtgacgcttaatggatgcaatggtgcggtcggggttggtgatagcctggcgctttgccacctggcccaccatgcgttcgccggtcttggagaaagccaccacagacggggtggtgcgggttccttcggcgttggcgatcacaacagcttcgccgccttccataacggctacgcaagagtttgtcgtacccaagtcaataccaataatttttcccataatgaattcctcctaaagtatatgaaagataattgtttttaatatggttgaaagcgttggactggacacacagccggtgcacccgcagtccgttgcttttcgcagcgttcagtttgccaccttaaccacggcaaaacggatcaccctgccgcccagggtaaagccctgctggaacacttccgccaccgtattgggctccaatgtctcgtcctcaatgtgcattacggcagaatgctgatcgggatcaaagggcttcccggcagcgtcaatcttctctacacccatctttttcaaaatttcctccagctggtggaagatcatctccatgccttttttatgcggcgaatcgtcatcgccctcctgggtcactgcgcgttccagattgtcgtagacgcccagaaattcttttacggtggccattttggcatcagaataaatctgttctttttcctttgcggtacgcttgcggtaattatcatattctgctgccaaacgcaggtactgatccttcatcgtctccaattctttggccagctgctccattttttcagcttcttccacggtgaatgtcacagtaccctttttgttctttttgcactttttttcttctttatgcacctcaccggcaccggccgtttcctccgcctttttctcttcctggttccattcctcactcatgttgtcacatcctcttcatgttccggtaattttttatgatcgaacatccggcccaatccgtcggcaaaataagccaaccgggccgccacagtggcataatccatacgtgtgggacccaccacgccgatcaggccgcgcatatcctcgccaatatcgtagcttgccacaacaacgctggaatcctgcagcgccttctccacgttttccgggccgatcagaatctgcatcggcgcgttgtcctccggcaccggcagtgccgcatcctcctcgccgagaaaacgcatcagcgccccagcctttcccacatcctgatattccggcaggtcaaggatccgattcgccccagcagtatacaccatacggtgctggatctcctccagcacttccccggcatactccaccatgagcgaaagcaccataaacagcagcgcaggcacctgccctgctgccaccatcagacgttttcccatttcttccggggtctgccccacaaagtccttgttcaacagcgccgccagaactggaagctggctcatatccaccggcacctgtgtatacaggagcttacttttcacccggccgtcatcggtcatcaccacagcgataaaactctgttcatctacccgcagcaagtcaaagcgggcaacggaaaactgtttcttccccgccgccaacgcatacacaggatactgcgtaaaatgagaaaccacttgcccggcccgggacaaaatccgatccagttcctgcagcttcatctgcaaggcccggttgatgctctccgtttcctgcgccgacaactgctggcgttccatcaattcgttgacgtaaagccggtagcacttcggcgaagggatacgcccggcagaagtgtgcggcttttccagatagccctgctcttccagttcagccatctcattgcggatggtagccgaagacacatgattgtccagcgcagaagctatggcttttgaacccaccggctccgccattttgacatacagctccacaaccgctttgagtatcttttttttgcgcccggacagctctgcctccacagccatttcactccttgttagcactcattatccctgagtgctaattcagtatacttctatcgtcaaagaaagtcaagggagggtttttgaacaaattgtaaactctctttttcttccatttcggccctttgcccacactctgatacacagaaaaacgggatctcccgtacagcgggagatcccgtttttgacaccattcttttccggaaatgccccagcataccgtccttgttgctcagcgctttacaaatttgctcttcggcgcgcggcagatgggacactggtagtcgtccggcacctcttcgccctcgtaaatgtagccacagatcgtacatttccagccataatcagcctccagtgtacggaacaccgtggcggtcaccggagtcgcagcgcctgcgccggtgaaatcatccagcgtctgtacctggccgtcggaaaggatctcagcttcagtggcatcaccaacaaaaagcagatatttgccgatcgccagtttgtccactaccttgcagctgatacgggcaaccatatgctcggtgagatagggattgcctgcggcgtcctcttttgcttcataggcagcaaacttatcgcccacgcggccggacttgtagccgaacgcattgacaatctccttaggacagtcttttgccagcaacgtgacagcaaaactgccgactgcttcaatagcgctgcacgtatcatgttctgtattgaccgaaacaacgaacttggccggataagaggaggtaacttgggcaaacgagttcacaatgcagccgtggcgtttgccatctgccgcagcgcctacaatcgccatggtgtaattcagcttatcatatgctttggtgttcatttcaatttctccctttctgtatatttttttgctggattgcctgtttttactatagtataccacctcacccccgttttatgatgttgcaaatgtccccatccatatcttttttatggatgcagatatccatattgcgccccgcggcacttcaaaaacaaaagagaccatactaccgtcgccgcctctgcaaagggtcccgccatccagataccagtggctccaaacagcgatgaaaacgcaaaaacccccagcagcaaaaataccagcgtccgcaatagagaaaccagcgccgacagttttccgttggaaagggcagtaaacaacgccgaagtaaatacattggtaccgtaaaacaaataggcagtactgtagatgcgaattcctccaacggcaatatcgtacactggactgggcggcggtgcaaagaccgccaccatccagggggcaaacagttccataatcaaaaacacgcccgccgatccggccagcacactgcgaacactgatgccgaacagccgtgccaaacgctgccgatttccgctgccataattatagctgaataccggcgccaccccgatggaaaaaccggtaaaaaacgcctgaaacagatattgcgtatataccagcagtgtgatggcggccacaccgtcttcccccgccatgcgcatcatcaggatattgaacaccgcagtggtaatcgaggtggaaagattggccagcatttccgaagcaccattactgcagctgcgccacagtacgttccatgtgcatcgaggcttcacaaagtaaagcgtcccccggcgccgcgaaaaatacactactccggccaccgccggaatcgaatagcccacgcaagttgccagtgacgcaccggaaacccccagatggagccaccccaccagcagcagatccagcacaatattggtgcatccggcgcacagcgatagcaacagcccgattttgggtttgcctgccgtcacaaaaaaagtctgaaaaaacatctgcaggaaaatcgctggcgtaaaacacagctgaatgccaagataagtgcgactcatagaatagagcacatcgctggcccccaggaaataaagcagcggccggataaaaacaaggcacacaatactgaatgccagtcccaccaggaacgtaagcagcgccaggaaagaaaaatccccgcgcgcttcttccccatgcccttctcccatttttttcgccacaactgcactgccgccggtggccagcataatggaaatcgccagcgcagtaaaaaacgtgggataggtgatattcatagcggacagggcatccgtactggcaaaacgagccacacatacgccgtctacaatatagtaaagccccacaaacagattcatcaataccgtcggcaatgcaaaacgaagcaaagacgccgtatgaaactctctggccaatgcatttaccatacgattccttcttccggatagtcgctcttcacagcagagctgttgactggaacagattgaatgcacctttttatggttcggttgaaaccattataaaacctcctgccgaaaatgacaattgctttcttccctgaaaaaatccccgttccggtacataccggaacggggataaaaatctgcacaaggcttacagattttccttggcttctttctttgctgcttcagcagaatcttttttcgcagcttcggcctcggccgctgccttggcagccgccgccttcttctccgcctgcgacttcttcatcgccttatacttctccttttcctccttggtgggaaccggagcaatggcgtccttcgggcagaccttggtgcacactttgcagtttttgcacttggcataatcgatcacagccacattgtccaccacatgaatggcgtcaaacttgcattcctttacgcacaaaccgcagccaatgcaggcgttggcacacactttggccgccgcggcgcctttctgcttgttggcacattccacaaagactttcttggacaccggcacagaaacgataatgtggcgcgggcaggccgcagcgcactgcatgcagtcggtacacttgtccgggtcgatcacgggaataccgttttctcccagggtaatggcatcaaacgtgcaggctttgacgcaggagccaaaacccaaacaaccatatgcacactccagcgggccgtttccggccactttcatggcacccaggcagtcctgcacaccaatgtactcgtattttttcttggccgctgtgccgccgttgcagatcacgtgggcaatctcgcgttcgccggcagccgcttccacacccatgatcgcggcgatttgctccgccgcttccgcgcccccaacggggcagcaactgaccgatgcttttccttcgatgatcgcgtttgccgctgcagaacagcctgcgtaaccgcagccgccgcagtttgcaccggggaggcagtccatgatcagcgggaaacggggatccgttttcacctcaaagatcttcgaagcgaccgccagtatcaggccaaaaatcagacccaggatgcccagcaccaacagggccagcaacacattcataaaattaatatccataactcaatctcctcccatcaccagacctgcaagccggagaagcccataaaggccaacgccatcaggccggcagtgaccatggccagggggatcccttcaaaactcttcgggcactgcgcaaactccagccgctcacggatggaggcaaacaggacgatagccagcatgaaacccaggccgccggtcacaccgtacactacggactcgatcagattgtagccataggacacattgttgatagagacacccagcacggcacagttggtggtgatcaggggcaggaacacgcccagagccgtatacagcgccggaacggtcttctgcaggaacatctcaatgaactgcaccaacgaggcgatgaccaggataaaggccaccgtctgcatgtactccagccccatgggcaccaggatcagatgctggatgaaataggtcaccagagaagccaaacccataacgaacgtgaccgcggcgcccatgcctacagccgtatcgattttcttggacacgcccataaaggggcagatacccaggaactgggagaggacgaagttattcgtcagaattgcgcccaaagaaatggcaaaaatcgacgtcaacatttccattatttagtcgcctccttctttgcagccttttcctcagactttttcaggaggaaagtcacaatggcaataaagatacccagggacaggaagccgcccgcgggctgcgtgatcagggacgcgccgatgccttcgggcaggatgcggataccgtccgcgccgccgagcacaatgtggaaaccgttgctcacatcgatcaggccgccgccaaaggtgccggaacccaaaaactcacgagccaccgagagaatggtcagtgcgcaggtaaaaccgatgccctgcgtcaaaccatcgacaacggaagccagcggaggattcttataggcaaacgcctccgcacggcccagaatgatgcagttcacgacaatcagagggataaacacacccagagagtcggacagcgccgggacaaacgccttgagcagaagatccacacaggtaacaaaaccggcaatgaccacaatgaatgccgcaatacgtaccttgttgggaataatattgcgcagcagcgaaataaccagattggagcacatcagcaccaatgttgcacaaatacccataccaatgccattaaacaatgaggtggaaacggccagagtgggacacatgccaaggatctgaaccaaaacggggttatttgtgataacgccttctttaagctgtttaccgaaattcataacctaatctcccccttctcagcccagctgttctgcaaccagcgacgccgcattcacgccgcgcgcaatcgccttggtggtcaccgtcgcaccggaaatcgcatcaacctgattgctgccagagttaaccgtaaacagattgccggtaccggcgctgcggccaacaaactggctcagcacgcccacaccgtttttgttcggtttgtcctggcagacattggtgccgatacccgcggtttcggcattgctgaccaccgaaataccagcgacattcccttctgcatcaataccgacaatgacatcaatgctgccgttaaagccagtgggaagcacttcgatcgcatagccgccagtagaggactcgtaaattgccgacaggccgctttcagcatcctcctggtctgcaatggccaccagctcatctgtaacgggaatttcagtaaacgtggcatccgggaagaccgcctgcagggaagcctgcagcttctgcgcctggatttctgcaatcttttcccatgtcacgccattgaccagccccagcaaccctgccacaatggcagaaatcaacatcaggacaccggccagtttcaggatatatttgggatccatctggaccttttccttctttgcctcgctcatttcgcagccgcctccttcttctcagacttttccggcttgacgaaaccgaagcggacaggcttgatatagcggtcaagcagccacacagtgcagttcataataatgatggcgaagcacacgccttcggaataggtgccgaaataacggataaacacagtgatcagaccgcagccaataccaaacacaatctggcctctgtgggtaacgggcgaagatgcataatccgtcgccataaagatggcgcccagcatcacgccgccgctgagcacgttgtacagcgcccagctcaaatgttcctgaccgccctgagggaacaaaagcgtgatgataaacaccgtcaggataaacgccaagggaatgtgcagggtgataaccttgcgccagcacaggtaaataccgccaatgatcagcatcaaagcagatacttcacccagggaaccgccggtctggcccatgaagcagttcagcagcgtggtgccgtcgggcatcaggccctggtgcagaaaagacagcggcgtggcagcggtgatgccgtcaatggctgcctccgtggaagcgcccacagtcatatgggatccgctggccacccaagtgcccatggtgccggcccaggaaaacaggaacgcgcgggcgcccaaagcggggttcatgaagtttttgcccaaaccgccatacagctgcttgacgatgatgatggcgaacgcatcgccgattacaatcatccagtagggaatgctgaccgggcaggtaaacgccagaagcatacccgtaaccactgcggacaaatcgccgatgggctggggccgtttcataattttgcagtacaaccattcaaagaacacacacgctgccacagacaccgcagtgaccgtcagcgcgcggaacccgaaaaagtagatcgcagccaccaacgccgggaccatggcgatgatcacatccaacatgatcgagcggacatcctcattgctgcgaatgtggggcgaagaggatgccttgaggttcagtttcgtataatccatctctcttagcacctccgattacttggcttctgccttttcggcagcttcagcggcagccttggcagcggcgcgctgattgttgatcttctgtttgccggtacggaaattgtgcaccaggtgcacacggccggggcaaatgtaggaacaggagccgcactcaatgcagtcaaacacattggccgcttccagctcctccagccggttcttgctggcatacatattcataatcagaggctccaggtgcatcgggcacaccgtgacgcacttgccgcagcggatgcacagaggatgttccaccgttttttcttcgtcgccggcaaaagccagcagcgcattggtcgctttgccgatgggtgcgtccagattatactgcgcattgcccatcatggggccgcccatcaaaatcttgaaggtgttttcctttacgccgccgcaggcatcaaacacgcacttgagcggcgtacccacacggacctccaggtttttcggctcgttggtacccgagcccgtcaccgtaacgatacggcggatcaggggcatgccggtggtgaccgcgcgatagatggcagcggtagtatccacattgaatacggcgcatcccacatccgcgggcagcttccctccaggcacctggcggccggtaaccgcctggatcatctgcttttctgcgccctggggataccgggtgtgctgcacatccaccacaatgttggacacaccttccttggcaatttcattgcgcaaaacttccacagcatccattttgttgtcttcgatgccgatatgtaccgttacgccgaatgcctgggccagcagctttgcacctccgataagctgctcaggcatttccagcataatgcggtgatcggacgtaatgtagggttcacattctgctgcgttgatgatcaccgtatccactttgccaagaccgccaaggatcttcacatgggtagggaacgtggcgccgccgcagccgacgataccagcgtttttaacgatctccgccaactgctcgccgctcagagattccggatgctccacgggtttaacgtcctcggataaggtatcctgatggtcgttttgaataaccaccgccataccatccgtcccgttgaaatgcggacgcagctccactgcaacgaccgtgccggacacacttgcgtgcaccggcgacgatacaaacccagtggcttcgccgattttttgccccagcttcacggtgtcgcccactgcaacaatcggggtgcagggcgcgccgatatggagggacatgggaatcacgacttcatctggtgcttccagcttttcaatcgctttcccacaagtcgcgtctttcatcggattgggatgaacgccgccaaaaaatgcttttgccattgttttcacctcatctaacacctgtgggtagcactatactaccccatactcggtatctataatatcgctttttcccgcgactggcaagtccttcgaccgaaattgatacatttttaacaatattcagatatttttttggaattttttgcttttattacccggtttccccaaaaatttatttcttttttaaggaaatcgtctgtgctcccgtcc

SEQ ID NO: 3675 - DNA, 18481 bp, Unknown
  16S sequences of unknown bacteria
tgcgcctgcgggcgcaccaaagggctttcctcggggcaaacaatcggcgcggttcgcactgccgtgcgctccgcttgttgtttgcctgaactccgggtcgctaaccgccttcggcggttgtatccactggatacccgcttcccttcgttcccctttggaaaccttcgggcaccgaaagtcggcgagaagcccataagatgacaagtcccaactcgcgccgtagtcggcgcgtcatgcccccggtgatggtttctcttataacagaattgtcgtgtgttgctgcaagcagggggctttcctcggggcaaacaatcggcgcggcccgcactgacgtgcgctccgcttgttgtttgcctgaactccggggcgctaaccgcctgcggcggttgtatccactggatgacggtgaacttttcaaatttaatttgaaaagttcagtctgccaaaggcagaccgggttgcccaagggcaacccgccttgcgtcttcccttcgttcccccctgcaccccttcggtttcgattatcgaaacaaatcgacaagtcaatggggacggcaaggcccactcccgcgccgtagtcggcgcatcaagccccgcccggcagggattttcttacggcagaactgccacgcgctgacgtaggcatggagctttcctcagggcaatcagcacggcccgcactgccacgcgctgcatttgccggttgctgtacccacagtcgtatagcgagaaaaacgaacgcgcattcagggccgcaagccctgttcccgcactggaactggcaaaggcgacagggaatgcgtccataggcgccccgtccccatgcggcacataaacttccttatccgttctgctccgtccctttctccccggcaggaacttccgtctgcttctcttcctcacttttccctaattcctccagcatatcccgcagctttttgggaatgggcaccccgcagcggcctaaattctccaagagggaaagggcttcgttgctgatgtaaaaccacattaccgccgtctggaacatggcgctgccctgtcctacgtaccagtccagcagcacgcttaaccctacgaccagcagaatgaccgccttgcgcagaagccccttccagcccgcctgactggatagtctgccgtgggcggttttccggctgcgccccaaggccgccgccagtacgccgctgacgtagtccgcccccatcagcgccgccagcaggatggcggtacgcccctgcccgttggtcatgccgtgaagaaaaccggcgatggccgccccgccgcctgccagaagatcgagggtgtttgcaaaaaaatcccgcatgatccgccactccttcctgtctggcaaggatatgacgaagcatgcgggtttcatgcgccgggcttattcgggacggtccgccacgggatcgtcgccccggtcgttcaggtagcggtcgatgatgaaacggggacgctgcttggtttcgttgtaaattttgccgatgtattcgccgattacacccagcgacaaaagctgaatgccgccgatcatccagatggaggccaatgtgctggtccaaccagtcacggtgtgcccggcgatccacgagatcagcgtgtacagcagcatcaccagcgaaatgaggaaaaccacgatgcctgcattggtgatcagccgaaggggcttgacggagaagctggtgatgccgtcgatggcaaaggccagcatttttttgaggggatatttgctttctccggcgaagcgctcgctgcgctcgtaaagcacggtgtcgctctggaagcctaccatgggcgccagtccccgcaggaacagattgacctccttgaactcggccagcgcgttcagggcccggttgctcatcagccggtagtccgcgtggttgaagacgatgtccacccccatgccgctcatcagccggtagaacatcagcgcggtttcccgcttgaagaaggtgtccttttcccgtttgctgcgcacaccgtagacgatttcgcagccctcgcggtgcttctcgataaacttgtccatggcgtccatgtcatcctgcagatccgcatccatggaaatgcagatgtcgcagcggttccgggccgtcatcagcccggccagcagcgcgttctggtggccccggttccggctcagcttcacgccctcgaaaagcgggttttccttgtgcaggtcggagatcagctcccatgtgcggtccttgctgccgtcgtttaccagcagcaccttgctgtcctcggagatgagccccttttccatcaggctgcccattttgatcaccagccgccgggacgtttccggcagcacctcttcttcattataacagggaatgacgaccatcagtttttccgccatggtgaagcctccttgtctggctgaaaattattgcacttcaaagggttccgattccacggaaagggtttgatccttccagtggatctgggcccggacgcggtacgtgcctgccggggcgggggaaccgtcccgcagactgccgtcccagtaaagggtcgtgcccgccagtcccataggccgggtagaacggcggtggcacagacgctccaccacctgcccctcctcatcgagaatggctacgctcaaagaacagggagaatggtgccccacaaataccgccagctcccgcccggtttccggggcaaaggaaccgctgatctctacggtgggagcggatggttcttcctcgggcaatacgcagagcaccctgcccgcgtggacgcgcagcttgccccggtcgatgctgaccagctgtaccagcgcatagccgtaggcgtcgtcggccagctcgtccagccgaagggtgcgctgcttccacccggcggagaccgcgccttcctgatcgccgaaggcggagaagcgctcggagtcatcgtagatcagctgggcgttttcaaactcccaccggccctcccggcggtataccagctgataggccacccgcaccgggcgcatagcaatgtattcgatggtgatctcccggctgtcccgatccaggatcaggtcggaaaaggtcacgtccatgatgggggagcgggaaaggcccgtgggcagcggctccgacaggtcgtaacggaagaccacaaaatcgtcgttctggggatagacttgaggcgtggaggcggcgtggttcagcagcaggtagtcgtaaagctccttcagggtgatgctgccgtcgtgattctggtcggccgggtagccgcaggcggcgctgagcgcgtcgcacagggcctgcgtgaaataaaacgccccctgccggtcgttctgcggttcgtcctctccggcgctccagtaccagctttcctcccgggcgccgctggaggtgatgaccttgaaatcgtcccccagaaagcagggcggctcgtcccattcggtcatgcccttgccgatgaaagcgccgctgttgcaagcgtccagaatgagcaccttcgtgcccgaaatgccgtcgaaggcagcttccagcgctttgggggtcagacggttctccgtctcgccgtcgcttaaaagcagagcgggctccacgccgttttccgggtcatacaggccgtgggtgctgatatacaggtagctgacgtccccggcctccgcaccgccgaaaacccgccggatcagctctgtcagctgctcgacggaagaaacgggttcggcggggaccatgatcttttccagcggcgtcgccgccgattggaacatttcctgcatggcatagacgttgttggtggagctgggataggcactgggctgggtgacaaaatcgtccacgccgatcagcagcgcccgctcccggcgaacggaagcgttctcgctccgggcggcaggaaaaggccaaagcgccgcaaggcagaaaagcgccagccaaaaagcgaatcttctgcgaagcgccaagcgtctccctcctccccgtctcatggatgcacaacgcctattgtacactattttcggcgattcgtacagacggggaaggacggagaaatctggttattcctccaccagccagttgtccgggtcgtcccagagctgctggcgcaggagccgggcaatgagctgctgggtctcccggtcggccagcccgttgacggcatggccgggcagaaattcctgctgcagcgccatcactgccgcccgagtgtgggagccgtaagcgccggtcaggtgcagctcgtccagaaagcccagctgataaaggttttgctgaagggccaacaccttgtcgccctcgttgccggagcgcatggtggtgtccaccaaatcttcgcacaggccgaagcccagcacctgactgttgtccagcgggtagaccttccgctgcacccggtcaggattgttgccctcgatgacgtgcaggtacacattgccttccgcatcccgggagcagtactcgatcagcgccacgtggtcggtatccccggcggcgttgtagctgaaaaacaccagatcgccggagcgggggatgaactcatttttgcttaaattatggtccgcgtcccggagccactgcgcgccccagtccgggcagacgcccttgcggtagacgaaacggccccgcttgataaaccagttccggcctgtgttctggccggaatagttgggatagatcacgttgagcaggtcttcgccaagactttgctgggcctgatccacgcaccagcagatgaactcggcgcaccactccgcataagggtcgccggcccattcgccgtatttggtgtagttctgcgccccctcggcgtagcccagctcgccccgggccacgtccagaagccgctggacaaaggcagggcgctccccttcggggatgggggtatccgtttcctccccgagggccgcaccgcctgccgaaaccagcaggcagcagatggtcagcgacgccgcaagccgtttgatccacatgatgtcgttcccctttccggcccgtcagcggccaaaggcctcaatgccccgcagcagctcaaattcccgaatgttgcgcacggtggtgtacattttccgggtcagcacggagccggtgcggtagaacaggcagatcaggggcacatcgttggcaaactgctgctgaatggccatggaggcataggcgaaatccgtctgattttcgcaggtacgcagctggtcgatcagatcggtcatatcgttgctgacgtagcgcatgtagttgcctgtgttgcccttgcgcagcatgaagccgtaatcgggcaccacatccatctggaaggcgcacagggccagctcgtaagcgccgctctggagcttgctctgcatgtcctgatagctgacggcagtggtcttgctgatgccgatgcccacttccgccagcatttcctcgatcaggttggcagtctcgtagcgcacgtcgttgtccgggtcctcataggtgatgagctgaaggtacaggtgcttcacgtcgttgcccacgatcttgtccagcgggccttcgttgtccagatcgctccatccgtcctcttccagaagctgccgggccttgtccgggttgtaaacgaagctgctttccaaactttcgtcgtacagccagctgttggagggcaccatagcgtccgaatccagcgtcatgcccatatacacgttgttggagatctggttgacgttgatggcgtaccgaatggcctgacgcacttttacactgtccatggggaacacctgatggttcatcagcaggcactccatctgccgggtgttgtaggcgatggacagggagctgatgccgcttttgtactgggcggcggctaccgagcgggtaaaggccgtgtctacccgaccgtattcgtaggcggtgatgagttccttattgctggagaaaaatgaagccatgatctgctggacctggggctgagtctgccaccagttggcgttggcgtccagctgcatatagctgcccggctcaaaggcgctgatgacataagggccgctgcccagcggattggcctgctccacctgtgccgcgggcactacggggaaggtcatgctgtaaagcacgccgtagtatttccgggcggccttgacgatgacggtgcgttcgtccgccttgctgatggagctgatggtgtagcgcatggtctggtagaagccgttgtcctcggcttcctcgtttttggccagcgtcagcaggtattgggcgctggctaccacatcgtccgcggtcagggccgaaccgtcggagaaacgcaggttttcccgcagggtgaaggtccaggtctccccgctgttgctttcctcccatttttcggccagatagggctggggaatgccgttgtcgtccacggtgacaaggctttcgtacaccacgttatacagggacaccatccccgcctcctgaggggtcaggggccggatctccgtggtgcgggtggacaccatgcccaccaccagcgaatcgcccacgttttccgccagcgaaaccgtgcagccggacagcaggcaaagaatcgtcaaaagcgccagaagccgttttttcatgcgtcgtcctccaaagcgtcataatacaggcggcggtaaatggcaaaatctcgtttgacccgaacggcgtactgcttcgtggggccgtcgggcagattgtccaacaggatggtctggccgtcagcgctgtacagggaggtgttcagccagttctgcacctgagtgccgcctgcgtgataggccatggccaccagcagcgggtcgccgcggaaacgctggctcagcttgcccagatagtagcagccgaaggtcacgttggtctccgcgtcgtagagcagatcgaaggaatagttttccacattcagcgccttggcgatgtcggcggcggtgtcctccatgacctgcatcagtccccgtgcgccgacgctgctttccgcgccggtgcggaaggtgctttcgttaaagacgatggcctccacaaaggccgggtgcaggttgtttttgtgggcctcccgctcaatcagctcccggtattccagcgggtgcttttcccggatggcgatccgcgcctgcgcccgttcctgtactacttgttgggtctgagtctggaaattcagctgcatcagccacagccccaccgcaatggcagccatggcgaatacggcgatgcccagccacgggatgcggaaccggggcgatgtttcctcttccggctcttccagccgggcaggggcgcggcggggctcctcccgcacttcataaggggaagcgtagggattttcccttgcttcaccgggagcgccccaagcctgagctgcctgccggtaggcctgcccgcgatttcgggcggcttcctgccgggccagtgcttcttctgccgcctgggcccggcgctggcgttcttcttccgtcagctggcggcgataggcgtattcctcccggttggggggataggagcgccggtcgctgccaggctcgccgcttaagctgcgccggtacgcctcctgccgccgctcgctgaccgcctgctgcgcgccatgccgacggcggcgggagatgacttcctgcttttcgtccagctcccgctgttcctgcaaaagctccggcggatagcccgcctcggcgtagcggtcggcggacccctgaaagcgatgctcctgccggggttccgcccgccgggccacgggacggcccagcggatcatactgcacgggctggtcatcttcctccacttccacccggggcgcagcctgtaccttgggggcgcgacgcatccgatcgtcggtggtggaggcattctgctgggctacccggtaccattcgggcagcttggccatggcgggcgggtcgaactgggagccgtcctccgtcacgatgacctgcggctcctgcaggggctggctcctgcggcgcgcggcggggcggtcgtaggggttctccgggatggcttcttcctcccgggtgggcagcatctgcacggtgccggtgcgttccggataccgcatgggcgcgcgggtgccgtaagcgtctacccgctcccggtcgtaggggtcggcccggtggcggatcaggggccggggcgcggcctgttcgtcctcctcgtggatattcttctgctgggcccgcctgcggccttcgttcaccgaggaaacgtaggaataatcaacgggcgcgccgctgtcgtcgtcctggcagcggaagggataagggggatggatcataggctctcctttatgcttgggcttcttccagccattgccggtagaggcggctcatcagggtacgcagctcttccagcgggcagtccgtggagacggttcggtcggcccgcttttctttttcgctcaggggcatttggctccggatgcgggtcatggcctgttcttccgtcaggccgttccgggtcatgagccgcctcagctgcacgggcaggggcgcggacacgcacaccgtttcatccgccagccggtccagcccggtttcgaacaaaaggggcacatccaatacaacgacgggcgcgccggattcccggcagcgctcgatctcgcttttcatctgagcgatgatgagcgggtgggtgacgtcgttgagcttttgcagctgttccgggtcatgaaacaccctttcggccagcgcagcgcggttcagggtctggtcattctggaagacttcgctgccgaaggcttcccggatagcgggaagggccttgccgccgggggcggtcaggcttcggctgacttcatccgcgtcaacgatgggtgcgccgagttcgcgcagcatttccgcaagggtggatttaccgcaggcgatgccgccggtgagggcgatgatcttcatgggaaggcctccttgaagggaagagggttgcagggggatgcccctgtgttcgcaggggagtgcccgcaggcgcaatcccctgctcccggcggggtctgacgcgccgactccggcgcgggagaagagcttgcagccctatggggcgcgctattgctttgggtggcgatccgaagggggtgcaggggggcgagcggaaagcccccctgcttgcagcaacaggcaacaactttgccgaagaaattcccctttgggggcctgacgcgccgactccggcgcgggagaggggcttgcagccctatggggcgctctatcgcttcgggtggcgatccgaaggggactgggggcgagcggaaagcccccagtgcgcccgcaggcgcaaacccctgcccccggcggggattgacgcgccgactccggcgcggattgggactggtcgtcccatggggcgctcacacttttctttcggtggcgaaagaaaagtgtgcaaaagaaagccagcggcacggcgactccgggaaaaaggcttctactgcccattttggcggcggggctcgctatgtcgcgcgcagcggagttggccagcttacgcctacagtcgtgcgcgctcggagctcgcctttttccgccgtcaaaatgggcgggcctttttccctccgctgcctatcgccgctctgctccggcgcagttggcgtggggcagacttacctcttgcaggttaaaatggttcttacggcttggcggtcttgcagcgccaagtatgagggtttctgcttccgtcgcagtcggcgtggggcaggcttaccccatgccagacccgcgagccatgaggcctgtcgccgaatggcggtctgcactcgccaagcggcagggaaccgtgccagacccgcgagccgtggcacccgtcgtgccacggcggtaaaaccccggccaagggctttcctgcgagcagccccgcgccccgcaggcgcggtccggggtgcagggggtcaccccctgctagtgggcggcttcccagtctttgccttgggagacttgggcgatgaggggaacgcggagggtgacgatgtgctccatgacctcctgcaggagggcggaggcccggggggcttcctcgatggggcattcgaccaccagttcgtcgtgtacctgcaggatcagccgggccttcaggccttcggcttccaggcggcgctccacctgcaccatggccagcttgatgatgtccgccgccgtgccctgtacgggggtgttcatggcggcgcgctcgccgaagctgcgcacgttacggttggaagaacccagctcgaaaagctcccggcggcggcggaacatcgtttccgcatagccgcgctcgtagcccagacggacgcattcgtccataaaggcacggacgcccggatagcgctcaaagtagcgctcgataaaccggttggcctcgggccgggaaatgcccgcgttccgggccagcccaaagccgctgatgccgtagacgatgccgaagttggtggccttcgccgcccggcgcatctccggcgtgacctcgtccatggaaacgccgtggatctccgccgcagtgcgggtgtggatgtcctgatttttgaggaaagcgtcgcacatggcctcgtcgccgctcagatgggccagcacccgcagctcgatctggctgtagtccgcgtccaatagaatgtttccctcgcccgccacaaaggcccggcgaatctcccggccctcgtcggtgcggatgggaatgttctgcaaattgggctccatgctggaaatgcggcccgtgaccgtggcggtctggtcaaaggtggtgtgaacccggccgtcccgtccccgcagcttccgcagaccgtccacgtaggtggactgcagcttgctcagcttgcggtagcgcagcaggggctcgatgcaggggtgatagggcgccaagtcctccagcacctcggcggcggtggaataggccccgttcttgttcttcttctgagcgggaagacccagtttgtcgaacagcacctcgcccagctgcttggggctgttcaggttgaagtccggcacctccgtcagccggtagaccgcctgacggctttcttcgatctcccgggtgaaaaggtcgctgagttggttcagcgtgtccaagtccaccagaaaaccctcgtcctccatctcaaataagacccgggtcaggggctgctccatgtcccagaggagggattccatgtcccgctgatggagccgctcccgctggcgcagagccatcgaatagacttccgctgcggagacgttttccggcagggagacggcctccccggcaaattccgcttccagcgacgcggccagcgcatagtccttctgagccgtgtgcagcagataggcccccagcatggtgtcctgacggacggtaggctggggcagatgatagcgttccagcagatggaacagctccttcgccccgtggacgatcagaggaacggcttccagcaccggctgcaactccgccagaatgtggtcctcatacatcccaccgcccatcagatcccgcagaaggggcatacgccacaattccagcgaaggggtcagcagggtgacttcttctgaacccagatgaagcacggcaaattccggcttttccgccgccagcgccgcgacggcctgacacagaatgtccgggtcggtgaagaccttctccccggaaacggcctgaagccccggcagccccgtctcctgcgccatggccgtagcgggagagactttcccggtctcctttttgccgccgcccgcccgctgccctgcggcagtggtgcggggctggaccgccggaaccgtttcgccgcttaacagccgctccacgcttttggcggtctggttcagctcgtattgctgcagcaagggaaccccctcgcccatctcctgccaggtgcagcgggcaaaatccggctggatgggcgcgttgcggcggatggtgcccagatcgcggctcagcagcgccgactcccggcctgcccgcagcttctcgcccagcttgcccttgacctcgtccgcatgggccagtacctcgtccagactgccgtattgggagatcaatttcagggcggtcttttcgccgatgcccgcgatgccggggatgttgtcgctgctgtcgcccatcaggcccttcatgtccggcacctgatcgggccggtagccgtaatgctccttcacgccctccgcgtccagcagcaggctttccgaaatgcccgtcttggtcaggataatgcgggtatccccgccgaccagttgcagactgtcccggtcgccggtgagcacataggccgcatagccctgctcgttggccagccgcgccgccgtgccaagcaggtcgtcagcttcgtagccctccatttcaaaagaggcgatatgcatggccttcagcacctcccgcatcaggggcagctggggccgcagctcctcgggcatgggcttgcgggtgcctttgtaatccgggtacagggtgtgacggaaggtgggcgcgtgaacgtccagcatcacgcacagcgcgtcgggccggtaatcccccagcgccttcagaagcatgctgaaaaagccgtgcaccgcgttggtgtaggtcccatccttggtcaccatcaggggcagggcgtgaaaggcccggaagatcaggctgtagccgtccaccagaaggacggagggtttgcgcgtttcgctcatgaggcctccattcagcagggggaaccgttcacccccggcggtcaactcgtaggattctccttgctattataccatagtttgccgtcttgtcacgccggggaggcgcaggtgttacagcttggggcacttgcgcttctttcccggcgaaactataatagaagggcaactgatttttcgcgcttttcgcaggagggaacccatggaacagcagaacttttttaccgccccgcagcccatgcagccgctggcggcccggcttcggccccagagcttggaggaatttgtggggcagcgacacttgctggctccgggaaaggtgctttggcggctgatcgagggcgaccatatttcctccatgatcttctggggccctccgggcgtgggcaagaccacgctggcccgcattatcgccaaccggacgaaggcaaagttcatcgacttttccgccgtcaccagcggcatcaaggagatccgcgaggtgatgcagagcgccgaccataacgccctgtacggcgaaaagaccatcgtatttgtggatgagatccaccgcttcaacaaggcccagcaggacgcgttcctgccctttgtggaaaaaggcagcatcgtgctcatcggggccaccacggaaaacccctccttcgaggtcaacggggcgcttttgtcccggtgcaaggtgtttgtgctgcacgccctgaccacggacgatctgactggtctgctggaacgggcgctgaaggaccctcgcggtttcggcgggcagaaggtggtcatggccccggagcttctgcgggccgtggcggagtttgccaacggcgacgcccgttctgccctgtccacgctggaaatggtggtgctcaacggcgatctggacggggacaccaccaccgtgacggaagaagtgctggaacagtgtatctccaaaaaatcccttttgtatgacaagaagggggaggagcactataatttgatctccgccctgcacaagtccatgcgcaattccgacccggacgcggcggtgtactggctggcccggatgctggaagccggggaagacccgctctacattgcccggcgggtggtgcgctttgccagcgaggacgtgggtctggccgatccccgggcgctggaactggcggtggcggcttatcaggcttgccattttctgggagtgcccgagtgcaacgtccatttgacgcaggccgtgacctacctgtcgctggcccccaaatccaacgccatggaggtggcctacaacgaggccaagaaggacgcggtgactcagctggccgagccggtgccgctgaacatccgcaacgcgcccacccggctgatgcagcagctggactatggcaagggctatatgtacgcccatgattataaggacaaactgaccgccatgcagtgtcttccggattcgctggtgggccgggaatactaccatcccacggaagaagggctggaaggccggttcaagacccgcctggagaccatcaaggcgtggaaaaaggaacatgggggaaggtgaaagcggaggctgctcttttcagggcagtcctttttcatttttgggcgtttttgggccgatcttttccgccgggtatgcagaaagcgggaaatgtgttataatgaaaattggctggttctgcctgtatactgggagggatgagatgttctgcggaatcctgcgttttctggtgacggcggcggccgtgcccgtgtgcgcccagctgatggacggcgtgcgggcggtggatatgagcaacgccatcgtgctggggctgctgctggcagtggtctacacagtgcttcggcccctgttgagactgctgctgaaggtggtcaacttctgcacgctggggcttttgtacgtggcggtggatgcgtggctggtgtggacagctgccgcgctggtggaaaacagcgttcagtttcagaatttctggtgggcgctggcggtggcggcggtggtgaacgccgcccgaatggtgatcgacgcgttgagcggcgatgtacgccggtaaggaggaaaacaatgcattttttattggtcaatgacgacgggatcggctcggtgggcattatggctctgatggaagcggcgctgaagcggggccaccgggtcagcatgtgcgcccccagcggccagatgagcgccgccagccatcggatcaccctttccgacccgctgtatgtgaaggattaccccctgaaccgggaaaacgcgcagggcttcgccattaccggcactccggcggactgcgtccggctggcgttcttgggcgggctggtcacggagccggtggacggcgtgatctccggtatcaacaacggatacaacgccgggctggccgtctattacagcggcaccgtgggcgcggcccgggaggcggcgctgctggggcatccgtccatcgcggcctccattgactacaaggccgaccccgcccatgtgcaggacgcggcagagctggtgctggaagtggcggagaaatacttccgtgcgcccaaaaacggcttccgggtgctgaacatcaacgtgcccgacctgccccgcgcccagtggaaggcaccggtgtatgcgcccctgtccgacgcgggcatccgggacggctacgaccgctgttacgccgaccggcccggcacgtatttctggttgcaggagggctgcgaatcggagccgcctgccgagggcagcgacgaatggtatttgaatgaggggcatcctgctctgacactcttgagcggcatgggcagcgaacctcaggcggatttcgaccggctgggtctgctgggctgacctgaccacgcagaaggagaagatcaagtgcacgacccacaggaatggatcacccggctcaatatgagcggcaagcccctgagcaaggggcagaagcgcatcgcggagtacatttcctgccactatgaaaaggcggtgtccatgacggccgtgatgctgggcaggcagtgcggcgtcagcgaaagcacggtggttcgcttcgccatggcgctgggctacgagggctacccggaaatgcaggaaaagcttcgctccatggttcgccagcggctcaccgccgagcagcgggtaggcatgatggaggagacagaccgccgggaggtggtcagcacggtgctgaaaaacgacctgcaaaacctgcgcaagaccatggacgagctgcgcccgcaggattttgatatggcggtggaatgcattctggccgcccggcggctgtatatcatgggcctgcgctcctccgcgccgctggctatgttcctgtaccattacctgcaccagatcttcgacgaggtggtgctggtgcagaatctgaccggcgacgtgttcgaggagatcgaccgcatccagaagggcgacgtgctgttcggcatcagctttccccggtattccgcccggacgctggaatgtatgcgcttcgcccggcagcacggagcgcaggtcatcggcatgactgacggcgtgatgagccccctgcgggaggaatcggatatctgcctgtgcgctcacacggatatgtccggctttgtggacagtctggctgccccgctttcgctgatcaacgcgctgatcgtgtctctgggcatgagccgccgcacggaactcagcgagcatttcaagcgtctggagggaatatggaacgcgcacagcgtctatatcgacaagctgcatgaataaagtgatcgtgatcggcggcggcgcggcggggctgatggcggccctgagcgcggcggaggcggaggcctccgtcctgctgctggaaggcaacgaaaaactgggcaagaaaatttacattaccggcaagggccgctgcaatgtgaccaacgcctgcgaacccgccgcctttatgaataaggtggtcaagaatccccgtttcctgttcagtgcgctgaacgcctttgggccggaggacatgatggccctgctggaacggttgggctgcccggtgaaggtggagcggggcgaccgggtcttcccggtcagcgagaaggccagcgacgtgactcggacgctggaaaaggaactgcggcggctaggcgtgtccatccggctgaacacgaaggtttcccacattttggtggaaaacactgcagtctgcggtgtggagctggaagacgggacgcggctggacgcaaaccgggtcatcgtggccaccggcgggcagagctatccttccaccggctccacgggcgacggcttccgctggatggcggagctgggccacacggtctatccgccgctgccttccctgatcgcgctgacctgcggcgcggcgtgggtttccgccttacagggcttgagcctgaaaaacgttcgcctgaccctgaagcggggcaaaaaggtgctttacagcgatgtgggcgagatgcttttcacccatttcggcatttccgggccgctggtgctgtccgcatccgcccacatggcggagctggccccggaggacgtacagcttctgctggacctgaagcccggtctgaccgctgagcagctggacgcgcggcttctgcgggagctggacgcttccggcaagcggcagctgcgcacccttctgaccacgctgtatcccgccagtctggcggaggagatgcccacgctctgcggcatccccgcgcaaacgcccgcctgcgagatcacccgggagcagcgcgcccggctggtcagggcgggcaaagaactgccccttcccgtgaacggaacccggcctctgagcgaggcggtggtcacccggggcggcgtcagcgtgaaggagatcaaccccgccaccatggaaagcaagaaaattcacggtctgtacgccgccggcgagcttctggacgtggacgccatgaccggcggcttcaacctgcagatcgccttttccaccggtcatttggccggaatgtccgccgcggaacccgacgctttttaacacccacagaattggagtttgaacccgcatgaactacattgttttggatttggaatggaaccagcctgtcagctacgcatccgccgcctaccgcaaggtgggaagcaagcttttatttgaggtcatccagatcggcgcggccaaggtggatgagacgatgcagatcgtcgattccatctccattcccatctgtcccacccactatctgaccattcatccccgggtcaagcgcatgaccggtctgacgcaggagattctctgcgacgcgcctgctttttccgagggcatggagcagtttatggactggtgcggagacgactgcgtctgcctgacttggggcggcgacgatatcagcgttctgcaacagaatgtggatttcttcaaatttggtcggcccctgccccggatgtacgacctgcagcggctctacgccgccgaaagcggccgaaagggtcaggttgccctgaaagcggccatggaggcgctgggcattgacccggacgaggaccgtagctttcacaacgccaaagacgacgcttattacaccgctctggtctggcagaagctgccccatcccgagaaagtactgcagtacgaggagcacgccaagaagctgggtcacagcgagcgtcgttcccggcttcgtttttccgaaacggtgccatccgtgaaggaagcccttgccagcgacaagctgaccgcgccccgctgtcccacctgtcagcagcccacccagctcaagacggagctgatcccgcaggcggcgggccgctttgtggccctcgccgagtgcgcccatcatggcccgctctttctgcaggcccggttcgctcttttgccagacggccagaaggggatgcgcctgaccatccagcccgccgaccggcagacgaaggcctacgttcacacgaaggagctgcaataccagctcaagcgcaagcggggcgactatgccaacgccgatttcgacgatcttaccgaagccctctcctccgacatgcccttcgactaaggggtagtaccccttaccccggactgcgcgccgtgggcgcgcagggtgctcgggggacat

SEQ ID NO: 3676 - DNA, 8496 bp, Unknown
  16S sequences of unknown bacteria
gctcgcggcggcgctgacggcgctcgttctgctgattgttccgatgacattcaaaaacagcatgaaagatatcccgtcgctttcgacaccgcttctgaagcttgagaattacctgtattcgcttgcgcgcggggacagtccggatttctcgagcctgatattttccggcgtttccgcgctcgacaagcgcacgacggcgtcgtccgaccgcgtttacaccggtacgagactgtttgaggtgcaggttgacacgtcgctgccggtgtatcttcgcggttgggtcgggaccgattactacggggacagctggcactcgctcgattacgacaggatcgcggaatacaagcggcttttcggcactgacttctcgccggacgagatgaccggggatatgctccgcgctgttgatccgtcactcacgacggtcggttccgcgggatacagaccgcacaccgacctcggatacgtgacggcgcgggtcagcgtcaaaaagctgaagccgacggcgaacgtcgttttcatgccgtcctacaggctcggaaaaaatcagctcttcgccttcggaagtttcgatgagggcgacgtggagtactcgaattacagcgacggaatattcctcagtacgtcctatctcttctccgacgactattcggtcgtctcggacataccgctgctgcgggatccggagttcgccgggaatatcggcagtttcgtgcagaattacagacgggagtcgaggataatatcgacgatctcggcgtacggcaacgattctgcggacgggctcaggcgcgcgtatctcgtgaccgtgcatgacgtcgtgataagcggcaagggaaccctcgtctggcgggacggctcgctcgacattgatctccggagcggctcggacgcgccgcagaaggatcagatcctcgccgctgccgttttgcggctagacaaaatgaccgatgagttgataagcgaggatgagaaggacaacctgtcctaccgctacgcgtttgttatggatgaggaggagcgcagggatatacgcgcccttatcagtgtggtcgcgaaatatcgtgagtacgcttatcagaactatctcacgggttgtgagaattataccgcgataaagcagcttgcctcggacgtcgtttacggtccgacgaccgtcgacaagaacagggtttatgtcgacacgcgcagatacggagatatggacgagtacacggcgagacatatgatggttatggcggtgattgactatctctcggagaatatggtctacacattgtctccggttgacccgtcgccgacaagggattatgtcaacgcggcggatacgttcctctttgacacccaggaggggtactgcgtgcagttcgcgacctccgccgtcatgatgatacgctcgctcgggataccggcgaggtacgcggaggggtatattgcgagcgatttttcgagaaattccggcggcgacgccgtcggaaagtattcgtctctggtgctcgacaacaacgcgcacgcgtgggttgaggtatattacgacgattacggatgggtacagtatgaggcgacaacgccttactattcggagatgtacgaggggcttgtcccgacggtcgatgaggtggagacggatgttgttccggatgacacaacgcaggtgacggatgtggtcacggacagcgagacgaccatgccggaggatacgacggctccggacgatgagattgtcgagccggagaagccggtgaggataccgccggtgcttatcgcggttatggttgtcgttctggtaattgtcatctgtatagttgctttgaggacgcgggcggctcgggttcgtgccgggcgtgaggagttgtcgcggagggcgcgtgaggcgcgtgattccgctggcaggacagcggcggcgaaggagcttgacgacagaataatgcggctgctctcaaagctcggttacagacctgagccgggcgagcagataggggcattcgcggcgagggtcgatgaggcgcttggaatgaaggcggacagcggtttcgcggctgccgccgacgcggttctcgcggcggagttttcgggcgacgttcccacgaaggggctcgcgtcgattgacgctttctaccgtgagctgtgcgactacgcccttcgcggcgcaaaatcatataagcgtctgtggctcgagtgcactttgctcgcctgatgtataaagtttgagaaagggaggggtgcaggggagggaaaggacttttcaaagtcctttccctcccctgcaagctgacaaatggcagaatcattcactcgtgacttaaccggagcggcgctcgcttatataggcgacgcggcgctcgaggtgcttgtcaggagatatcttgtcggacttggcgtgaacgggagcggtaagcttaacggtatggcgcttgggttcgtgaaggctacggcgcagagcgcggcggttgagaagctgcttccgttgctcgatgaagaggaagagtatatgtataagcgcgggaggaacgcgagcgggatttcggcgcctaagagcgcgtctgccggggagtacaggcgtgctaccgggatggaggcgctgttcgggtatctggagctcgcggggaagcgggagcgtatggaggcgctgtttttcgcggcttacgcggatattatagcggagcttgacgcggcgcatccgaatcatgtcagatttacggaggtaaagaacaaatgataaaagtaatgtcggttttcggcacaaggccggaggctataaagatgtgcccgcttgtgaaggaacttgatagggcggatgggatagagagcgtcgtgtgcgtcacggcgcagcacagggagatgcttgacagcgcgcttgagtatttcggcgtgaagcctgagtatgatctcaatatcatgaagcgcgggcagactctgtcgtcgatcacggcggatgtcatactcgggcttgagggtgtgctcgcggaggcgagaccggatatcgtgcttgtccacggggacactacgacgagcttcgcggcggcgctcgcggcgttttacgcgaagataccggtcggacatgtcgaggcggggctccgcacttatgacaggtattctccgtatccggaggaggtcaaccggaatctgacgtcgaagctcgcgacgctgcatttcgcgccgactgagctcaaccgctcgaatctcgcgaaggagggaataaccgagggcgtttatgtcacgggaaacactgcgcttgacgcgttcagatatactgtccatccgggatacgtctttgccgacgagaagctccgcgggcttgatttcgcggggaagaaggtcgtcgcgctgacggcgcacaggcgtgagaatcagtcgggcggcatcgagcatatctgccgtgccgttcttgagctcacagagcgccatccggagcttcagttcgtttatccggtgcatctcagtcccgcggtgcggaatgtcgttttcccgctccttgacggtaagcccggaataaccctcaccgatccggtcgatgtagcggatatgcacaacctcatcgcgaagtcgttcttcatcatgaccgattccggcggaatacaggaggaggctccgtccttccataagccggtgctcgtcctgagaaccgagaccgagcgtccggaggcagtcgcggcggggaccgtcaaggtcatcggcaccgatacggagcgcgtcgtggacgaggctgagcggctcatttcagataagtccgagtacgaccgcatggcggcggcggtgaacccgtacggagacggacacgcgtcagagaggatcgtcgacgctatacgcggatatttcgcgggaaataagtgagctgccgcactttaacgcgctaaaaacttttctctgaatcgacaaatgcttgtgcaatttaactgttgacaaaagtgccgcgcggtgctataatatatccatccaaacacaaaacgaggaacaaaaccatgacaggccgtattttcgcagctgcatattggaactattacttttactttaccggaaaaagtaatagtgatttctgctgcgcaaagacgagatgtcattgaggcaataaaagcccggtacagataactcgaagcctcgcggtgaaatcaccgcgaggcttctttaattttaatcggaccggacggtgagacgcacagcggattttgtggagtgaaagataattttcagaaaaattctaaaggagaaaaagaaaatggtagtagtagtaaacaagcaggcaagcgatgaaaaactggcgtccctcgtatccttccttgaggatcagaacctcaccgtccacaccgtccgcggaaaatatcagactatcctcggtctcatcggcgacaccagcgcggtcgatatcgacacgatcgccggtctcgacatcgtcgactcggtaaagcgcatcagcgagccctacaagagcgcgaacagaaaattccatccggatgacactgtcgttaccgttccgtccgcgaacggcgacgtgaagatcggagcgggtttcaccttcatcgccggcccctgctcgattgagagcgaggagcagataatcgaggttgccgaggcggtcaggaagtccggcgcgaacattctccgcggcggcgcgttcaagccccgtacctccccgtacgctttccagggactcagaaacgagggcataaagctccttctcgaggcaaagaaggcgaccggacttccgattatcaccgagatcatggacgagcgtcacctcgacctcttcggagatgtcgacataatccaggtcggcgcgcgcaatatgcagaacttcgagcttctcaaggagctcggcaagacaaagaagccgatcctcctgaagcgcggtctcgcgaacaccatacaggagctcctcatgagcgccgagtacatcatggcgggcggcaatgaacaggtcatcctctgcgagcgcggcatccgcaccttcgagacctgcacgagaaacacacttgatatctccgcggttccggtacttcacgagctcactcaccttcccgtcatcgtcgacccgagccatgcctgcggtatcgcgagactcgtcgagccgatggctatggctgcggcggcgtgcggcgcgaacggcgtcatgatcgaggtccacaacaaccccgcgaaggcgctctgcgacggtccccagtcgctcactcccgctcagttcgacgagacggtaaagaaggtcaagagagtatacgccgctgctaccgagcagtgattggcaaaatcccgcaaaagtaaaaagaaaagaagagaaagaaatatctgccgcgggcgtcagctcgcggcagattgtttttcagatgtctcttgtcagaataaatctcccgaagcactcgggtctgtggaagtcaggctccggcgtgcctatgtgcgcccatgaaccataggtgtccggatggcggtaacttccgcacttatagaagtttccggcgaaatatgtactctcgtcgacctcttcgattccgaaaacctttttcagaaccgtgagcggtacgaactcgaaaagctcccaatgatcgtccgcgacgacagatctgacctcgaacggcgcgatacccatgtcaacgagagaggtgcgcggagcccgtcctctgccgtatgccgtgaggatcgcaggaacagagtttgactcgatgttgatatacccgttctcagacgcgtctgcgccgtgcatggtgaagaagaactcgagacagctgtcaagatagaccggctcgttaaggcgcgtgtacctcgcctcagggtccttctcgaagctgaaaagatgtgcgtagagtccctcacgctcgtctccagtcttcgcgtaggcgagggaagcgtatgagaccggtctgaactcgctgttccacgggaagtccgctatctccgcctttgggagtgacgtccagtcaatgtccgcggtgtctgtgatttttaccttgtattctgacatttgttttgtcctttcttttgccgtgaccggctcttttttattttgtccagttcctgaaatacgccgccggggcgacgcctgtatattgcctgaagcatctcgaaaaatagctgtagtcgttgaagccgactgcgcgggctatatgcgagatcggctccttgctgtcccggaactcctgcgccgcgcggtttatcctgtattcacgcaggtacgcggagaaagtgcagcagaaattctgcctgaacagccggtagaagttcctgtgcccgtagccgagcgcgtttccgacgtcgtccgccgtcagctcctccgcgtaatgcgcgtctatgtactttgttacgtcgcggatgaagacgagatcatggtcggacggtgccgcggcttcatcgatatgctccgccagcaccgacagcaggccgtatattccggaaaatatccgtccctcgctgcccgccgttcccgacgtgagatacgcgccgtgcgcctcgcggagaccagtgaatatcctgccaaactcatctcccgccgtactaccgccgcgcaggacaggtgagaaccgccgcgtgccgttcgtgacgtcagagatcagcttggcgataaggctgctgccgggcaccggtctgaacgccgcgagacctatcataaggcagtcgtatctgaccgactcgccggggagcagccagccgctgtgtgtgtcatacgggttcacgatcaggctgtctcccgcgcgcagctcaaggagcgagtcgtttatcagcgcgcggagcgttccttcgcggatatacagcacctctgtcgactcgtgattatgcggtgaaaagagcgccctcgctccaggcagctgacgcgggaacgggcaaggctgacggtcggtgtaggcaccgccgtattcccgtatcgagatcgatatgacgccgaaattgtcgtaccgcttgtgattatattcgtaattcatcatatcaccccttgcccatacacatattctatcacggatagaaagttttgtcaagagtaaaccctgatttaagggttgttttcgcagagaaaagcccataaatccaagcctttttctgcgaaaacccaaattattcagtgtttcaccagagataaaatgaaaaagagaccgcgacggcggtctctcaggattatttcgctatcgggtagcatacctctgtgacgaactcgtccgggtttgaggtttcgtgcgggctcacgtgatatatgttgaacatattccccgcgaaggaatatccattctcgcgcacccacttcgcgaccgcagcgttcgcctcgccgatcttcgcgtaggagcccttgtgcatcacggtggcacaggtcaccgcggggattgtcctgaacttcacgtgctcggtgtccggataatgaccagtcaccgtcttgcgcgcttcgatatcgacgtcggtctccttgaactccccgtcgtggaagacgacactgcaaaggcacgggtctgccgggacgatattcattccggcggtctccgatacgaggacgctccagatcatcccctcgtgctcgtatgacgggatggtcatgcgcacagtcgcggcgtagctctccgggaaggttttttctgttaccgtataattcatattattttcctctctcaggtgatttcctgcgttgaggctctcaagcgccgacgtgaccgcgctgagcttcgcggcggcacgactgtattcacggtacagctcctcgcgccgggcaatatacatcgtctctatgtaatgcgtgtcgtcgctccgctcgattatctcgcgtatcgccgaaacgccgaagcctatgtcgcgcagagcggttatcctcatcgccagcccgagctgttcctcggaatagtagcggtacccgctgaagcggtcgacctcgaccgggacgagaagcccgttctcgtcgtagtggcgcagcatacgcacgctgatcatcgacagttttgagaagtctcctattttaagcatttgtccaacctccgaaggcacgaattgtgatcacatatatattatagcacctgacaccatgtgagagtcaatagctttccggaaatttttttgaaaaaagtgatcggcacggtatattgacagccgggcggcgttgtggtataatgtgataagcggttcaaaagagaggtggtcagaaatggtctattacgagccgaatgacgcgctcgtcgcgagatacccgggcggcagcttcggtatcaatctgtatgagttcagcaccgagcactttttcagcgccgaggacggcatgccgtattcgagcatcggggtgatcacgcacggagttgtcactattaaaagcgcgtacgcgaaggtcgatatcccgaccggaggtattttctacatatccgctgacgaaaaatacacctcgacgtggactggagacccggacgtggtcttctggggacttcacgcgtggccgccgcttgacaggatgtcggagagcggatgcttcgccatatccgagatcaggaacgacggggacatcgacgcggtgaaatcaaaaatcggcattgtctttcagggcgg

SEQ ID NO: 3677 - DNA, 32759 bp, Unknown
  16S sequences of unknown bacteria
cggtaaaaagagctaagagcgaaggtattcttgtggattttcttaataagtatgcaacggaggtcgaaggtatgcttacaggaataacagtagagaagtacggagaggttatgaagaaagaaggctttgaagatggcagagcagcgggtcttgaacagggcagaagcgaaggtatcgctcaaggcgaggcttccggcagagcagagcgtgagattgagatggctaaggccttaaaggctaaaggagtcagtattgatatcatagctgaaacttcgggactgcctaaagaggaaatagaacaattgtaattaccttggtcagggtgtttctccagagaggcctatcagcagtgaactgaactgcggtgcgccggtttgtattgacctgcgttaattaaaaatcgggattagggtgtatttcttttggaatgcacctttttaagtacattgattatgatattatatttacagcagccggaacagacagggtgataagaggcgtgtagaggagtatgactgtaaatttcctgagagatgaggctaaacgccgaaaattgtaacacaatgtcacataaaccggcagtgattaatattgtccgggcaatgaggaggtttgttatgtgtgaatatgatgacaagagaggagattgtgaggataatatcctgattaatgcagagattgaggatgaagcagaggccaaaaagaagcaggatgatgaggatttgtttgatctgtttatactgaatgagttttttgatctgtagggatagggaaacaactggaacaatgagggtaaaaacttgaatattttagtatataggggtataatgtgtgtgaatattttgagaaagataaagggagccaaatgactacactagactactataataacaatgctgaattattcatctgtgatactaaggatgttgaattcagtgatatacagaaagaatttgcatcatatctgccaccttgttcagacattttagatctgggctgcggctccgggcgtgactcaatgacctttatgaacatgggatataatgtgactccggcagacggctcggaaaaactctgtgaaatgacatcagagtatcttggcatacctgtaaaacatatgctgtttcaggagcttgatgagcatgaacgatatgacggggtatgggcctgcgccagtatacttcaccttaaacacagtgagcttcctgatgtgatagacaggataattaaatcacttaaacaaggtggggttttttatgcttcttttaaatacggagattttaaaggagacagaaacggcagatactatactgatatgaatgaggccggatgggaagccttaatgaaccttaacaaggagcttgtaacccgaaagatatggattacaggtgatgtcagagcagggcgtgaaaatgagaaatggtttaatgttatagctgttaaaaataaaagagactgattatggcaaatctgaaaaacgagggatatgaactggctgagagctgtacatattcaaacggcggcagaagtgaatattatgttaagggaggtacagccgttatcattgactatgatatatgcagagtgaatgatgataaggctgcttttccttattctctgattaccgaaaaacagaacgcatatatgaaagcctataacaaggtatacagatttctggcagaggatatcaagcaggccgttatatacgaaggctatcagcctgatggagaggactttgataccagagtatccgacagaggtgatactgctgagccttcacctcttgaaatgctgtttgaagacagcttcacagccgtatacggcgctgacagtattaagtatctgaacagggaatacagtatatcggatttcgagggaaacaactattttcttgactactatatcagcacagcctcaggaaatatagctgtagaggaaaacggagtaacttatcatcaccctcagatcataggggaggacagatatcgcaggcagctttacaagcagaacctgtgtacaaaatgggatatcaggctgtacagattttctacagaggattgtcggtttaaggagaaaatggaggatgatatccgcacctttataggaaacagctgtgatgattttgaagcaggcggtcttatggcagccagagaggtcactttgtatgagcatcaggaaaactgccttgaagagatagcaaaatcacgcagacaaggtaaaaaagcttttctggttgtactgcctactgcaagcggcaaatcaaagattgttgaagaggatattaaagtatttgcaaagggaagaacttccctgcaggtacttgtaatggcaccaaatcttaatatagtcagcgactggaaagagcgtataacagcttctttgccggaatatgagaaacatatagatgtggttacctttgcatatatgtcaaggaactacagccgctttagtaatgactattataactatatagtaatagatgaggcacatcacgctgtagcacctgtcttgaaacgtgttatacagcattttacacctgaatttatgataggcattaccgctacggatcagagacctgaccgcaaaaaacttgaaagcgtattcggctcatacaggaccggcctgtcacttcagagcgcaatggaacagggaataattgcacaggcaagagtctacagagtagagtcaaacatagatttaagcagcgtgagagtaaacggcagagaatatgtcaatgcagaccttgaaaagaatataagagtcgtatcaagaaatgaactcatagccgatgttattgagaaatattttaaagacggtgaggcaggcagtaagcaggggcttgtattctgtgtcaatacagcacatacaagggagatggcaaagcttcttaacgaaagaggaataagcgcagcagcctattcaagcaaagaaaaaaacactgcgaagataatgtctgattttaaagacaaaaagacaagattcctgtgtgcctgcagtatgatatcagagggatgggattatcctgaacttggaataatagttatggcaaggccgactctttcaaaggtgctttatctgcagcaggtaggcaggggcctgcgaaagacagaaaacaaatcagacgtatatattatagatgtggtagatgaatacggagcaatggtgaagccctgctcaatgcactcaatctttcagaacgcgctttatgtaccatttgcgccgattacaaagagaaacttcacaccgggagagctgattgaaattgacggcatacatgaatatgtgaataaaattacagagatagatatagacagctttgatgataaattcggagattacctgagcgctgaacagctggcaagagaattctttgtaagcacaggtacggtaaactcgtggatcaaaaagaaaaaaataacacctacggcagcgctgcctttcggaagcagaagcatatatcttttcagcccggaggatgcagccgctatacgcagggaactcaatattcctgttcacgatgatactacaatatacagagatttctttgacttccttgaagaaagagattatactttatcatacaagatgccgtttatgatttcactgattgataatctgagcagtatcggagaggctgaaatagataaagtgcttgacggatatatcgccttttatatggacaggctggacaaaggacttgccgctgacagagccgcatgtccgtatacatatgaatatctcagtgacaggaaggcggtaaaaaagaatatgctgacaaatccgtttgagaaatttgagagaaaaagatttatgtactactcaaaggatttaggcaagattgcgctgaacacagcactgtttaacagcctgaaaagcgaggattttaaaagaatccgaaatcagatggaagaggatctgaaggaatattacagtggtattgaaaataaggggacagattaaattaacagaagaaaggaactgatacaatggaatcaagagtagacaaagcagccgaaagacataagaaaggatacaactgcgcgcaggcagtagcatgtgcatactgtgatttggcaggaattgatgaagaaaccatgttcaaggttacagaagctatggggcttggtatgggcggtatgaacggtacctgcggtgctgttacgggagcctgtgccatagcaggtatgcggagcagctgcggtgatctgaacaagcctgtaagcaaaggtgcaacatacaaggtaagcagagaaataagcgacagatttttagaggaaacaggatctcttacatgcagagatataaagggcgttgatacaggtaaggttctaaagagctgtcatgactgtgtcaaggatgctgcaaggattcttgaagaggtgtgttttaaggagtgatacatttatcgggaaattaccgggttaaggttgattatatatacaatttgttttaaagaataaggagattgtgagattgataaaggacagaaatgtaaacataattacagatgaggataaccataaagttattttgataaatgatattatgtttaagggtaatcgtaatattaattggtaagaagttaaagaatacttaatgggttatgttggagattcttatcagatagaagcggatgcataagttgtatatataggtagcgagttaccggaagaatttacagagtctgagcatagggaatctcttatgggggctaaggcaaaagcgaaagcaaacgctgcgatagcaatccttgaattgatacagaatgcagccaatcctacatacgaagaaaacagaaaagataaacataataaaaacgctagaaatggctggtatagatacgatgtacggttcgcattgcctgtgtatgaagatgatgtacctgttagatataatatatttaaagccaggttgcttataaatcatgcagcaaacaataaaaagtatctttatgatgtgctggcaataaaaaaagaaacgagcaggctgtatcataaagtacagtgaaaacccatttcttaacaagaatgatacatctgattgattgaaaagtcaagataatattaattgaagatagtgtcaagttgttgtggaatttttgattgacatcaattccaaagtgtgtttttgaagtaagaagttttggatggacaataaagcggataggaataagtaaataagacttcgaattgagctggctggagcagagatgttctggtcggcctttttgctttaaagaatgtggatgtaaaatctgcacaaatatgataaaataaaaatcgggattttatacactttatgtgtttacgatagaaaaagaaaaggagaccggaaatgccagagatagataagaagtatccagtgaatacagcggtttggattgcgacagcattgctttcggcagaagcgtttgatagtaatccagcatgcagcaaaaaggatatgtatttcaaacaaacagcaatcgtacagcgtgcacaagagctggcggaaagcagcgtggcaaatgctcgttgttcgcagtggtgctgtgcggataatgacaactcatctaataattatcttcgaggagatctggtcgaagatagttcattgagaaggttgagtttgatagatgaatttccagaaaaaacatatccggaaagactcgacatgtcggatgaattgaccatgaatggaaataaaatgacaatggaagagctgttctattttgtcagagagcagtatccaacggttattggaaatgatagtaaaataaattacataggagttctggattatctacgagataacacagatgttccgtattctaagcccgatgcaccgggacttgcagcagaagaagtaagtcgtctattggaagtaaagaaaaaaggacaaaacgctatagctgagttgaagaagatggcagaagcatttgctgttaagtttaagttagacaaatgtatgtctatgtcttggctggatggttcaaatacaaaaacgcgccgctatttatgggcacaattaaagtatggaaagtatgcagacaacccggtaagtgtttctgtatttgttgagaaaaatggcagtgatactcgttatagggtaagtttggaaataaaaaatgatggcactgataaagagttgatgaaacagtaccattcacatttagacattcctcttaatgtgatggcaggcctagtttatgtgcctgatagtaacgagtggggaaatccagatattttgaataagacgcaagaggaaataaagcaggaagttgaatctggaaagctcaagaaagtgcagatatgtaagtatattgatagaaaaccagatgaaacaaacgcttattatcatacagaaataactaaggcaatagctgctatactgccatattatgagcatgtacttggaattgaaaagatagagtattatccaagtcttgcggaatatgatccaggaattactgcagaagaatacgaaagaattctgggtgatgagaatattgtaaagcgtgcatggctagatactcttcattacttgtatttgatgggtgggataggaacctgcaagcagatagcaaataaatatggaaatggtgctgcgcattataatacgaatgcgatcaatgtggctaaggcagtacataaggaaacgaactgcccgttatgtgtaagagacacaggagaaaatcaatactggccagttctgttctatggacgaggtttgacagacagtgccgaaggtatattttcttataaaatgagagagcctttgatggaggcaatcaaagcattagagaaaagaggtgtgttccaggagatgaaagaagcaaataaagagtttgataagaatttaatattatatggacctcctggaacaggaaagacatataattctgccacatacgctgttgcaatttgcgatggtaagtctgtcgatgaacttacagattatgatgcagttatgacaagatataacgaattaaagaaagccggaagaatagcatttactacatttcatcagtcatatgggtatgaagaatttatagagggaattaaaccgattattgatgagaataagcaagatattggatatacgatagaagcaggagtgtttaaggagttttgtgaaaatgcgaaaagcattgttcgaacaaagaacagtgattctattgatgcaggggctagaatatggaagttaaccattatgaatggagatctgaatcaagtcaaacaggaatgctttgaagaaaataatgttcgaatgggatttgatatggattcagatgaagcacgttctttcgtggaagatgtgaagcttggcgatattattttgtcatttaaaactcgaaagacaattgatggaattgcaatagtaacagatgaagcagttgagttacaagacaagcgtatgtataagactgcgagagcagtgaaatggcttgcaaaaaatattgatgaggatattactgatataaataatggtaagttacttcatagaatgacatttgcaaaagtccctaatatgaatgtaaaggatgttattaagttagctgagaaagtaaatccaggcttagaaagtacagtaattgaagaaaatgtagagccacatgtatttattattgatgaaattaacagaggaaatatctcaaaaatattcggggaattaattacattaattgaaagtacaaagagagctgggatgtctgaatcagcatcagctatattaccatattcaggagatgaatttagtgtaccatctaacgtgtatatacttggaacaatgaatacagcagacagatcaattgcattgatggatacagcccttcgtagaaggtttcagtttattgaaatgatgccggatttggatgtgcttagaaagattcatgctgataaggtagaggatctggatgtggcagcagtacttgataaaatcaatgaaagaatcacatttttatacgatagagaacatacaattggacatgcattttttactggacttaaggatgatgcaacacttgtaaaactgcagtccatatttgaaaaatcggtaattccgttattacaagaatatttttatgaggactatcagaaggtacagcttgttttaggcgataacgcaaagagtgatgataacttgaagtttattcttgatgagaaagtagtggcaaagaatattttcaaaggtaacgttgaagatgtgattgatcttccagaaaagagatactcaattaataaggtggcctttggcaatatcaacagctataaagaaattttgtaaagcgtggtgatagcgtggataaaccgtttgaggtaaaagagtttgattctattatctgcaatgcggattataaagatgatgaaaaatacaaatatttgaatcagaaagaattcgataatctggtggcgtttatccatgagtttacaggagatgcggatagtgcagatgcgttagactttatgaagattggctaccgacgtaatgttggagaagtagtctctataaagaactacgttggtctgattcaaatgaagaatggtttccagatccaggtacttccaaagatatcgtttggagcggaagacgaaggaaatgtgcaaaccaagagagtgttccttagaatgctccgaagcatgaaggattttccaagtaaggttttcaacgatgcttctttaaaagtagaccagatgaatttatacgagctgtttatcaatatgtatctgcaggaagtcagacagttggtgaaacgcggtataaagtcaaattatgttggacaggaagataatttgcgttattacaaaggaaaacttcttgtaaatcagcaggtgagggcgaattttgcccacaaggagcgcttttacgtagcctatgaagaattccatcccaatagggcagaaaaccggcttgtaaaggcaacactcgcaaagttacagaaattgacgacaagtgcagaaaattcaaaagagataagacagttactaacagcttttgaaatggtggatgcttcggtaaactatgcgaaggacttttcacaggtagttatcaatagaaatactaaggattatgaaatgctgatgcagtggtcaaaggtatttctgatgaataagagttttacgacgttctccggatccacagcatcaagagccttgctgttcccgatggagtctgtatatgaaagttatgtagcacagcagatgaaaaaggtaatgagtccggaaggttgggatgtatccagccaagacaaaggacactatctttttacagaaccaaggcggcagtttgcgctaaggccggatatcgttatgaaaagaggagagcgtacagtaattctggataccaagtggaaaagtctcgttgataacgaaagagtaaattatggtatttctcaggctgatatgtatcagatgtatgcttactctaagaaatataatacacttgaaatatggctattatacccggtgaatgatgaaatgagaaatcataagccaatccggtttgagagtggagatggaacaacagtaaatttacattttgtttatgtcgataaaatagaagaaagtttgcaagaacttagaagtttattagaagcaggtgaataggatggctaatacaaaatttgacaaactcatagggctattagaaccattggaaagtgatagtgttggagaatggataatagataaagagcacaaaggaacagaagacgatcctaaccacttcccatatccaatgtatacagaagtggttaatgagctaatagaagtggtttatgagtttgagcatgaaaatccggaatatgaattaacaaaatatggagagcttcttaaggaaagaggtctcgaatggggacaacggtcaatggagaatgcggatgtttccaatatggatgcgcaaggtattatggcactacttatgggcatggtgcgtggtgagagattttgtgatggcgctataatgggaatgataaaatcaggagctgtcaagaaatggcttctgcgtctgcaagaacttaaggagatgcagtagatgaagacaattagagtagtggcagcggttatttgtgattctgtacaggaaccgcgtaagatatttgctacggctagaggatatggggagtttaaaggacaatgggaatttcctggtggaaagatagaagaaggagaaacgccggagcaggcgttaaagcgagaaattgaagaagaattggaaacaagaatcgaagtgtacaatttgattgataccatcgaatatgattatcctaatttccatctatcaatggactgcttttggtgtgagacaataaccggaaagctggtactgaaggaagcagaagcagctaagtggttaagcaaggatgagttggagtctgtttggtggttaccagcagatctaacgttggtagagaaaattcgcagcgaaatgactgtaaataaggagatcattttaactgaagaaacagaaatattggagggagagattgttttagatagtaaaggtaacaaaatccttgaaatttatgaaggaatgacaaatattgattttgctggtgctgttgatagactggcgcaatatgttaatattgcagagattgcatctacaatagaaaaaggcgttgaatatgttgttcaaataccagcgcagtatcaaaagcaatatgaaacaggcgagtattttattaataagaataaaacaacgggaatagaatggcccacattaatgagaaaggctgaaaatggacagcatagatttgtagatgacttgccaattaagcagaaagaatttatacagggtaatcctttccaagatatttgcaatagttatcataatatatgtatgcaacagcaaatagcccagttgtcagaaagagtagaagaaacctatcaaacggtcaagatgattgaacgcggacagcaggatgataggattgcattgattgaagctggaagaaaagaaattatgcttgcactgacactacaaaatgaaaatgatagtaatgagcatatgcgcttgggaattcataatttacttttaggccgggagcaaattggtaaagcaatggtgagaagaatagagaactttgcacctttaccagataataaagcaatgcttgttttaaatatgtggattcataatgattatcaaagtaaaaaagatgatgaaatagaaaatattcaggaatgctatgaaatgtatttgcaggcaacaaaaatgattgcaggagtatacgcatataagggagaaatggctgccgttgaacaaatatttggagatggtatttcatttttggatagcatagattttagtaagcttaagtccatagagttagtgcataagggcgttgatcttgatgatatgttttataatcatgcatcaaagtatgtggaaattgaaaagaaacaatgtatagaaagtggcaaagcatatgattatattgcgcttaaagttactggtgataaattattggaggtgttgactgatggcagagaagtttcaaaagaagaagttgaatagagaggatcataagaaaatggataatgctgtgaagtacgccaaaaaaggaggagcagctttaataactgctggtatagtgtcaattgcaataaaaacgaatggtcctaaaattatcagcgcggctaagaatataattacaaaggtatagatacccctattttaatgcaaagaggaatgtactggaaagaactcttagacagaataagagatatcagatcatcggaaaaaataatagataacacaggaggaagcaatggatatatcaaaaaaagactggaagctttacagagaaaaactgcccggctggcaggaaaggtatatggagggacttgttaaagagtatattgatatactcagctcagatgaaaaaaaggcttcagataaattctgggaacttgaggaaagaataaaaaaagacaaaaaacatccgggagttctgatagaggtcagaaaatccaatgctttgtatgacattatcagatttatcgcccttgacgttataacttatgacgatattgccgatttcagcgaggaacttaaacaggatgtaagggattttactgaacggcggagttaccgatatgacttttgaacagtacatagagaagtttaatttaagacttgatgaccggcaggcagaggctgttaaatgcgataatctctgcctgcttcttgctgtgcccggttccggcaaaaccacaacccttgttgcaaggctcggatatatgatatatgtaaaaggcgtcagacctgaacatatacttactgtgacatatacaaacgcggcaacaagggatatgaaggctagatttgaaaaatacttcggcggggaatattcagatgctgtgacatttaagaccataaactcactttgcaacgaaataatcgggtactacacatacattacaggtggtagcagctttgaactcatagaggacaatcttcctgcaataagggagatttacatatcacagacgggaaactggcctgatgaggctgacctcaaagaaatacagcagcagataacatacataaaaaatatgctccttgataaaaagcagataaaagcgataacggtcacagaggacaaaatttcaatagaaaatatatatgagcagtattgcagcaggctcagtgaaaatcgtctgatggactttgatgaccagatggtgtttgcattccgtatactcagaaaaaacagcagagttcgtgaatactttaaaaacagatacagatatctgcttgtcgatgaggcacaggacacctctaaaatacagcactatataattcagatgcttgcccatggcagaaaccagctgtttatggtaggcgatgaggaccagagcatatacggctttcgggctgcatatcccagggcacttatggaatttgaaaaaacatataaaggcgggcaggtgatgctccttgaaaccgactacaggtctgacggatatattgtaaaagcagccgcccggtttattaagcacaatcagaacaggtacgagaaaaaaatgctgcctgcaaaaccggaaacaaagcccgtaacaatagatagtatggaaaaaagacagcagcagtacggcagggtaataaactatctcagaagcatttacagcggcagacagactgctatactttacagaaacaatgacagtgcgctgccgtacttatacaggctcaaaaaagagggaataccatataactgcaaaggcatggaaacaaccttttttacaggcaggacagtacgatatataaccgatctgatcaagctctcatatgatatggtaaacacagagctgttcatgagcacctactcaaaaacaggctgctatataactaaaaaaatggcagagacagcagtaaatatgtatgaaaacggcagaagcagagagggtatatggaactgtcttgaactgcttgtaaaggagggcagcagaagcagggacattaagagcacagcatcatatataaggaagcttaaaacaatgtcagccccggaggcgcttgaaaccatagaattcctgatcgcagggaaaagaagcatagatacagagaagatgtacatactcaaatgccttgcagcagaggatatgagcgctgaggagtttctcaatatgcttgaagaacttaaatatgatattgagaataaagcgcctgattatggtgcagatgttatactgtccaccattcattccgcaaagggacttgaatacgataacgtcataattgcagatacaattgacggaattctgccgggatcagaggcggatgttgaagaggaaagaaggcttttttatgtagggcttacaagagcaagggagagtatgatgatacttaaatacagcgactgctatatgccatttgtatatctcatggaaaagatactgaggaaaacccagccgggcaaggctgcgaatgaaaccattattaacgcagatgttaaagcaggagaggtgattatacacaaatcaattggcaaaggaacggtaacagctgttgacggcgatattattactgtgaaatttaatggtggcagcaggaatttttcctatggcttttgtataaaacaggggttgatatggaaagagaaatagtagatgtaaaacaaaaatccgacgattagccaaaaatttttccgacgattggctaaaaatttttccgatgattggccaatctgtactttgttgctcaattatatattcttcatatgaccgcaaacaagtaccgaaaaactgtgatataatgcaaagtagttactttttaaatatacacagggaggatttatgcatcttgttaaagattatgtttcagatttaaaggaagagttttcgggatataacgggaagaagctctcaaaggatttaatgtcaggtatcacagttgcggcggtagcgcttccgctggcgcttgcattcggtgtcagctccggggcaaccgcagccgcaggtcttgtcaccgcaataataggaggcgtcataataagtattttttcgggagcctcatttcagatttcagggcctacaggagcaatgacagccatacttgtcacactggcttcaaaatacggcatgcagggaatacttacagcctgcttcatagcgggaattattcttgttattgccggtatactcagactcggcagagtcatctattatattccgtcatcagtaattaccggattcacatcaggcatagccctcataatcgctctgggacagcttgataacttcttcggtgtcacttcttccggagatcttgcaataaccaaggtgctttcatatttcacaaacggctttgatcccaactgggaggctgttgcaatcggcgcagcggtaatgctcataatgattgtatggccaaagaagcttaacgataaaataccgtcatcacttgcagcccttgtaataattctaatagtatgtcattttttaaacccggatgttgaaacagtggggcagataccaaagagcctgtttcttgacgacagactttccctcaaaggcatgaatatggctcagttctgggacttatttgttcctgcgctttccattgctgctctgggtatgatagaaagtctgctttgcggagcgtcggcaggcaagatgaaaaaagaagagctcaatgcggacagggaactggtggctcagggcataggcaatatgataataccgctctttggcggaatacctgcaacggcagccattgcaagaaccagtgttgccatcaagtcaggctgtcagaccagaataacaggaatattccatgcagtaattctgctgctttcaatgttcgtgctttcaccggtaatgtcagaggtgccgctttcggcgctggcgggaatacttataataactgcgtggagaatgaacgactggaaaaacatacacttcattttcgatcataaattcaaatcgggaatgctcaagtttttcataactatgattgcaacagttgtgctggacctcacgcaggctataataataggggttgctttctcgtcattcctcataatcgtaaagcttacggacatagatatatcggtaagcgaaatcgacaaggacagattagaggaagtgggagttcatctgcctagaatatccaacaaggtcagaattgcatatctgaccggaaccattttctttgcggtggttgacaagcttgtcaagcagcttagaaaacaggacagcgcagaggctctgatactttcaatgagaggtgtgcctatgatagacctttcgggaatagaggccatgatagatcttgtcagagagcttgaggcaaacggcacagaggtgtaccttacaagcgttcagccaaaggtgcttgaagaaatgagaagaggcggcctcatagacctcataggcgaggaatatgtattccagagcgccgagcaggcaatagtaattgcgcagcaggagcatatgtaaaaattcaatatacaaagatacagaccctgtcaggtaaaaaacaagcccggcagggtgcttttttgcattagtttactttcagtttattttacaggaatataatgcagattgggttattggcagaaaaggaagtaaatatgacaaaaaagaaaaaaccgttaattaattcagcgcattatctttcggcggccagatttgacatatggatcaggctgcttttcagaaatctaaaaggtatatctccgggaaaaatcccgcaggtcatatacatcactgttatgagcctgatacttttcccgtttgcgattttagagcttctcataatgtacataccggtaaagcttacaaagataaaaaaaccgccggtgcatataataggaatatggaggtcgggaaccaccaatgttcagtatacgctgtcgagagattcgcagttcggctggctggatccagtaagcaccgttacatttaacaacagtatattgctgggatggctcctgaagtacgcgcagaaaaaaattctggtggacgcaaggcctatggacaatatggagtacagactggatctgcctatggaggatctttatgcgctttccacctataccactcactcatttaatcatatgatggtatttcccaaaaactacagagaatatctgtcgaccctgtataccgatgaaatgagcgacaggctgcagagagaatgggaacgcaaatacgacttcctgctcaaaaagacaactcttatcaagcgaggcaggcagctcatattaaaaagtccggacaattcctgcaatgtcgataagctggaggcaaaatatccgggaagcaaattcatactcataagcagaaacccgtacaagatagtaccatcggtaatcaaagcgctgacatcaatgatggaggttatgagccttgaaggtatggccgacagcgagctgattgaaaacgcagccatagaagtgttcaaaaaaatgaatacaaaaatgtttaaggacatcgaaaatatccccgagggtgatcttgtacttataaggcacgagaactttgttaaagccccggttgaaaatatggaatacatatacgagcagcttcatcttgacggttttgaaaaggccaagccgtattttgaaagctatcagaacacccagaaggagtacaaacccaataagcttgtgctaagtccttcccttaaagagaagataaaccgggagcttaaattttattttgattactttggatatgaaatagaggaatagctatgtcacaattaacacatcttgataaattagaggcggaagccatatacataatgagagaggttgcagccgagtgcgaaaagcctgtaatgctctactcaataggaaaggacagctcggtaatgcttcacattgcgatgaaagcattttatcccgaaaaaccgccgtttccgtttatgcacatcgacaccacatggaaattcagagaaatgacagagtttcgtgaccgcaaggcaaaggagcttggaattgaaatgctggtgtatcagaatgaggacggcatcgaaagaggtatcaatccttttgagcacggggctgcatatacggatattatgaaaacccaggctctgaaagacgctcttgacaaatacggctttaccgcggcttttggcggcggcaggagagatgaggaaaaatccagagccaaagagagaatattttctttcagaaacaaatctcacggctgggatccgaaaaatcagagaccggagatgtggaagctgtttaacacaagcatcaacaagggcgaaagcatcagagtttttcctctttccaactggaccgaaaaggatatatggcagtacataagaagagaaaacatagatatagtgccgctgtattttgccaaggaaagaccggtggtcgaaaaggacggcaatataattatgatagatgatgaccgtatcagaaaatatctcggacctgaagataaaatagtaacaaaaaaagtccgtttcagaaccttaggctgctatcctctgacaggcggctgcgagtcagaggcagataccctagacaagataattgaggaaaccttaggcgctgtaaactcggagagaaccagcagagttatagaccacgaggcggcaggcagtatggaaagacgcaaaagggagggatatttctaatggcagacttacttaaattcataacctgcggcagcgtagacgacggaaaatccaccctgataggacatatgctctacgatgccaagctgatatttacagatcaggaaagagcccttgaacttgacagcaaggtgggcagcgcaggcggcggcatagactactcgctgctgctggacggacttatggcagagcgcgagcagggcatcacaatagatgttgcatacagatactttacgaccgaaaaaagaagcttcatagttgcagacacacccggccacgaggaatacacaagaaatatggcggtgggcgcatcatttgcagaccttgcggtaatccttgtcgatgcctcacaaggagtgctggtgcagaccagaagacacgcgcgcatatgctctctgatgggaatacgccatttcgtaattgcagtaaacaaaatggaccttatagactacagcagagaaaaattcgatgaaattgcaaaggcgataaacaaattcttcgccgagttctcctgtgaaagcctgcagattatacctgtatctgcaaccataggcgacaacataaccaaaaggtcggagaatatgagttggtacacaggagcgcctctgcttgagtacctcgaaaacatagatgtatcatcagaagatacggacgatgcctttattatgcctgtgcagagagtatcaagacccgaccatactttcagaggttttcagggtcagatagaggcaggaaaggtcgcggcaggagatgaggtaacatctcttccaagcggtgaaaaagcgagggtaaaaagaataattgcagccggaaaagatgcagagcaggccgtagccggtcagcctgtgtccctgcagcttgacagagaaatagatgtttcaaggggctgtgttttgtcatcgggggaggctttacaggtaagcaatatgtttactgcggagatactctggatggacgaggacagacttgttgcaggcagaaactatctgctcaagctgggaacgaaaacacttcccgcttcggtaatggacattaaatacaaggtcgatgtaaacagcggacttcatatagaggcggacacccttgtcaaaaacgaaatcgcatgctgtgacatatcggtatcggacaaaacagttcttgcgccttttgatgaaaacaaggcaatgggcagcttcatacttatagatgttgtgacccatatgacctctgcctgcggagttgtaagacatacgctgagaagagcagacaacctgacatggcacaatatggacataacaagagaaagcagagccgcaggactcggacagaagccgtttactctgtggtttacggggctttcgggttccggcaaatcaacccttgcaaacgaagtggaaaaacgccttgcggcaaagggcagacatacaatgctgcttgacggcgacaatgtgagaatgggccttaacaaggatcttggctttaccgaagccgacagagtggaaaacatcaggcgtattgcggaggtatcaaagcttatgaatgatgccggactcatagtcctgacctcctttatatcgccttatgaggcagaccgtaaaaatgcggctgatataatcggggaaagcttcgtggaagtgtatgtaagcacatctcttgaggagtgtgagaaaagagatgtaaaaggactgtacaaaaaagccagagcaggagaaatacctaacttcacaggaatatcaagcgaatacgaagtgcctgtatcacctgatattaccgtagacaccgagaatttatctgtagccgaggctgctgatgctgttatggctcagcttgaaaaacatctgtaacggaggaaatgaaaatgaaaaaactgactgcacttattctgtgcattgcgataactgccggcgcgctgtgtgcctgcggaggcggcgaggcggcgacaaatgaagtaagagttgcatattttcctaatataactcatgcgcaggcgctgtatatgaaagaccagggcatatttgaaaaagccctcggcgatgagtacagcgtaaaatggacagctttcaacgcaggacctgcagaggtggaagcgctgtttgcaggcgagatagacctcggatatataggacctgtgcctgccataaacgcaaatgtcaaatctcatggtgatgtggttataattgcaaatgcctgcgatgcgggagcagtgcttttaaaaagcgcggactcagatatcaaatcggtggcagaccttgacggtaaaaaggtttctgtaccgcagcttggcaacacacagcatctgtcactgctggatcttctggcggcaaacggactcaagcctgtttcagagggcggcacggttgatatagttgaggttgaaaatgcagatgttcagactatgtttgacaacggcagcatcagcgcagccatagtaccggagccgtggggcagcatacttgaggacaaatgcggcgcaaaaacagtgcttgattatgatgaaattatggcaggcggcaactaccctacggcagtcgtagtagtgcgaaaggactttatggaggcaaatcctgaaatcgtaaaagccttcgtgcaggctcaccttgatgcgacagaatacataaatgcgcagagcggagaggctatagatataatatgcagacagatagaggaaaccacaggcaaaacctatgaggcatcagttatagacagcgctttttcaagacttaacataactgccgatatatcaggagatgcccttggcgagtttgccaaagtgggcgtttcgcagggctttattgcaacagagcctgacgagggctatgttgacacaggtatactcaaatcacttgaacagaggtaaaaacaatgctaaaaacagcaggtctttcaaagacctttaagaatgcggcagagcctgcattatcggatataaatctggaaatagcagaaggggaattcatatgtatagtgggaccgtcaggttgcggcaagtcaacactgcttaatctcattgcaggacttgagaaacctacagaaggaactataactcttgacggcagagaagttctgggccccggcgcagacagggttgttatgtttcaggagccggccctttatccgtggctcaatgtcatagacaatgtgaaattcggaatgaagcttgcgggagtgccaaagggcgaacaggaaaaaagagcggagaaatatctcagaatggtgcatctgtgggatttcagagagtatgcggttcatgagctttccggcggcatgaagcagcgtacggctcttgccagagcacttaccatggacagcaggataatgcttatggacgagcctttttcggctcttgacaagcagacaataaacaagcttcgcgcggagcttgaggctatctgggaggaaacccggaggactataatatatgttactcacagtgttgaagaggctctgtattttgcagacagaataatcatactggcagacagacccggaattgtcaaaagcatagtgaaaatagatctgccgaggccaaggcagcttgactcggaggattttgtagatataaggaagcatttgcttgacgaattaaaagtagaggtggagaagattgaaaaagaggaatatgacagagtttagcataaaggatattttcttctttatagctcttatcgttatctggcaggcggctgcatatttcggctccgatgtgttcggctggtggaagtcctatgcgtttcctactcctgcgggagttgttgcaagccttgtcagtatggcaaagaaaggaacacttctcgccgctgtgggcttcagtatgaaaagggctgtaataggctttgctattgctcttgcggccggagcagttatgggcgtgctgattacatatgttaaatatctcaacagaaatctgaagccgctgcttatgggtatacagacgctgccgagcatatgctgggtgccttttgcaatcctgtggtttggtcttgcagagaaagcaataatatttgtagtagttatggggtctgttttcagcgtatcccttgccattgaaaactcaatcagaaatatacctgtgatatacacgaaagttgcaaagaccatgggcgcagggcgaaaggacatactgcttcatgtggtgcttcccgcagcgcttcctggctttgtgtctgggctgcggcagtcgtggtcttttgcgtggagagctctgatgtcaggtgaagtaatgtcatcctttatagggcttggctatgtgctgatgctgggcagggaccttgccgatatcaatcaggtaatggcagtaatgatagtgataataattgtcggaattataattgacaagtttgtattctcaatagcagaaaacagaatgttaaagaaaagaggacttgaataaatcaaaaggtgatggcgcaaatgtcatcacctttgcagtaatatcaatacaaatcttaaattgcttgatattgtcacagatatgtgctatcatagatttcaagtagagtaaatattgtgcgttaagtgttatggaatgggatgttgtccataaacgaaggtaatccgcggtacaatattgcatccactactacattaaggtatgagacattctcttttcgctttagtgtagttactaaggtgaaaggaggttttttatgcagcatgctattaacagcagtacggcaaggcttgtggttacggcgctgatgaccgcgctgtgtcttgtattaaacagaattgtgccggcaacaccggtttatcatatcagcgctgatttcattgcggtgtttatcgttgcggtgctttacggccctgtgtggtcgggcatagcctacggcgttgcagataccataggcagcatacttattccgtttggagcatacaatccgggaataacagctactctgatactcatcggcgtggcgtacggatttgtattctacaaaaaggatatgaatggcaaagccctgattataaggacagttattgcatcagtgatagtattcctgattaagctgtttcttacaacactgtgcctgtggccgatgttcggcgcagacggcacttatctggcatatgtggtactcagactccctaactgtatcgcaattcttatagcccagatcatatgcataccgcttgtttacaagctgattgtggagagattgaaatttgcactgtaaatttattagattttttctgcaaagtgtgttataatatttataacaacgagtggttttttaaacgtaagtcctgttgtcaggacttatttttatgcagtaagaggtgatagcttgtatagtgttggagaattgattttttacggaagaacaggagtatgtgaggttaaggagattactacactcaaatccatgggagagacagagggcagattatattatatactcgagccgctctacaaggaatgcaaaatatccatccctgtagacaatgacaagatatatatgcgccctgtaatatcaagaaaacacgcggaggagcttatagacagaattccgcatataaatacgtccgcatactacagccataatctgaatcagctcaaggaacactacagagaggttatggagagtcacgactgtatgaatatgatcgagatgactatgtccatacaccagaaaaaacgtgaggcagaggcacacaaaaagaaactgggagctgttgatgagcgttttatgaaagaggcagaggagctcatattcggcgaatttgcagcagcccttgatatcccgcgcagcgagatacaaggatatatagaaaacagagtaaacattatgaagaagtccgtgtagggcttcttttttccaagctgacacagtaatgagagctgccggtatgcaaggcagctctcagacattttattttatcttgccgtctatccccacagttatgactttgaacggtatctccctgtctgttttaagcagagcgttcacgacagcgtgctgcagaccggtgcagcatgggacctccatctttacaacagtaacgctctttatattattctcattgaatattgcagtgagcttttgtgagtagtctgtatcatcaagcttagggcagcctatcagagttatatgatctctgatgaattcatcatgaaatgctccatacgcaaaagctgtgcagtcagcggcaatcagcaggtctgcattatcaaagtaaggtgcgtttacaggcaccagctttatctggacaggccattgtctgagctgactttcacctgatatactgctgttttcttttgtatgctttatttctctcaaggcctgaccgggacagccgaagcccgttcctgcctttacggcagcctcatcgtaaggtgcagcctctcgctctacaaacgagattgcatctacgggacacaccggcaggcagtcgccgagtccgtcacagtaatcatcccttataagctgagccttgccgtctatcatagcaatggctccctcatgacaggctttggcgcaggcgccgcagccgttgcatttgtctctgtcgatttctattattcttcttttcattactccatcctcccgaatttcatttcttcacctgatttatcgtatttttttcgtttgcctgtaagattttctatccttattttccatacggcagtacgatcaaggctttttgcaatggcatcttcaaagttttccatattgtcaggtgtgtatttttcgcatatgagtcttaaagcctttattttttcctgtatgtctgtaacctcgcaggcggttccggaaaaagctgcggattcaaactcggttgtgaatctgtctgtggcgggagtgacatctccgacacagctgacatatactttcggatttcttttaagaatatctgtcttggtaccctcaaaggcgctgtgaaaatatatgctgcctccgtcttctgcaaccgaaagaggcacgcagtagggatttcctttttcatctgtcatggcaacctgtgcaaatgagcatttgtctataacgccaagagcaaattcctcaggcatctgcctgtcttttcttctcatatatatatcctcccttgaatcattatctgaagtataatataatttcagtacagagtacgttgtaaatacaaccaaaagggagaaattatgaaaaagtttaaaattttcagcggcatagatgaaaaagaaacagaaaaactgctgagacgcataaatgcatatgtaaaagaatacaaaaaggacgagtatatacttatggcaggtcagcgggcggaggcggtgtgccttgtatcatacggcagtgtgaatataattaaggaggatatcttcggcgagaggcatattctgactcatatgggtgaaggctcgatgtttggtgaaagctatgctttcagcgccaatgcagatatgcaggtgagcgccgtcgctgcgcaggactgtaaaataatattcattaaggccgaaaaaatcattgacatatcatcaccggatgatgcccggcttattcttctgaagaatataattgcggcaattgccggtcagaatataaggcttacaggcaaaattgaacatctgagcagaagaagcataagagaaaaagttatgtcgtatctgagtgacgaatctgcagccggaagcggaaaggaaatcataataccgtataacaggcaggaacttgcggactatctggctgtagaccgcagcgccctttccgccgagcttggaaggatgagagatgacggactgattgagtttgagagaaacagatttacaatatgcagataacgctactgcagcagttttatctttcttctgtccgaatctataatgccgtcttccttgagatggcgaagctcacgcatcaggcttgtcctgtcaacacacagataatccgccagtttagacagcgaaacatgagtttcaaaggtgttgctttctgttatgtcagccatatattcaaaatatgtcataagctttgctcttgtgctttttctggagatgaaacttatcctgagagcaagctcctgtgattttctggcggccataagaaacagatttcgggtgacttctatatggcagctgcacagattgctgcagggtgatgttattgtggagtagggaacaaacaggatactgcagtccttatcagcctcaacaatatattcgagtgttcctacaggcaggcagaacagttctccgaatacgtcgtctttcttgaagtattctatagtctgctcattaccgtcataatctatgcagtaaagatgcgctctgcctgacagtacgagtcctattgatgagagttctgaagaaagcaccgttatggtttcaccgcttctgtagttttttggctctgagccaaagcattttctcattttcattatatcatcggctgatacaccgtcaaaaaatttcatagccgcctccttggttgttatctgaaaaaaatataatatattattaaatatatctcaaaattgtggcatatgcaacaggaaagcattaaaaagtgtgatattataaatatacaataaagattgagataaatcacaggaggtaaatgatatgatgaaattttataaatgttcacactgtggaaacattgtagcttttgtagagaataagggagttcctgtaatgtgctgcggtcagaaaatggatgagctggttccgaacacaacagatgcagcaggcgagaaacacgttcccgtatacgaagtcaaagacggaacagttactgtaactgtaggctcagtagagcatcctatgcttgaggaacattacattcagtgggtggcactcgaaacaaaacagggcaaccagaggaagcttcttgcaccgggacagaaaccggaggtgaaatttgcaataacacctgatgatgaagttgtagctgtatatgaatactgcaatcttcatggtctgtggaaatcctaatgagacctgtttgcagatcagaaggagtctctaagggataacagcgtttttctgttatacgcagaaaggagatgacaatggacagcaaagtaatgcacagattaagctacgggctttatgtactgactgcaaaagacggaaattctgataacggctgcatcataaatacggcgatgcaggttacatcaggacctgacagaatttcaataaccgttaacaaacagaacagaacacatgatatggtcagggcgtcggggaaattcaatatttcaatgataagccgggaagcctcttttgacctgtttaaaactttcggatttcagtccggaaaaaatgtgaacaagtttgaaaccttcaaagactgcgacagggcggcaaacggtgtcttgtatatatcagggcagacgaacggctttttgtcgggaagtgtgatgcaggagattgatctgggtacacatacactgtttattgccgatgtgacagacggcaaagtgctgtctgagtcgccgtcggtgacatatgagtattaccagaaaaacataaagcctgcgccggaaaaaaagaaaacaggatatgtatgcaggatatgcggatatatctatgagggtgaacctctgccagaggatttcatatgtccatggtgcaggcatggcgcggcagattttgaaaagctttaatgaggcgaaaggagaaaacaaatggaactcaaaggaacaaaaacagaaaaaaacctgcagacagcttttgcaggagaatcacaggcaagaaataaatacacatactttgcgagcgttgcaaagaaagaaggctacgaacagattgcagagctgttcttaaagacagccgaaaacgagaaagaacatgcaaaactgtggtttaaggctctcggagaactgggagatacagcagccaaccttctggcagcggcagagggagaaaactacgaatggaccgatatgtacgacacctttgcaaaagaggcagaggaggagggctttacagagcttgcatataaattcagagcagttgcagccatcgaaaaggctcacgaagaaagataccgcgcgcttctgaagaacgtcaaagaagctgcagtatttgagaagaaagatgaaaccctctgggaatgcaggaactgcggtcatctggtaacttcaaaagacgcgccggaggtatgtcctgtatgcgcacatcctcagagcttctttgaagtaagaaaagaaaactactaactaaaataattaaaggctctcgtatgagggcctttaatatatttcaacacctgtataataatgctttaatatctgtctgtaggtatagccttcctttgccataccgtcggcgccgtactggctgagtccgacaccgtgaccgctgccggcagaggtgaatacgacatttttctcactgggcgatacagtaaaggttgccgaaaaaagtcccagcgctgttctgacctcgacacccgacagaacagcatttccaatctgcattttagcaacactgcctccttcgttgtttgatataatcttaacgttatttttgtttacagcacctgcagaaacagcgggataggaagcggatatcagacttttcagctttgcatagctgaattctgccgtttcttttttatgagttgcaccatcttcgtaaggacttttgacactgacaagatagggcactgcagatacaaacacatcttcacagttttcggtgcggccgccgctggaggaatgaaacagagcgtgttttacaggcttttcgttatagtacataatctgcccctctgtggcatctacggcgctgcatattttagtatagctttttttaatccattccttgccctttagttcttcaagttcggctttgtccctgtatacctggcagtgagtcgtatcacatacgggagcggcagggtggccggaggaatttccggaaagaattcttgcgacagaataggttcttgcggcaacagcctgagctttcatagcttcctttttaaaagtgtgtggcacctcgcctgcaaccactcccttgacatattcctcgaaatcaacagtttcggttttgccggtaagtgtgcggtatacctttacagttttcggcatttcgataagataatcgggagcttcctcctgctgcgaagccaccggaaccgggacagaaaatatgctgctaaatatgtagggaaataccgcaaacagtataaatgcggccgcaaagagggcgaccgggtatttcagatatgcggtaagatttaatttatttggttttcgtcttcttcttgtacgcttcatatatatactgttatgcgcaaaggagctgatttatgacaggaaaaaagacatctccgaggaaatgtctttaagtgaggtttgaaaatcaaattccatctgcattaatattgttttaatgcagaaataacagcgtaaatttcaggtaagcttctccgaagaatatgtaaacaggtaagcttccaaaataagcgattgttatagttgctgtgctgttaacgataaaatatattcgtggttttttacaattggtttgaaatataaaatcgttaaaaattagtcaagcaacaagtatattataagcctttgcatattaaaaagcaacagaaaatgataaaaaattaacaaataattatgtttttttgaagatgcaatccgcagcctgttgaaaacagaggcagggcagtgatataatcagtatagaatatgtacagaaaggaatgagatagtatgtttgatgaaaatataaaaaaagcaaataaaactaaagccgacactataatcaaggctctcgaaaagagaggaatgaaaggctactactgcgataccagagaagaagcattagagcttgccttaagcttcataaatgagggcgacaaggttgcctgcggcggctctatgactctcggtgagataggattaaaggacaggctggggaatatgaacatagactgggttgacccgtttaagtttacagatgctgacgaaatgtttgcagagagagtaagaactcttacaactgatgtgtattttatgagttcaaatgctgttacaatggacggcatacttgttaatatcgacggtacaggcaacagagttgcggctctctgctacggacctaaaaaagtagtgctggttgtgggagaaaacaagatagtgggaagtgaagaggaggcggttgccagaattaagaccgatgcctgtcctccgaactgcgagagactgggcaagaaaactccttgcgcggcaacaggtaaatgcggtaactgtctgtcacagggcaatactatctgcagctatactgtttcaaccagattctgctccacaggcagacttcatgtaatacttgtaaatgattatctgggctactagaatgtaaccctgcaatgcctctctgcatatgatgtgcagggaggttttattatgagagatatttttgtaaacggatacgcatatccgtcaatatcgcaggaggtgcttgctgactggctgccgtcgctgacctttgtttcctgcttcagctacggctttgcagaggacggacatatcatacagcttgaggatgatgcactcagagagcctgcggcagcggcaggtgtgaaagcactgatggtgcttactcctatggatgaaacgggaatgttcagcaataacagagcaaaggcgctgcttgagagtcctgcggcgcaggagaatttcctgaatgacattgtatctgcgcttgagcagaaaaatatgttcggtgtggattttgattttgaatatgtgtactccgaaaaccgggagcagtatgcgcagctcataggggaggcaagacagaggcttaatcccatgggatatatagttacggcagcccttgctccaaagacatcggcagatcagcccggacttttgtatcaggggcacgactatagcctgatagggcaggcggctaatttatgcctattaatgacatatgaatggggatatacatacggacctccaatggcagtcgcgccccctgacgctgtaaggagagtcattgagtacggtttgacggaaataccgtcagaaaagatactgatgggaattccaaactacggctatgactggaagctgccgtttataaagggcgagtcaaaggcggaaaaaataacaaacgatgaggcagtggcaagagcggcaggctacggagcggagattatgtttgatgaacaggccatgtcaccgtattaccgttatacagatgaggacaatgcggagcacgaggtgtggtttgaggacagaagaagtatggaggctaaattttcactgattgatgaatacaatcttgccggcataagctggtggaatattatgagccggtttccggaggggacagaggagctgagagaaagatttactgtaattaaggtataaggatacggtttgaagtgtcaatttgaattaactccttgctaaagcccgatatatttgatatatttataaggtacgttattatatattttcagtggaggcactaatgaaaaaagaagcaaatgcagcaggtttgctgccaatattagtttttttaattttttatctcggaagcggtatttattttgagtacataaaccctgtagagggcggaatgggattctatgtaatgtcagcggtggtcgcatttatgatcggtcttgcggttgcttttgcacagaacagagaacttaaatttgacgacaaaatcactgtctgtgccaaaagcataggtgatgacaatataactacaatgctgttcatattcctgatggcgggagctttcagcggaactgcacagggagcgggcggagctacaagcgcagcaaatctgctgctgtcaataattccgtcaggctttgccgttgtagggctgtttgtaattgcctgcgtcatctcaatggcaatgggtacatcctgcggtacaatatccgtaatagttccggtggcaatgaacgttgcaacaggagctgacctcaatatgcagttttgcgtggcgtcggtaatcggcggcgcaatgttcggcgacaacctttcattcatatcggatacaacaattgcggcaaccaaaacacagggctgcaaaatgaaagataagttcagagaaaacttccctatagcgctgcctgcggcaatccttacaattgcaattctggttgtaatatcaatcaaaggcggagctgttgatgtgggaacctttgactataacatctggcaggcaatcccttacttcggaatacttgtaatggctctttgcggcattaacgtattcatagttttaggaacaggaattatagcatactttattgtaggtattgcaacgggagctgcgggagttgcagatgcgttctcggcaatgggtacaggcgtttcgggaatgtttgaaacaatgatagtaacagttctggttgcttcaatgagcggacttatcaaagaaaacggcggctttgaagcaatacttcagttcataagaagaaacttcaagggcagtaagggcggacagcttggtatcgcgcttcttacctcagcaatggatatagctacagcaaacaacacagttgcaatagtagcggcaggccctatagcgaagaatgtaagtgaggaattcggggttacacctcagcgtacagcatctgtaatggatatattcagctgcgtatggcagggaattataccttacggcgcgcagcttctaatagcggcaggtattgcgggaatatcaaccataagcataatcccttatctgttctatcagtttgcgctgcttctgagcg

SEQ ID NO: 3678 - DNA, 32759 bp, Unknown
  16S sequences of unknown bacteria
tgcaaaggcgatactgctcttgcttaatgaaattattaaaccagggatattgaagtgccgggcttggtatctgtcgtcaagtgtctctgtaacagcgtagcacaattaaaaaaacagggcgttcttacaatttacttctcagtaactataagaacaccctgaatggctggggcggcgagattcgaactcacgaatgcagcagtcaaagtgctgtgtcttaccgcttgacgacgccccaacatcggaaaccgacaagtaggattataccatatcggtttccgatttgcaagtgttttttataaggttatgcttaactggggcttacagtcttattcgaccgttacggattttgcaagattgcgaggcttatcgatatcgcagccgttgtaaagcgccacataataggcgtaaagctggaaggggactacctctaaagaagctaacagcagcgggtcgattttcgggatgtaaataacgctttcagcctcttttgctatttcggcatgcccgacggtggcgcaggctaaaacgcgcgcaccgcgcgcctttacctccttaatgttgctcagcagcttatcaaaaagctcttcatatgcggcaagggcaataacagttctgccctcctcaataagagagatagtgccgtgctttaattcgcccgcggcgtaggcttcggaatgaatgtaggatatttcctttaatttgagcgacgcctcaagcgataccgcgtaatcaatatttctgccgatgaagaaaagcgatttagggtcgccgcagtgctttgccgtttcctttatttgcggctctgctaaaattacccgctcggtaagctcgggcagcattaaaatatcatcgaatattttgtcaagccgagcgccgtcggcggttttaagcagtcttgctgcccaaaccgcaaagagatacagcacagataattgggttgagtagccctttgtggtggcaaccgcaatttcaggacccgcccaggtgtaaataacgtcgtctgccgcgttggctattgagctgcccaccacgtttactattgcgagggtgtgcgaaccgcgctttttcgcctctttaagcgcggcaagggtgtcagccgtttcgcccgactgacttattattattgtaagtgtcttgtcgcctgttatcgggttgcggtagcggtattcgctggcatactctacagcggtgggtatacgcaaaagctcctcaaaaacatatttgcccaccatgcctgcatgatatgccgagccgcaggcaacaatatctattttttctatagtcttcagcatttcggcattcagccttaagccctcaaacacaatttctctgcccactattcggctttcgatcgtctgtttgacggcggctggctgctccattatttccttcatcataaagtggtcgtacccgcccttttccgcagcggaaacatcccagctgatgaccgcatggtcgcggtgcagctcgtttttatcgccgtcataaagcttaacgccgcggggggtcagcacggcaatttcgccgtcctcaatgtacataatatcctttgtgtgggatactatcgccgtaacatccgaggcaatgtaattagcgtcgttcgacagccccaatatcagcgggctgaatttgcgcacggctatcagcatatcggggtaatcggtgcagataatacccagcgcatatgaaccctcaagccttttaacggtttttgcaaccgcttcgaaaaagtcgcctgtgtagcagcgggctagaagctgcggtataacctctgtatcggtctcgcttttaaattccgcaccgtccgcctttaactcctcgcgcagggcgacataattttcaatgattccgttatgcaccacggcgaacttgccgtcactgcttgtatgagggtgagcgtttttatccgacggggcgccgtgagtcgcccagcgggtgtgacctatgcctgtggtgccgtgtatatccttgccgccgttcgttttttctgtaagatttttaattctttcggtagttttgcataccgtcaaattattgtcgttaagtaccgctattccggcagagtcgtagcccctgtattcaagcctttcaagaccctcaagcaaaaatcccgccgcctgtgttttacctgtaaatccaactattccgcacataaaaatacacctttccgcagcagtacggaaaggcgcagttaccccttggtgagtatatgaaaacaagccgaaacaggcgggtgttaaaagcccgtcatttcagttgactgccgtccgtacatgccgacgcataaatattttttctgacatagcgacgcgtctctgtttccggaattgctcccggggtttaaacgcgcgtttacgacatgcctgccgtgggacatccgccgaatatttcgatgctccccatcctcgtcaaccgctatgccatatgtacggtcccggcgcttctgctaatgataaaaacggctttttctcctttaaattattttatggcacaatgatccgtttaattcattttacgctaaacaaaaataaaagtcaatatttttatcggctgtttgacaaagaggggtgattatggtaaaatttaataaacggaggcgtgtgtatgcaacagattaaattcacaaaaatgcatggtataggaaacgactatatatacattaactgctttgaacagaaaatagacgacccgcagacgctcgctcggcgtatgtcgccaaggcgaacatcggtcggcagcgacggactgatacttatctgcccatcagacacagcggacgcaaaaatgcggatgttcaatatggacggcagcgagggcaaaatgtgcggcaacggaatacgctgcgtggggaaatttctttacgataacggcatcgcaaaaaagaacgttataacggttgaaaccttaagcggcataaagacccttaaaattgaggcggaaaacggaaaagcggagtttataaccgtggatatgggtaagcctgttctgtcaccgcgggatattcccgtgatatttgacggcgagcgcatggttaacgagccgctgcaggtaatgggaaaggaataccgcataaccgcagtatctatgggcaaccctcacgcggtggttttttgcgatgaggtacaggggcttgaccttgaaaaaatagggcctttctttgaaaacgcaacgatattccccgaacgggtaaataccgaatttatacgcattataagcggcgccgagcttgaaatgcgggtgtgggagcgcggaagcggcgaaacctttgcctgcggtacaggtgcctgtgcggcggtggtcgcggcggtgctgaacgggcactgcaagcgcggcgaggaaataaccgtgaagcttaaatgcggaaatttaatgataacctatgccgagaattcacacatatatatgcgcggagcggcggaaaaagtttatgacggagtgtatgaattatgagccttaatattaaattaaacgaaaattttttcaatgttaaaaaaagctacctcttttcggaaattgccaaaagggtaaaggaatattccgaaaaaaatcccgataaaaaaataataaggctcggtatcggcgatgtcaccctgccgctgccgcgggtcgcggtaacggcgctgaaaaaagcggctgacgaaatgggcagcgccgctaccttcaggggttacgcacccgaatacggctatgattttttaagggaaaaaatagccgattattacaagcgtttttcagtcagcagaaattccgaagaaatatttgtatcggacggagcaaaaagcgatgtcggcaatattgttgatattttgggcgataacgaaatactgatacccgaccccgtgtatccggtgtatcttgacagcaatgttatgagcgggcataaaataaaccttttaaagggcacacgagaaaacggctttttgcccatgcccgataataccgataaaaagccctatgttatttatctttgctcgccgaacaacccgacgggcgcggtttacaaccgcgagcagctgaaagcttgggtcgattttgcaaatgagaccggctcgcttataatattcgattcggcatatgaggcgtttataagcggagattatccccattcgatatatgaaattgatggagcggacagctgcgccgttgaaatctgcagtttttcaaagactgccggctttacgggaacgcgctgtgcctggagcgtattccccgataagctgacggtgggggatacaaagctttcggcgctttggtcgaggcggcaggcgaccaaattcaacggcgtgccgtatgtcgtgcagcgcgctgcggaggcggttctgaccgatgagggcataaaggaatgcaaagcccttgtggaatactatatggaaaacgcgcgcataatagctgcggcgcttaaaaacagcgaaatcgaattcgtaggcggggagaattctccgtatttgtggcttaaatgcccgaagaatatgggctcgtgggagttttttgattatctgcttgaaagcgcgcagcttgtgggaacgccgggcgcgggcttcggagaggcgggcgagggctatttccgcctgacctccttcggaagccgcgaaaacacccttgaagcggcaaagcgtatagatgttcttttcggaaaaaactgatatttttgccgattccacgcattcttcgagagaaccttgcacaatacagcatttgacatttgcagataattttttcgataaaatacaaaatatttgttgcaatttgtgctatttggtgttataatgcgaatgtatcttgacaatgcggaagggaagtgacgcctaatgtacagaacgcacggcagtaaaattttatctgtctgtgtaattacaatcacgctgctttgcgccctgatgataaaggccgatttccttgttgaaagctatttcgattatcaccattcggttaccgagtctgcatatatggagcaagtcaaggcggcttcgtctcatctaattgcgccgctctcctcaagtaattactataaccgtaaaatatctctgtgtgagcgaaaaacacctgtgcttcatgacattgctgttgcaatcgtaaatgaaattaaaaattccgatacatatcatctgctttcggtacttgccgaaaacaacaaggagattttatacgatattataatatgtctgggacgatatttgtcctgataattacttctttgcataaataccgaaaaaatgtgaagggagtaaaagcattggttaacaatcgggaaagcacatattttttaataacgcttaaagaggagaaaatgcttcggcagataagagagctctcggaggcagaccgaaaggaaattgaaagaagatttttggaaattgccgttaaatacgctgagtggagtaaataacgcattgccggcatctcttagaattaaaaccgaattttcaactgcggctcatatcgggctgcggttgatttttgtttatgagccgtcgactcaattacaactaaaccgtggtttactatacaacatgatattatataaaatcagcctgttgctgtcggagaaaccgataacaacagactttttttagctgttccgcaacgccgcacctcgattatttcaaaaaggaagcatacgagggcagcgaccgacaaatactcgatacgattgcggaaaaatatactgcgaacaattcacccaacggctcttatgccgtcatatggcagtttgataaagagggatacagatatttcctttcaagatatacattcaaaacggggaaggttgcgcgcattgaaagcagcaatcccgatttatcggctgcggttgcgggatacagctatatcgtagttcccgagcataacgcctatattgacgcttttttgaccgagcgcttcggaagctgcacagaggatgtttattccgtaacatgacaaattttgtttcttttttgttacttgtaatgccggttaacagggattataatattagtattgtcgaatattttgggagtgaaaaatgtggcgaataatatctatgtgataatcccctcgctcaacccggacgaaaagcttaaaaacacggttcgcggaatgctggacgcaggctttgaaagaatcatcatagtaaacgacggcagcgataatgagcatcttgaaaattttccgcattcggatgaaaatataacagtgatacacagaaggcagaatcacggcaagggagcggctttaaaggtagccttccgccatattctgcgcaactgtcccgacgctgcgggagtggtaacggttgacggagacggtcagcacagtcctcaggacgccgccgcctgcgccgccgcgcttgacggtataggtaagggcgctgtgctcggctgccgtgatttttcgggcgaagatgtaccgaagcgcagccgaatgggcaatcatactacctcatttgtattcaaggtgctttgcggcatggagatatccgacactcaaacagggctccgcgcattcccggtgtcccttttaccgctgcttttatcggttaagggcgaccgctttgaatatgaaaccaatatgctgctcaaattcaggcagtgcggcgtcaaaataaaggaagtgccgattgaaacggtttacatagaggagaacgcgacctcccacttccgcccgatacaggattctttaaggatataccgctttttaattgtctactttttaagctcggcaatttcgtttgtcgcagatctgtcggtcttctatcttgcaatgaagctgctcggcgcttcactcggcaaatgggcggagcttaccgccacggcaattgccagggcaatatcctcggtcattaattacaatataaatcgaacaaaggtgtttaatgccgattcaaaatcgcacgggaagcttgcgcgctactatgcgctcgcaattccgcagatgtttatttccgcaggacttgtgacactggtatcgcatctgcttaaagccacacctttccttgcaacggtaatcaagcttataatagatacggtgatattctttgtaaactatcgtattcagcaaacatgggtattcgccgagacaaaggaaaataaaagtgcgggtaaaaaaagcggaaaaaagctgaccgccggaacggttgttaaaagaacacttttatcagtcggcacggcgcttgcaatggtgcttgttttcgttatttccgccgcgcttatgatctgctacggtccgagcaagagccttcgcaatatgacggtcataatggcaaaggaggcaagcgccacaaagtggataccgaccctgtttctgcctgcttcgaccgtgaacagaataattgcggacagcgaaaaggtaaatgttgatgttatagatacggacgattacggcaagaccgctgccgatgaatgggacgacgcggtggacggtatgaagctcatttacctgaacgagccgaaatttaagggatatattctgcttatccgcgacccaaagcgtgtgagcgttggcacatcgtccgaaaattacgcctctgccgcggcgggcgccagaattttcgatattgcgcagaagtataactgcatagcggcaataaacggcggcgaatttgccgatgcgggcggtcagggcacgggagcaaagcctatggggcttacctactcgggcggcaaaaatgtttggaacgacggacttaaacgctccttcttcggatttgataagaacgataggcttgtctgccgcgagggtatgaccaaggcggaggctgataagctcggcatacgcgacgcggtctccttccagacggggaatgtgcttattcagcaaaacggagaggatatcaagcttttccatgccgacagcgacaccggcacagcgcagcgcaccgcaataggtcagcgtgcggacggcacggtcatattgcttgtgaccgacggcagatcggttgacagcatcggcgccacaagaaacgatgttatagacctcatggtctcctacggcgcggtaaacgccggaatgcttgacggcggatcatccgcaatgatgtactaccgcaattactttgataagtattcgattgataaatcgcagcttgattcatatcagcttaaagggcttgtaaacagatacaaggcgtttaccaatccgcgcagaataccgacatacttcatcgtatcggaggaaaagaaatgaaaacacattccctgttttataaaatttacttttccgccgttgcgctttttgccgtagggcttacagtatttcttttcgtattcggcggctggcttaaggcttacgaggccgcacagcccgagcagataatgtcggcttttataaataacgatgtaaagggcggcaaaatttccgccgttaaggataaatatcacataagtgtttcaaaatacgaaacaaacgacagcatcgataaagccttcactgcggccacaaaggataaggagctaacctttgccacttccgccataaagcccgagggctgcgatcttgcctactcggttaaatcgggcgacagcaagcttatgagcgtttatttaaagcgcgacagcaaaaagcgttattcgatttcgggaatagattttgataaaaagctttataaatcctataaaatttccaccacctccgacgcggaaatatcggtaaacggcattattgttgaagacggtgaccgcaaaaacgaagagctgccggatatcgattccgcgctcacaaaaagcggcagcattataaacaagcagataatttcgcttgacaatatgctgaacgatgagccgcagataacggcaaaatcgggcagcacgacgctgcaggtcgagaaaaacggcacggtttacaatgtagttcaggaatttgcggagaaggaagcggtcggaaagcttgcgggcaaggcggcaagcgtttacgcggaatatatgcagaacgattcctcaatggggcagatccgcaaatatatggacaccgacacaaagttttataaaaatctccgcacaagtcttgtaatattcgcgctcgaccatgaaaagcatgtgataaaagacgttaagagcaccgatttccataaatacagcgataatcttttcagctgccgcgtaacccttataaacgagctgacccgaaggggcgaaaaatatcaggataaatttgataaatatgtttacctccgccgcgacggcgatacatataaggtgcttgatatgcagaacacgggggataaaaaagatgaatgattttgaaataggcatacttaattttattcacgatacctttgcctgcccgtttctcgatagggtcatgccgataataacccttttcggcgataagggcattttttggattgctgcggcgctgcttctcataataataaaaaagacccgcaaaacaggcgttatgatgggcacggcgctgcttttggggcttataatcggaaatctgattctcaaaaatgccgttgcgcgaacaagaccctatgatgtaaacaccgcaatgcaggcggagctgcttgtaaagacgctttcggacttttcgttcccatccgggcatacgctcgcttcctttgaggcggcgaccgtgctgatgataagggataagcgtttcggtattcccgcgctgatactggcgatacttatagctctttcccgcctgtatctttatgtacactaccccaccgatgttttggcgggcgtgctgctcggtgtgcttatcggtattttcgcctgtttccttgtggataaaatttacaaacggttcgagcggaaaatagcttaagacttataatttcagcctgtcggtaccgcgtccttacggataaactaccgccgcaaatcgggtgcgatgtgatgcaatgctccgctttcggacatgatccgacaggtttttcaaataaattgtgaatttgcacagtaagaccgaaaaaaccggcagcagattttacaatacgccgaaaaacaaaaaaagtttaaaatgctattgacacaaagctttggaagatataaaatgttaacaaggttagcgagcgctaaccttgttgactgagcaaaagttagctattgctaattattgtaagataggagaaatgcaaaatgatgccgctgttattagccaatgtaggagaagaaaatgttataaagaggataggcggcagtcccgaggtcaagcagcatcttgaaaacctcggctttgtcgttggtggcagcgtaataatcgttaataccatgggcggaaatcttatcgtaaatgttaaggagacccgagttgcggtaagtcgcgaaatggcacaaaaaataatgatttaatttaaggagagtaaattaatgagaactttgaaggatgcaagggtaggcgagaccgtaaaggtcgtaaagctcacgggtgaaggagctgttaagcgaagaattatggatatgggcattaccaagggcgttgaagtacatatccgtaaggtagcgcctttaggcgacccggttgaagttaatgttcgcggctatgagttgtcgctcaggaaagccgacgcggaaatgatcgaggttgaataaaccgttcccggggaagtcgtatttccccatattttaagctttaaagttagcaagagctaattgaagaaagagagaggaaaagctatgagtatcagaattgcccttgcgggcaacccgaactgtggtaaaaccaccctgttcaacgcacttaccggctccaatcagtttgtaggtaactggccgggcgttacggtagaaaaaaaggaaggtaagcttaaaaagcacgacggcgttataattactgaccttccgggtatttactcactgtcgccctacactcttgaagaggttgttgcaagaaattacctcatttccgagcgtcccgacgcgatactgaacattatcgacggaacaaacctggaaagaaacctttatttgaccacacagcttgtggagctcggcataccggtcgttattgccatcaacatgatggatgttgtccgcaagaacggcgataagataaataccgatgagctttcccgccagctcggctgcaaaatagttgaaatttccgcccttaagggtacgggaattagcgaggctgccgaggctgcgatagacgcggcagaacacaccaagaccattccgcagcacagcttttcgggcactgttgaacacgctatcgctcacattgaggaagcggcggttcacaatatgcccgaagaacagcagcgctggtacgcaataaagatttttgagcgcgacgataaggtgctagctcagttaaagcttgacggcacggttttggcgcatatcgaaaacgatatcaaggctgccgaaaaggaatgtgacgacgacgccgagagtattattacaaacgagcgttacctctacatagcctcaattataaaggcgtgctataagaagaaaaatgtcggtcagttatccgcctcggataagatcgaccgtgtggttacaaaccgttggctaggtcttcctatattcgcgcttgtaatgttccttgtttattacatatcaatggtaaccgtaggctctgccgctaccgactgggcaaatgacggactcttcggtgacggctggcaccttttgggcataggctctaaggcgtacagcaccgccgcggacgatttcaccgcggcttcccgggctgttcaggcgttcaccgaaattgaagtaggcgctgatgattttgacgctgacaaggctctcgatgaaataaagagctttaccactgactcaaaaaccgccactgttgatgtagaggatgaggaaaccttggcggtaaacacaatgacggcttacttctccgaagttccttcagccctttcaaaggcggaggaagaggaaacggttgcaatgtcttataaggacgctgtttcctacttcgagaaaaacggctttgacgagcccgaccccgccgattacggcgtatgggttcccggtataccggttctcgtaggcgacggacttgataaagcgggcgctgccgattggctttcgggtcttattaacgacggtatcgtagccggcgtaggagcggtactcggctttgttccgcagttgctagttctgttcctactccttgcattccttgaggcttgcggttatatgtcacgtattgcattcgtgcttgaccgtatcttccgcaagttcggtctttcgggtaaatcctttatcccgatgcttatcggtacaggctgcggcgttccgggaatcatggcctcgcgtacgattgaaaatgagcgcgaccgccgtatgactgtcatgaccaccaccttcattccctgcggtgctaaggttccgtttatcgcaatgatcgcgggcgccattttcagcaattccgcgtgggttgcaacctcggcttacttcatcggtatggctgcaataatcgtttcgggaatcatgcttaagaaaacaaagatgttttcgggcgagcctgctccgttcgttatggagctgccggcttaccactggccgaccttcagcaatgttctccgctcaatgtgggagcgcggctggtccttcataaagaaggcgggaacaataatccttctttccaccatactcgtttggttcaccacctacttcggctgggcggacggttcgttcggaatgctcacagaggatcagatagattcttcaatccttgctaagatcggaggagctatcgcctggatattcgctcctctcggctggggtaactggcaggcagctgttgcttctattaccggtcttgtggctaaggaaaacattgtcggtactctcggtatactttacggcggcggagacgcaagcgtttaccagaacatcgccgctgcgttcaccggaatcaccgcatattcgttccttgtgttcaacctgctttgcgcaccctgctttgcggctatcggcgctatcaagcgtgaaatgaacagccggaagtggacttggtttgcaatcggctatcagtgcggctttgcttatgttatcgctcttatgataaatcagttcggcggtctcttcaccggcaatataaacgttgtaggtcttatcttcgcggttgcggcactggtacttatagtttatatgctcttccgcccatataaagaggctacaaagcttacttcaaaagtaaaagtttaaaaaacacccattctttgaaaggagtcttctgtatgttgttgtggttaaaaacaaatattgctaccgtaattatatgccttgtgcttattgccgttgttgccgctattatagtgagccttgtgcggaataagaaaaagggtaaatcctcctgcggctgcaactgtgcccactgtgctatggcagactcctgccataagggcaaataaagccgcagcataaaggaaaattcctgctgtgacggcaaatccccgatcttatgcatcggggattttttgatatgcggcagaaaaaattacagcttccgaacaaaccgaaggctcacagaataccggaaagcctttggctgtttgtaacgcatatattaattttcaaatcccgaattacgcagaggtattatataagcagagaaaagtcaagaacagaaatattgtcaaataattaacaatcttttttaacaaattaaaataaaatgaaaaaatattgatatatttttaacaatcccattgacaaatgaataaaatggtaatataatgtactcaatgtaaagccgaggggagcaaaactgtgcggcgcccggcttaaagatcacacttttacggaggaaaataatatggcaagagtttataatttcagcgcaggcccttcaatgctgcccgaggatgttttgaagaccgctgctgcggaaatgatggaatacggcgagacgggtcagtcggttatggagatgtcccaccgctcaaaggaatatcaggcaatatttgacgagacggagaagaacctccgcgaaattatgaatattcccgataattatgatgtgctgtttttacagggcggcgcttcgacccagtttgcaatggtgccgctgaaccttatgaccaaaaacggcaaggcggattatattataacaggtcagtgggctaacaaggcttacaaagaggcggcgcgctacggcaaggcaagagccgtggcttcaagtgcggataagaccttttcttatatcccgaaaaccacccgcgccgatttcgaccccgaggcggattatgttcacatttgtatgaacaacaccatttacggcacaaaataccacgagctgcccgatacgggcgatgtgccgcttgtggctgatatttcaagctgcatactctctgagcctattgacgttacaaaattcggcgttttgtatgcgggcgcgcagaaaaatgttgcccccgccggcgttaccattgttataatccgcaaggatttaatcggtcatgctatggatattacccccacaatgctcaattacgcgacccatgccgataacggctcaatgttcaacactccgccctgctatgcaatttatattgcgggacttacctttaagtggataaagaaaataggcggacttgaggaaatgaagaaaatcaacgagaaaaaagcgaagattctttatgattttcttgataacagcaagcttttcaagggtactgtcgttcccgaggatcgctcgcttatgaatgtaccgtttgtaaccggcagcgaggaattggacgctaagtttgtagctgaggctaaaaaggcgggctttgtgaacattaagggtcacaggtctgtaggcggcatgcgcgcttcaatttataatgcaatgccgatagagggcgttgaaaagctggttgagtttatgaagaagtttgaggaggagaacgcgtaatgtataaaattaaaacctacaataaaatctccaaaatcggtcttgaagcctttgacgataaatatacggtaggcgatgaagtggaaaatgccgacggtgccattgtgcgctctgccgcgctgcatgatgaggagtttcccgcaagccttaaagccatagcgcgcgcgggagcgggaacaaataatataccgattgaccgctgctccgagcagggaatagttgttttcaacactccgggagcaaatgccaatgctgttaaggagctggttatagcgggtttgcttatcagctcgcgccgcgtggtttccggcattgagtgggctaagactcttaaaggcgacggcgcagaggtaggcaaagaggttgaaaagggcaaaggcgcttttgccggccctgaaattaaaggcaagaccctgggtgttataggcctcggcgctatcggcgttatggtggcaaatgccgcaaacgcccttggtatgaaggtcttcggctatgacccgtacctttcggtcaaatcggcttggaatttgacccacaatgcggtccatattttcgatataaacgaaatttttgaaaagtgcgattatattactgtgcatgtgccgctgaccgattccaccaaaaaccttataaacgctgcggctattgctaaaatgaaggacggcgtgcgtattcttaatttcgcgcgcggcggacttgtaaacagcgcagaccttttggcagcgctcgaagcgggcaaggttgcttcctatgttaccgatttcccgtccgacgatattttgggcgcgcagggcgttattgcaataccgcacctcggcgcttcgacccccgaatcggaggataactgcgcgggaatggcggctaaggagcttatagactatattgaaaacggtaatatagtaaattccgtaaacctgcccgaaattgtaatgccgcgcagcggggaaagcagaatctgcgttatacacaaaaatatcccgaatatgcttaccgccattacggggatattcgcgggggataatgtaaacattgaaaacctgcttaataaatcccgcggggattatgcatatacaatgcttgatgtcagtaaggcagatgtttcggatgttgccgataagatcggcgctatttccggggttataagagtaagggttatttgatttaacgaatcaggagcattaacacacgccccctgtcagccgaacggttgacagggggtatttaaatgtaacagctttgataccatttgtaaccgaattgtttttgtactttttgaaaattcggtatataattataaacagaagaaaagcttggaggcggtagtatgaaaaagggaattttaagcattgcggcactggcgtttgttttgctgatttctttttcttcgctttcggttaagcccgcggcgaccgctaccgaaaaaccgtcagcgccggcagtctcacaggaaaagattttgagtgcgcgctttctcaatatgcttaatcataatttcgtttataatgacgcgtttgacagtgtttatgaaatgaccgcatgctccgaggttgctttgcttgacagggcggagaacggctatatttcgagcggcgtgatttccggttacctttacaatatgtacggtgtggaaggcgtcgattttgccgccgtcacaaaggatttcccgcagcgtgaaaattatgtgtatgttattccgcgcggcttctcggtttataagcattcaaatcccgtcatcaccgagaatgaggacggcagctatatagttgtgaccgtggttcaaattttctcgcatgacagtgaagcggaaaccgccaaggcttcaacacttttcgtgaaaaatgaaaattcggcattcggcttcaatataatttcttccgatataatttttgaagatgcatcgctttaaaacagataaataattttgccgctgcggtcttataagctgcagcggcatttgttatacatatttaatttccgagtgatgatcggcgtaaaagcttacggttttaaatttctccgaaagcaggcttttcagtggctctgtaaccacatcctcggtgttaaaatgccccgcgtcgaatacggaaattccgaggcgctctgtgtctatgaaaatattgtgcttaacatccgccgttacaagtgcgtcgcagcatgataccgcagtgtcaaaagcatatacgccgccgctgcccgagcagagggcgattttttttatgctttttccgctgtcggcaaatttaacgctgccgccgagcttttctttgatatgccgcgccaattcatctgccgatagcggagtatcaagctctgcaaaattcagcagatagccgtcgcttgcgggtcttttttcaaaattatcgaatccaagcacgcggcacaggcaatcattaacgcccgatacggcaatatcgagatttgtgtgcattgatataaccgaaataccgctttttataagctcgaaaacggtactgcccgcaagtacggtcttcagcgggtcgaatataacggggtggtgggttataatcaattcacagttattttttattgccgtttttatagcggacgcggtgcagtcaagcgccacaaccgcgccgctcacctcggccgacgggtttccgactaatatgcccgcattatcaaaatcgcaggcggtgtttacaggcgctataccgttcagaaattcaaaaatatcgtttacagtcatagcttacgcctttttagcaaacgagtccttaagtgcaacggtgcggttgaatacaagtcgctcgggcgtagagtcggtatcggtgcagaaatagccctggcgcataaactggaaggtatcccccggtttaacgcctgccagcgatttgtcaattcggcagccttcaagcaccgtgagcgattcgggatttatattatccgcaaaggaggatacgccctcctcatcgctcgggttcggcacattaaacagccgctcataaagccttacctcggcttcaaccgaattatccgcgctaacccagtgcagcgtgccctttacctttctgccgtcgggcgtttcgccgccgtagctttcggggtcataggcgcagtgaacggcggttatattaccgttttcatctgtttcgtgggatgcgtatttaatgtagtaagcgccctttagacgaacctcttttgcggggcaaagcctgaaatatttaccgggtgggtcaagcataaaatcgtcctgctcaataaatatctcccgcgaaaatgtaacgctgcgcttgcctttttcgggcttaccggggtttacgtcaattgcaatctcctcggtcttgttttcggggtaattgtcgattattatttttaaggggcgcaaaaccgccattgcgcggtcggcgttctcattcaggttatcacgcacgcaggattcaagcagcgcgtcatcaataacgctgtatgcctttgaaacgcctattttatcaacaaatgtgcgtatagctgcggcggggtagccgcggcggcgcataccgcatatggtagccattctgggatcgtcccaaccgcttaccaagccgtcgtttacaagctttaagcacttgcgcttgctggtaagggtgtagtttaagttcatgcgcgcaaactctatctggcgcggcggggtgggaatatcaagcgcctctaaaaaccagttgtaaagcgggcggtgattttcaaattcgagcgagcagagcgagtgcgtaaccccctctttagcatcgctcagcggatgcgcaaagtcatacatcgggtacacgcaccatttatccccggtgcggtggtgggtggctttcataatgcggtaaataatcgggtcgcgcatattaaggtttgatgacgacatatcgattttagcccgcagcaccattgcgccgtcggggaattcaccgtcggtcatacggcggaaaagctctttagtttcttcaatcgggcgattgcggtaagggctttcggtgcccggctccgtaagcgttccgcgcatttcgcggatttcatctgccgacgcctcgtcaacataggcaagccctttatcaataagctttagggcgcactcgtaaagaaaatcaaaataatccgacgcatagtaaacattagcccagttaaagccgagccatttaatatcgcgctcgatagcgtcaacatactcaacgtcttccttaacggggtttgtatcgtcaaagcgcaggttgcaaatgccgccgtatttttcggcggttgaaaaatctatgcagatagcctttgcgtgaccgatatgcaaatacccgttaggctcgggcgggaaacgggtctgaacatgggtgtatacaccctctttcaggtcctcgtctataaaatcatgtataaaattggaggctgctgcattttcagccgttttaatttcttctgacaatttaaaaactccttctaaagcgtatttatcgccttgtcaatgcgggcaatacaggtatcatatcccaaaacctgcataatactgcaaaggtcgggggtgttgcgcctgccggttattgcaatgcgcaaaaccgtgcttaaatcaccggcatgccccttaaagcttgcggggtctgccttatattgctttgtttctgcggcaaagccgatttcgggcgcaatgcttttaataacattgaaccattgctgtcggtcgtccgatgtgttgtaaagagttttgtatttttgcaggaaagcctttgcgtctgcgggcttaatattctcgggcagcgtaaggtcttccttataaagctctgcaaaaaagtaggagaaatagtttttcgcttcgttccacttcgcaatatccttgcggggcttgggaacgtcgcggtctattgaaagcatagccttggtgtaatcgggatcgcgtatcaggagcgaataaaattccgtatcaaattcgcgcgcccactctgtcagacggtcataaaccgtatctcccgaaagctttgatatataggtcttgcttacgtcgttcagcttatcgttatcaaaaagcgcgcccgaaacactcatctttttaaggttaaacttaaattcggtatacggtttttcgggattggctctgcgccagtcctcaaaatcagaagccgccaccgtcataagatactctataactccgttcgggtcatagccctcctcggcgaagaaatgaactgcagcctcggggtctttacgctttgaaattttgcgctttgcgccgttttcaagcttcataatgggggaaatatgcccgtatttcggcaccttaaagcctaagagcttaaagagctgaatatgcttcggcacagaggatatccactcatccccgcgcaaaacatgggtagtgtgcattaagtggtcgtccaccgcgtgtgcgaagtggtaggtaggtattccgtcggattttaaaattacaaagtcttcgtcattctcgggcatttctattttgcccttaatgcaatcgtcaaatacaattttattttcttcgtttccgggtgagcgcaggcgcacaacatacggcttgcccttttcaatcagtgcggcagcctcgtctgcggttatatttctgtgctttgcccactcgccgtggtagcctgtgcgcaccttttgctcctcctgcacgcggcgcgtttcctccagctcctcgggcgtgcagaagcaggggtaagcaagcccctgttttataaggcttttggcgtaggtctggtagatttcggcgcgctcgctctgcttatagggcgcgtaatcgcctgtctgtttatcaccgcttataaagccctcgtcaatttttattccgaaacggtcaagcccgcctataatatcgtcaataccgccctcaacctcgcgctttttatcggtatcctcaattcgggtgtagaaaattccgccgcttgaggtcgcggtaatgcggtttacaagcgcggtgaaaagcgtgccgaggtgtaaatatccggtgggactcggcgctacgcgggtaacgcgcgcgccctcgggtaaattcctcggtttatataattcctcgtaataatcgggggttttggttatattggggagcagcagctccgccattctctcgttttcattcatagaacactctccgttaatcgcttgcgagcagcttatttaattcgtgcataaatgtgttgatatccttaaattggcggtaaacagaggcaaagcgaacatacgccacctcgtctatctttttaagcttttccataacaagctgacctattttttcactgcttacctctctgtcaagcgagttttgcagggtggtttcaatttcatcaatcatattgtcaagcgtgtcaattgataccggacgtttttcgcaggcgcgcaaaagtcccgtcataagcttgtccctgttaaaggtttcgcgcgatttatccttttttataacgattatcggcaggctttcaataatttcgtaggtagtaaagcgtttaccgcagcttaaacactccctgcggcggcggattctctgaccctcatcggtcggtctggagtcaatcaccttgctctcttcaaagctgcaaaaaggacatttcataaaaaactactcctcttaatttaaaaagtacttgtattatacaatatatagtagtaaaatacaagtattaaaagcaaaaatcaatcggaggtaaagcaattatggcagcaattcagttatcagcgccgcaaaagggagacactttggcggttatgcacacaaatatgggggatattaaaattaagctgttccccgaaaaagcgcccaaaacggtggaaaactttgtgacccactccaaaaacgggtattataacgggcttaaattccaccgcgttataaacgattttatgattcagggcggcgatccgcgcggcaacggtacgggcggcgaatctatttggggcggcagcttttccgatgaatttgatcctgagctgcacaatctgcgcggtgcgctttccatggcaaattcgggacccaatacaaacggcagccagttctttatcgttcaggcaagggaggttccctcaaatatgcttgagcaaatgcgcgaccttgaggataacggctttcctgccgatataaccgccgcttatgaagcgctcggcggcacaccgtggctcgatttccgccacacggtgttcggtcaggtgaccgagggtatggatgttgtggacgctatcgccgcggtggaaaccgttaacgacgttccgcgaagcgatgttataattgaaagcatagaggttaccgagctttaataaaaatttcggaggttgcttatgagaaagattcgcaggatgttaatttcattgcttgcagcggcaatttcggctgcggctttgcctgtttttgcaaatcaacctgccgcccctgtcttcgtttctccgtcattttacggcagggaggcattatcggcactcaataacggcgaaagacttgtatcggcatacgataaaataaccgccggcatgggtaatacagagaatatttatgaggatccctcctccggtacgcccaattataaaatcagcacggatattacaaatgaaaaattatcaaaggcggagctcgagactgtgcttgatgcttacagaagagatcaccccgagcatttttggtataacgcagagcatggaagcatgttttggattctcggagacagaataacaacggtcgagctgtactgctatatgagcgccgcggattccgccgacgcaaagaaaaaattcgatgccgcggcggaggagctgcttcgcggcataacgcccgatatgcccgaatttgaccgtgaaaagcttttgcatgacaggcttgcgaaaaagattacctacgatctgagcgaagcttatatgcacagcgcatacggcgccttggtgaacggcagagcggtttgtgacgggtacacagagtcgctgcaataccttttggggcgcgtaggaatacaggcgtttacggttataggatatgccgtaagtgaaagcggcaaaaaggacccccacgcttggaatattgtaagaatagacggaaaatactataatgttgacctgacctgggacgatcagggaagcaatatattatatgcgtatttcaatttgaccgatgcgagaatgacagaggatcacgctcccaaagagacgaagtatgccatgccggtgtgcgattccgaggaagccggatattttacggttttcggcggtaaaacagaaggcttttctgccgaagagctgggcgggcttataagaaataacggcacacggctccatgtttatgtgacgggggatacggctgcattttcaaatgacttgcgcaacaatttcttcaaaatgacatcggccgccggtttaggtaacactgcagtgtcagtcacaaggtattcattaggcagggaattcttgattattgttatagtccgcggtgatgcaaacggcgacggtattacggacatcagggattatgtttcgatgaaggaatgcgccctgactgcgaaatacgatgaagccgccgatataaatgcggacgaaagcgttaacgcgtcagatcttaccgaactgcgaaaaaggcttttggaagccgaataaggagagattttcatgtgtactgcggcggcttacagaaccgacggactgtatttcggcagaaatttggattatgagatgtcatacggtgagcagatagccgtaataccgagaaattatccctttaatttcagagtgttcggcagcgatttccgacattacgcaatgattggcaccgctcatgcggcggacggttatccgcttttttacgacgcggcaaatgaaaagggactttgcatggcgggacttaattttgtaaacggcgcctcctatgccgaagggagcggatctgcctcggctccgtacgaatttattccgctggttctcgcaaaatgctcctccgttaccgaggcacgggagcttttggacaaaatcgtactcggaaatatcccgttcagcgaacagctgcctgcggcaaagctgcactggataatagcggataaaaacgaaacgattgttgccgagcccgaaaacggcagacttaaaatttatgacgcgcccgtaaatgtgctcaccaacgatcctccctttaattttcagatgcatatgctgaacaattatatggcgttaagccctaagccgccgaaaaatatgttttccgataagctgccgctgaagagctacagccgcggaatgggggctatgggacttcccggagatttgtcatccgagtcgcgctttgtaaaaacggcgtttactttggcaaactccgtggcggaaagcggcgcggaggcgggaatctgccagcttttccatattttaggtgccgcagagcagcagaacggctgctgcgaattggaaaacggcaagtttgaaaaaaccatatataccgcctgctttgacgcgtcgcgcggagtatattactacacgacctacgaaaacaggcagataaccgccgttgatatgcaccgtgagacgttggacggcgatacgcccgtattttatcctatgctgaatatacaaagcataaaaattcaaaatttataaatgaaaagcgatttttatattgattttttcacctgtgcgtggtaatattgttcggtagaggagagatgccttatgaaaacagaaaccttacatcttaaagacgcctatccgtttttaggggaaaacggctgtgaccctacggtggatatttatctgccctataacatgaccgaaatgcacagggaaaacagaaagcgcccctgcatgatagtctgccccggcggcgcctacgcgatgtgcagtcagcgcgaggcggagccgatcgcaatgcattttctgccggaaggctttaatgtgttcgttatctattattcggtagccccccaccgtttcccgacccagcttcgtgaggtcgcggcaacggttgagcttatttacaaaaatgctgatgaatggaactgcgatgtttcaaagcttgcaatagtcggcttttccgcaggcggccatcttgccgctcattattccacaatgtacgactgcaaagaggtgcgcgaggttttcccggagagtaagcccgtgaacgcttctgtgctttcatatccggtaataaccgccgaccccgcatacgggcatatgggcagctttgataatctgctcggcaaaacggaacgcacgaaagaggaaatcgattatttctcctgtgacagatgtgttaccgagcatacgccgcctgcgtacatatggcatactgcggcagacgactgtgttcctgtcgagaacagccttttatatgccggcgcgttaagcagatgcaaaattccgtttgagctgcatgttttcccgttcggctaccacggctcatcaacggttgatgcgataagctgtgataccgttcccgaaagcatggcttatgttaaggattggctgaacgacgcaaagcgttggcttaagcttatgggaataaaatactgatgccgcaagcagagcttgaaatgcgcaaaaacagaagtgtcgggctggacgttacaagaatatatgcctttttatcagtagtggctgttcattcctttttgaacacggagttttattcaagcacggtcatcggcaaaaagatgtatgtaatggtgatttcccgaaccgcatttatggtgtgcgttcctcttttccttttgctcaccggttatcttgtctcggcaaaaaatacggcattaaacagctcatgcattttaaaatattataaaaagttgttgccgctgattttaaagtacattatatgtatgctaatcatatatgcgctttcaatgtctttcggatttgaagatttcaacttaaaaagcattattttcggaataaccggtttttcaaagtattcatggtatgttaatatgtacatcggtctttttctgttgactccttttttaaatttgatttggaactcaattaacgaaaagaggatgcacattattctgatttcggtttttgtttttctcactttacttccttcgatatttaatatttatgatttttcaactcacggtgcttttttaaatcctcggttgaataaagagactactgctttaatacctgattggtgggtgggaatttatcccataacctactattatataggggcttatttgaaaaaatatattgattttaagaagatcaatccgattaaggttctaccgattcttttattctccgtgcttgtgacaggcatatacaatatttggcgttcgcattctgcagtttttgtttggggaatgtggaacgagtggggcggaattgagaatacagtgaactccgtcttggtatttttgtttatcaactcgatttttaaatccgaaagaaataaatcattttcacactttttggcttacttatcttcattgacattttcggcatacttgctttcatggctttcggacaaaatcgtatattctcattttaacagtatgattccgattataaccgatcgatttaaatattatcctttgacagttatctgttcggcgggaattgctttggtgctgtctgtgccggttgattttgcggtcagatttattatgaaaagaatcaaacgatgattttcttaattataaatatttattttgcatttatcggaggatgaaaagcgtgaagcctgttatcgaggcgcctgaaagaacgcccgtaattgccgctaccgaccgtgtgggttggcaaagcgccgttttatcggacgcggaggtgctgtttcacctgggcgcggatattataacggtcagcgacgatataaaggcggcaaagcaaaacggcaaatttgtttttatacatatcgatctggctgacggaataggcaaggacaaggcgggaatccattggctcaaaacactcggagcggacggaattatttccacccgtacccaactgattcgcgcggcgcacgacagcggtctgcttgcggttcagcgctttttcattctcgattcaaagggaatgcattcgatttccgaaacgattgagaacacccgtcccgatttaatagaaattatgccgggggtaataccgaaggcgcttaaagctgttgcggcgcataaaattcccgttattgcgggagggcttattgaaaccaagcaggaggtaacggcggcgctgtctgccgatgcgattgcggtttcaacaggcaaaaaagaattatggaatgaaatttaaagttccgaatataaattaaatatattctgcggagttaaagagagcggaaaaacaaacggttgtaaaaagctgccgtttgtttttccgcctttttatatagccttgtgtttggcgtgtgacggaaatcctcgtcagagggagcagagggctttacgcagaatttacagcattatatatctaatgtctaatatctaaaatctaatatctaaatttggagtgattttatgcagcaaatgattttaagcacagttttacgctcgcttgccgccgtggtaataggcggactcataggcagcgaacgcgcgcggcacggcagagcggcgggtatgcgaacgcatattttagtgtgtctcggcgcttgtatgacgagtatgacaagtatgtttgtatcggatgctttgggcaataacggcgacgttttcagaatacctgcgcaagtggtatccggtataggctttttgggcgcgggtatgataatacttaaaaacaacaatatgataaccgggcttaccaccgccgcaggcgtgtggacaacggcgacaataggcgtggcactgggatatggctattatgtgggcgcggcggcggttacggtgctgtttttatccacaatagttttgtttgcaaggtttgagcgcaagcgcaaatcggcagaggttatttatattgaaatagataacgcgtataaggtgaacgaggtcttaaaagagctggaaagggcgatccccgaaagctttacctaccaaattttcgcgccgaaaagcggaaaccagggcagcgtgggtcttaatgtggtaatagataaacggatagatatggatgtatcgggtctttcgtctattgaaaatatagtttttgcagtggaggagtaaaaaatgtttgatgtggcaattatcggcgcgggcgttgtggggacgcttacggcaagggagcttacaaggtataaactttcggtctgcctgctgggaaaggaaaatgatgtagctatgggcgccagcaaggcgaacagcggaattattcacggcggctttgaccccgagcccggaacgctcaaagcaaggcttaacgcaaagggcgtgccgcttttatataaggcggcaagggagctgaatgttccctgtaaaaacaacggctcaatggtgcttgcgttcggcaaagaggaggacgcggttattgacgagctttacgcgcgcggaataaaaaatgggataaagggtatggatattctttcaggcacagaggcgcgtcggcttgaaagcaatttatcggataaggttacaaaggcgctgcttgttacaaacgcgggaataatatgcccctatgagctgactattgccgccgcgggcaacgctatggataacggtgcggagctgcgcacaaattatgaggttacggcgattgtaagggcggaggacggctttagagtctgctctgccgacggcaggcagataaccgcgcggtatcttgtaaactgcgcgggcggctttgcggataaaatagccgaaatcgcgggagacaaattttttgaaataataccccgcgcgggcgaatatatgctgctagataaaagcgagggcgagactgtatcgcacactattttccaagtgcctacggcaaacggcaagggcattttggtaacccccacagcggacggtaatttactcttaggacctaccgccgaaagggtggaaacgcccgataacaccgaaaccacggcgggcggacttaaaacggtagccgagcttgcgaaaaaaagcgtgccgagtgttaatatccgcgcggttataacctctttttcgggtgtgcgcgcgtcggagaaaagcggcgatttcattataaaggaatcggacaagataaagggacttatccacgccgcggcgatagattcacccggactgtcatcatccgccgcaattgcggaatatattgttaagctgcttgaaaagagcgggctggaactcaccgagaaccccgattttaacggcacgcgcgaggacacccacgcctttaagaaaatgagcgatgaggaaaaggacgaatatataaagcaaaaccccgcctacggcagaattatctgccgctgcgaaacggtaagcgagggcgagataatagacgcgcttcgccgcaaccccaaagcgacagatattgacggcgttaagcgccgcacccgcgccggaatgggaagatgtcagggcggattctgtatgccctatgtaatgcggcttattgaaaaggaaacgggcaagccgatgaccgagataaccaaaaagggcggaaaatcaaatactgtaacaggcagactgtgaggggaaaagaaatgataaatcacgatatagcagtaataggcggcggtcccgcgggaatggcggcggcagtcgcggcatatgacagcggagtaaccgatgtttgcattttagagcgcgaggagatgttaggcggaattttaaagcagtgtattcacaacggcttcgggctgcataaattggggcgcgagcttacaggccccgaatacgcggcggtctacgccgaaaaggtaaagaaacgcggaataaagacatactgcgaaactatggtaacggatatctcatccgataaaacagtaaccgcgcaaagctccgctgggctgcttaaaataaaggcaaaggctataattcttgcaatgggctgccgcgagcgcagccgcggcgcactaaacaccgcgggaacacgccccgcaggggtttacagtgcgggcacggcgcaaaagctcatgaactgcgagggatattccgtaggcaaaaaggcagttatattaggctcgggcgatatagggcttattatggcgcgcagaatgtcgcttgagggcgcaaaggttgaggcggtcttagagcttatgccttattcgggcggccttaaacggaacattgttcagtgccttgaggatttcggcataccgctttatttatccaccaccgtgtcggaaattcacggcagggaaagggtagagggcgtgacaattgcaaaggttgatgaaaaccgcaatataattgaagaaacaaagcgctatataccctgcgatacgctgcttttatcggtagggcttattcccgaaaacgagctgacccgcaacgccggaatagcgatggacagaataacaagcggcgctatggtggatgaaaaccgccaaacagagacagagggaattttcgcctgcgggaatgttttgcaggtgcacgaccttgtggattatgtgtcggacgaggctgaaattgcgggcaggggagcagcagaatatgtgctgaacggcgcaaattgcggcaaaaccgtaagcactaaggcagggaacggcgtgcgctatgttctgccgcagagaataaacgctgatgagaaaaatgatgttgctttgttcctgcgcgtatctaagccgttcggcaaggttaaatacaccgtaagctcgggggataatgtgcttgcaaccgccgtgcggctgaaagccgcgcccggagaaatggaaaagatagtgttaaagcccgagaaattagctttggcaggggaagaaataaccgtcagtctggaggaagtaaaatgacaagggatatgacctgtataatctgcccgcgcgggtgcgcgctcaaagttgaaattaacggcgataatataaccgttacgggcaacggttgcccaaagggtaagcagtacgccatagacgaatgtaccaaccccatgcgcacggttacatcatctgtccgcattgaaaaccgcgaggacactatggcaagcgttaaaaccgaaaaccctgtaccgaaggataagatttttgaggttatgcggcttataagggcaaaaagcgtttgcgctcccgtaaaaataggggatgttattattgagggcgttttcggcacggatgttgttgcaaccaaaaatattatttagtgtgtaaaatataaagtcagcgcggattccgatttttcggtcggagctcgcgctgaacctgttattatatgtttttatatatttatattttcctcgctttgcactgcgtaagaacccattctgtaaaccttgccgaggctttcgtgttttttaagcgtatttgaaacggtgggaaccgcgcctaaaaatagcgatttataaaggcgggtgagcttctgcatttccgtgatattcggcgcttcctcgccgcgctttactgaaaatgaaagctgaaaggttttaccgcctacgctcggaagtattgtgatatcatagccctgataattaccgtaaattacgccgctttgctcatcaagcttaagtcccgattgctgcgcaaacggcattaccgcattaaaataaccgctgttaatttaaaataatatccccttgaaaatttatataatgtctactgaataattgcattagcaaatgcaattatataaaatcgagttaaaatctcgattttatgggtcaaaacctttgttttgaccgtcagtatacacaatcagccccgttcagtcaaccctaaaaggctttgagcgtgccgatgaaccgacacgctcatttacgggaatgctgcagaacggcagagacccgatatttacttatcaaggcggcacatatcctcaaggctttcgcgttccaccgccacataatcgcaattgcggttcagcattacaacggggggtctgcctatgcggttataatttgaagccatagagtaattgtatgcgccggtggtaagcaccgccagtatttccccgcggcggggcttcggcagcttaaaatcctcgccgataaggtcgcctgattcgcagcatctgcctgcgacggttgcggtaaaatcgggctttgcggctgcacgggaagctaaaattaccgtgtattccgattcataaagtgtatatctgggattatcggtcataccgccgtcaatcgaaacatagtttttatagccggtaatttccttaacgccgcctaccgtataaagcgtaattcccgaatcggctacaatgcttctgcccggctccattagaattttaggaacaatgagccccatctgctcacagcgaaggtttattatttcggatacctcgcggattcttgcggtataatcaatctcggggtcattttcggtataacgaacaccgaagccgccgcctaaattgagcatatcgggtgcgaagcctaattcatcctttactctttttatgaattcaagcattatttcaagcgctgttccgaacggggaggattcaaatatctgcgagcctatatggcaatgaaaaccgcacagtatgatattcttttttgcaagcaccgatttcacgacttcaaatgcctgacccgtttctatcgaaatgccgaatttcgattccacagagccggtggaaattttcttatgggtatgagggtctatccccggggtcacccttaacagaattctttgttttacgcccttttcaccggcaatctgctctaatgcttcaagctcgtctgtattatcggcaacgaaatatcccacgccgctgtctattgcaagtcttatatcgccgtcggtcttgttattgccgtggaaaaagcttttctccatagggaagcctgcggtttttgcggtatatatttctccgggggagacaacatctatatctatgccctcctcagccattatgcggtagatctgcttgcagcaaaacgctttgcttgcaaattccggcacagagcctgcgggaaaataccgctcaaacgccgatttgtattcccgcacgcgggagcggattctgtcctcgtccataagataaagcggagtaccgtacttttcggcaagctctgctgtgtcatac

SEQ ID NO: 3679 - DNA, 8384 bp, Unknown
  16S sequences of unknown bacteria
accgctctgcacgagaccatttctccccgcataaacgagcgcggcgaaatcgtgcttgacggcgtgaccgtcaccaaggaacagcttaaaaagtgcaacaaaatctacattgtgggctgcggttcggcctatcatgtgggtattgtgggcaaatatatcgtcgagcgcatggcgagaattcccgtcgaggtcgaccttgcaagcgaattccgttaccgcgagcccattatcgacgaaaacacccttatgattatcatcagccagtcgggcgagaccgccgatacccttgccgccctgcgcgagggcaagcgctgcggcgcccgtatcatgtccatcgtaaatgtggtgggttcctccatcgccaacgagtcggacgacgtgctttatacctgggcgggtcccgaaatcgccgtggccaccaccaaggcctattccacccagctttccatgatttatctcatcgccctttacatttcccaaaccatgggtatgctgtcggccgaccttgtggccgagcatcttgaggcggtaaaaagcctgcccgagcttgtggacggagttatcaaggctaccgagccggtcatgaaaaagctggccgacgagttcaaaaatatcgagcacgcctactacctcggccgcaatgtggactatgccgtggccatggaggcctcactcaagcttaaggaggtcagctatgttcattccgaggcatatgccgccggcgagcttaagcacggaaccatttcccttatcgagccgggaacccttgtggtggcgctcaactgctgcagccacatatatgacaagaccatttccaacatcgaagaggtcaagtcccgcggagccaaggttctgtccataaccaccgagggcaacacctccatcgaaaaatgctcggactatgttatctatctgcccgccgtcgacgagcttgtgctgccttcgctcgaggtcgttcccatgcagatgctgggctactttatggcaaccgtcaagggcttcgacgccgacaagccgagaaaccttgcaaaatcggtaacggtggaataatatggctgacataaacgacattaaaatcgaaaatcttctggatctttcaaagaccgacgccgcctctctttttgatggcaaagcctttccctttgaggtcctccccgaaataaagagctatattttgaatgttctcattccctctctcgacaaaaacgagtttgagcaggcgggggaaaacgtgtggatagcaaagacggccaaggttgccccgtcggcgcttataaacggcccgaccgttatttttcccgaggccgaaatccgtcacggagcttttataagaggcagcgccgtggttggacggggtgccgtggtgggaaattccaccgagcttaaaaactgcgtgcttttcgacatggttcaggttccccactataattatgtgggcgatgcggtgctcggctttaaggcgcatatgggcgccggtgcaataaccgcaaacatcaaggccgataaatccaacgttataataagaggcggccttaacatcgacaccgggcttcgcaaaatgggcgccgtgcttggcgactttgccgacgtgggctgcaacagcgtgctcactcccggggtcataatcgggcggggcacaaatctttatccgctttcgatggttcgcggcgtcgttccggcaaattcggtttacaaatccggcgggaaaatcgcaaaaaagaactgaaatttatttttcttttaaaaaacacttgcataatccgtggagacgtggtatatttattctacctctccacgggtttttttgtgggctttttttgcgaccgaaatttttcggtcaaaaagaatgggcatctttgcagaaaaaatccgcaatctcaaagtgaagagggaggatattttccgacgggaaacggcttgtcagagccgaaagtcggacaataaaaattccgaatcaggaggtgccataaaatgagagttaaaatcacaatggcatgcacagagtgcaaacagcgcaattacgacactgtcaaaaacaagaaaaacgatcctgaccgtcttgaaatgaacaagtactgccgtttttgcagaaagcacactctccacagggaaaccaaataaggaggaaacttaatgaaggttttaagagatttcttaaaagtgctcaccgtggttcttgccgtggcgacgcttgtagcatttttctttccccttgtttcggtggcgaccaatgcgggcgacaccatatccctgaccggagccgaactcgccttcggtgccgataaatcggccgccctcggcgcggacagcgcaaacctttggaaatccggatggtttttcgcgtcctttatattcggtgctttgactgcaatctttgcggctgtgggtttcttcaagagccagaaatggaacggcgcggctctcgtgaccggacttatcaatgccatcattatgttggtcattcgcgtaagcacggttggaagctacgttgacttgagaaatcttatgtcgcagatcgacgcggaaagcgcaagctataatttcaccatgacgctcatgatgattttaagcatcgccaccctcgtcatatgcgcggtaatggctctcgtacgcgacaaggtcgccgtcatggagtcaaacggaagcaagatctccatacccgcaaaggtcaagaaattccttcgcgagtataagtccgagattaaaaagatcgtatggcccaccggtcgctcggtggtcaaaaacaccatcgttgttctggtgatgtgtgcgatcgtgcttcttctcgtttgggcggtagataccggtatgggcgagctgcttaagcttacctacggcgtttccgcttcctaatcccgactctccgaaatcgcatttgaaaggagtcggcacaatggctgaagaagcaaaatggtatgttatccatacctattccggctacgagaacaaggttgccagcaatcttgaaaagcttgtggaaaaccggaaaatgcaggatcttatccacgaggtgagaatacccaccgaaaccgtggtcgagatcaaggacaacaaaaagcgcgaggtagagcgcaaaatcttccccggctatgtaatggtaaaaatgatagtgaccaacgaatcgtggtttgtggtcaggaatattcagggctgtaccggttttgtcggtccggcttcggatcccattcctctcaccgacgacgaggtcgcgagactcggcgttgaaaaacgcagtgtcgaggtcggctataaggtcggcgataacgtcaaggttatcgacggaccccttgtcgattttaccggaatcgtagacgagcttgacgtcaagaacaatttcgtcaagataaccatttcaatgttcggtcgcgaaacaccggtcgagcttgaaataaaccaggttaaacctgtagagtaaacacggtaattttgcgtttgaaagcaaacgctgtctataagaaggtatttcccttcttattgtgggaggaacacccgtgtgttccgccgattaccacgataattacggaggtgcaatcaacatggctcagaaagttacgggctatatcaaactccaaattcccgccggcaaagccactccggctcccccggtaggtccggcgctcggtcagcacggtgttaacattatggctttcaccaaggaattcaacgagcgcacgaagaatgacgtgggtcttattatccctgtcgttataacggtctatgccgatcgttcgttcacctttgtcaccaagactccccctgccgcagtcctcatcaagaaggcctgcaacatcgaaaaggcttcgggtgtccccaacaaggacaaggtagcaaagatcaccggcgagcaaatcagaaaaatcgccgaacagaaaatgcccgaccttaatgccgcaaccgtcgagagtgctatgagcatgatcgccggtaccgcacgcagcatgggcgttgaagtcgtcgattagtgctcccgggtgggaggaaatttccgatttaaccactcttaagggaggaaaatgtatttatgaaacacggtaaaaaatatacggacagctgcaagctgttcgacaaatctcagctttttgatgctcccgaagcacttgagcttgcggttaaaaccaagaccgcaaagttcgatgagaccgtagagatccatgtgcgtctgggcgttgactcccgtcacgccgaccagcaggttcgcggcgccgtcgtgcttcccaacggaacaggcaaaaaggtcagagtatgcgtctttgcaaagggcgacaacgttaagctcgccgaagacgccggtgccgacattgtcggagccgaggagctggccgccaaaattcagaatgaaggctttatggactttgacgtcgttatcgcaactcccgacatgatgggcgttgtgggacgtctcggtaaggttctcggaccccgcggacttatgccgaaccccaaggccggtaccgtcacccccgacgttgccaaagccatcaccgaagccaaggccggtaaaatcgaataccgtcttgacaagaccaacatcatccattgccccatcggcaaggtatccttcggtaaggaaaagcttcaggagaacttcgacaccctcatgggcgccatcgtgaaggctcgtcctgccgccgcaaagggtcagtatgttaagtcttgcgtcatcgccaccaccatgggccccggtatccgcatcagccccgcaaagtacaactgataaagctttgtttttaaagaccgtttcgggttttctcggcggtctttttcctttttgaacttttttcggtaatccccttgacagcagggcaaaagtgtgatattatactaaagctgttctaaagacagcgggtgctgatattcagcctaaaggctattgccgcctgccgaggaaaagcgtttaaagatttttgtctgttgacgccttcttcgccttgcggagaaggctttttatattcataacgggaggtgaataatatgcccagtgcagcaattctcgaaaagaagaaacagctcgtcagcgatctgaccgaaaagcttaaagaggcctgcgcaggtgttatcgttcagtatgagggaatcaacgtcgaggacgacacaaagctccgccgtgagctccgtgaggccggtgttgaataccgcgttataaagaacacctatctgcgtttcgctctcgaaggcgccggaatcaccgggcttgatgacgttctggagggaaccaccgccgtcgccacaagtaaggatgatgaaatcgccgcagccagagtgctttgcaaatatgccgagaccagcgatacctttaaggtaaaggccggtttctccgacggcaaggctctcaccgccgagaccgtgaccgaaatgtccaaggtccccggcaaggacgctctctatgcaatgctggccggagaactctcccagtgcatcgcaggtcttgcccgtgctctcaacgccgttgcagagcagaagggtggggaagtccccgccgaagcataatttttgcttcataaatttatttcaaaaatcattttggaggtattataaatgtctgagaaaatcaccggcatcattgatgccgtaaaagaactcaccgttctcgaacttaacgaactcgtaaaagccatcgaagaggaattcggcgtatccgccgctgctcccgttgccgttgccgctgccgctcccggcgctgccgctgcagaagagaaatccgaatttgacgttgttcttgccgaagtcggcgctgagaagatcaaggtcatcaaggctgttcgcgagatcaccggtctcggcctcggcgatgccaaggctcttgttgacggcgctcccaagactctgaaggaagccgttgccaaggacgaagccgaagagatgaagaagaaactcgaagaagtcggcgcaaaggtcgaactcaaataagttttgtctttacagccgaagcgggatttttaaaattttctcgcttcggcttttccttttaaaggtgaaagaatgattaaaagattttttaagtttatcgcctttattttggttctgtgtctttgtgttctggccgtttccaactgcgttgtggtcttttcaaaatatgaaaaattcaccgtcgacgggttttcgagcaaggccgactgtattcttgttttgggggcaagcgtgctttccgacggcaccccctgtaaaatgcttgccgaccgactggatacgggaattgccctttatgaaaacggcgcctccgacaaaattctgctcagcggatatacctcggcggaggatatgtatgacgaaatcaaggccatgaagaattattgccttgaacggggcgttcccgaaagcgccatatataccgacgggttcggcctttccacctatgacagcgtggtcagggcaaagcggatatactgcgccgaatcggtactcatagtcacccagaaataccacctcgaccgcgccctttatgttgccaaaagcaaggggcttgaggcggtgggcgtcgcctgcgatacgggtgtgggcggatataccgacattctcaacaatcaggtgcgggagattttcgcccgaaccaaggccttcttctactgtctccttgattttcagccgaaatatttaggcgaagtgcgaaatataaacgcaaattaaaaaccaaccgaaacccgagttctacccggtaaaatcggttggtttttcagtttccgaaaatattgaaaatctcaccgtttgtgacgcttataacgtcgcttgaaccgctcataaatcggcaaaaatcttcaaaccgctcccaaagcccctcggcgtcaagctcgtaggaatgaccccaaacaaaaaatattccgcctttttgctctgcaaagcttttggcaagggtcatgagatcttcatcggtaatgcggcaggtcgcctgccatttcataaagtctgcgggaggggaaaaagtcccgtttgtcagccccgtgcgggcatatttaatgccgacgctttttgcgattttgattatgcgttcatcaaagctgtcgctgccgccgccgggataggccatgccttttggagatgtttttgtcagccgttcgatgttttttctgtcaagctcgatttgtctttttacctcctcgtccgaaagagaggtgagcagcgggtggccgagagtgtgaacggcaagctcaaacccgtcgtaaaggccgccttttatgtcgctttccgaaagccgcaggtgccgtgcatttatgccgagagggaaaaggtcggtttcggcgcctaacagcccggtgtttatattgaatgtggccgtaagattatattttctcagaaattcggcaagccttgcgtcctgcgttgtgccgtcgtcaaagctcatggtaagatattttttcatgaccttcgtaccgtgattttttccgagtcggcgcccttttccttgcgggtttctataataacgaaaatcatgaccgccagcatttcataggggaacgggcaaaattcgccgggatttgtctgagacatgagcagaagccccccgtagcaaaggaaaagcacaaaggcgttatatcccgatttgacaaaggcgagataggcgcggttgataaactgaaaaccgtaggcggccacacccacaagccccatgcttccgatgatttggggtatcatcatgtgataccagcccatggctcctttttttggcgtgtagatgtcataattgcctttaaacccgagcccttgaccgaatatgggggcgtcgagaaagtctcttatagaggcatctatgagcctcatgcgctgttctccctgctctatgggattgaacccgaaatatcggctggagaaatagatcataacctttccgcccaggaaaacaagggcagccgcacaggcgagagagacgattatgtagagatttctgttttccgaatcggtgacgataaggaaaagcaggcagcagcaaaattcaatggcgccgaggaaaagcccgcttctcgagccgagcagcgacatgacggcaaacatgatgaaggaaagaaaaatcgggtacctgtgccgctttgcgaacatgagcggcgccggcatacatatcatgaggaaggtcgaatagttgttgcggaatttccattcggggacgcttttgttaagcagaatgtcgtcaagactgaaaagaatggatttcgcggcaagcagcgccgcgcaaaggccgacgatgagaagcacctcggcaaatttttcggcaaggtcatagtcgtccctgtggcgaaaacgaaacctgaaaacaaaataaagcagcagcattccgactccgagaaaaacgacatagtaggcggccgaaaaatagtcggcaagggatatttttccgagacccccgagggtcacggcgacggtcacggcggcaatgccccaaaagcttttgccagatc

SEQ ID NO: 3680 - DNA, 4945 bp, Unknown
  16S sequences of unknown bacteria
ccgcccgcgccgaaatcgttgcatctttttatcattcggcaaacctttttctgacggaaaaggcgctgaagcttacgttcctcgggggcgttgcccttttgcacctcggcgccgcaggtctcgagagaggaggcggtgtgggatttggaagaacctgtggctccgccgcagccgtcgcgtcccgtagctccgccgagcattattacaatatctccgggggcggggcgttctcttctgacattttcctcgggggcggcggctatgaccgcgccgatttccatgcgctttgcggcatatccgtcgtggtaaatttcgtcgactattccggtggcaagaccgatttggttgccgtaggaggaatatcccgcagcggcggtggtgacaagcttgcgctggggcagcttgccctttattgtctgagaaacgggcttaagcgggtcggccgctccggtcacgcgcatggctccgtaaacataggagcgccccgaaaggggatcgcgtatggctccgccgatacaggtagcagcgccgccgaagggctctatctcggtggggcgattgtgggtctcgtttttaaagagcagcaaccatttttcggttttgccctccacctccacgtccattttaacggtgcaggcgtttatttcctccgactcgtcaagcttgtcgagaagacccttggatttaagatactttgcgccaaccgtcgcaaggtccataagacatatggactttgtgcggcccagttcctttcttatggcgatgtattcgttaaaggcattttcaaggagcttgtcctcgaacttcacattatcaatatttgtgaggaaggtggtgtggcggcaatgatccgaccaatatgtgtcgatcatgcggatttcggttattgtggggtctcttttttccgaattaaaataatcctgacagaaggcgatgtcgtcctcgtccatggcaagcccgtattttttcacaaaatcggcaagaccatttttgtcgagggaggtaaatcccacaagggtttcgacctcggttggaatgtcatatttgacggcaagggtgtcgggcttttcaagagatgcctgacgcgcctcgacgggatttataacatattttttaacggtgttcacgccctcctccgaaagcgttccctcgagaatatacacctttgcggtgcgaataagggggcggtcgcccttggaaatgagctgaatacattgtgcggccgaatcggcgcgctggtcaaactgtccggggagatattccaccgcaaaaacagtaccctcgccctcaatctcgtcagtcacaaggtcggtctgaggttcggaaaacaccgtctttttggcatagtcaaaaagctcgggagttatgttctcaacgtcatagcggtttatgattctgacattttcaaggcctttgaccgaaagaagggtcacggcgtcggaaagaagcgcctttgcctcgcttgcatattcgctctttttctcgacataaactctgtaaaccattatttttcctcctttgccgaaagggctctttgtccgatgtctttgcggaaaaacgcattttcaaagtgaattttttcaaccgacgcataagcctttttaacggcgctctcaagagtatcgccgatttcggttacacctaaaacgcgtccgccgtttgtgtaaagctttccgtcctttgcggttgcgccggcaacaaagacattttcaaaaacatcgccgtcgaaggttatttcaaagcccttttcatactcggtgggataaccctttgaagccataaccacacagcaggcgtgcttttgctcaaactccaccggagtttccttaagctttccgtcgcaaaccgccttcatgacggtcaaaaggtcggttttcataaggggaagcaccacctgtgtttcgggatcgccgaaacggcagttatattctatgaccttggggccgtccttagtgagcataaggccgaaataaaggcagcccttaaaggtgcgtccctcggcattcatggcgtttattgtgggaaggaatatttcatccatgcatctttttgcaacagtctcggtgtagaagggatttggagcgacggttcccattccgccggtgttaagtcccttgtcgccgtcgagagcgcgcttatggtccatggaagaaaccatgggaacaacggtttttccgtcggtgaaggaaagcaccgaaacctcgggaccctcaaggaattcctcgattacgatttcgtttccgctgtcgccgaattttttgtcctccatgatttccttaacggccgcaaaggcctgctcgcgctcggtcgcaatgatgacgccctttccgagagcaagtccgtcggcctttatgacggtgggaaccggagcggttttaagatactcgagggcggcggcggggtcggaaaagacctcgtattttgccgtgggaatgccgtattttttcatgagattttttgaaaaaaccttgctgccctcgatgatagccgcattttttctcggcccgaaggcgggtatacccttttcttcaagggcgtcgacgcagcccagcaccaaggggtcgtcgggagccacaaccgcaaaatccacgccgtttttttcggcgaagtcggctattgcctcaatgtccttggctccgatgccgacgcattcggcgtcccgctccattcctccgtttccggggagggcaaagattttttcaacgtccttgttttgctttatctttttgataatggcgtgttcacggccgcccgagccgactactaaaaccttcatattccaccgttcctttgttattttcaatcgttataaatggggaacttttcgcaaagagccgtgacatcctttgccacctgctcctttttaccgtcaaaatcggtaattacgtcgcttataaattcggcaatcttcaccatttcctcttttccgaagcctctcgaggtgacggcgggggttccgatacgaagtccgcttgtcacgaagggcgaaagggtctcgttgggaattgtgtttttgtttgccgtaatgtgaacctcatcaagtcgggcctcaagctccttgccggtcagaccgctgtcggtaaggtcgaggagcatcaggtgattgtcggttccgcccgacacaatgcggataccgcgggacataagctcgctgcaaagcaccttggcgttttcggcgatgtttttctgatattccttaaattcgggagtgagcgcctctccgaatgctaccgccttggcggcgattatgtgcataagcggtccgccctgaacgccggggaaaacggccttgtctatggccttggcatactgctccttgcagaggatcatgccgcctctcgggccgcgcagagttttgtgggtcgtggtggtgacaacgtcggcaaagggtactggcgagggatgaagccctgcggccacaagacccgcaatgtgggcgatgtcgaccatcatataggctcccaccttgtcgcatatctcgcgaattctcttaaaatcaatggtgcgggaataggcgctggcgccggacactatcattttgggcttgcactcaagcgcgattttttccatttcgtcatagtcgatctgctcggtgacggggtcgacgccgtagggcacaacattgaaatatttgcccgaaatgttaacgggggaaccgtgggaaagatgtccgccctgggaaaggttcatgcccattaccgtgtcgccgggattcagcagcgcaaagaaaaccgcaagatttgcgttggcgccgctgtgaggctgaacattggcgtgttcggcaccgaaaagctccttggcgcggtctctggcgatgttttccacaacgtcgacgcagccgcagccgccgtaatatctctttcccgggtacccctcggcatatttgtttgtcagcactccgccggccgcaagaagcacggccttcgacactatattttccgatgcgataagctcgatattatgctgctgtcttttaagttcgccgtcacaggcggcgaaaacctcgggatcgtaatttttaagctcgtcaaaaaagttcatttcagggtatcctccaatctcaatcagtgatggaacagtctcattccggtaaaggccatcaccataccgtatttgtcacaggtctcgataacaagatcgtcgcgtatcgaaccgccgggctgggcgatatatttcacgccgcttttctttgcccgctcgatgttgtcggaaaaggggaaaaatgcgtcggagccgaggctcacgccgtcgattttcgaaagatattcggccttttcttcgtcggtgagcggctcgggacggacggtgaaatatttctgccagttgccctcggcgcaaacgtcctcttcgtttttgtttataaatccgtcgatgacattgtcgcggtcgggacggccgatgtcggccttaaaggggagaaaaagaaccttatcatgctgacgcaaaaaccaggtgtcggccttgccgcccgcaagacgggtacaatgaattctcgactgctgacctgccccaacgccgattgcctgcccgtcgaaggcgaagcaaaccgagtttgactgggtgtatttaagggtgataagagatatgataaggtctctttttgcgttttcgggcagttccttgtttttcgtaacaagattttcaagcagcttttcgtttatttcaaagtcgtttcttccctgttcaaaggtaatgccgaaaacctgttttctttcgattttctcgggcacataatcggggtcgatcttaacgatgttataattcccttttctctttgacttgagaatttcaagagcctcgggctcatatcccggagcgataactccgtcggacacttccctttttatgagctttgcggtggtgacgtcgcaaatgtcggacagcgccacaaaatcaccgaaggaacacattctgtcggttcctctcgcccttgcataggcacagg

SEQ ID NO: 3681 - DNA, 32759 bp, Unknown
  16S sequences of unknown bacteria
cgcatttccgtaaggaataaatatttttgtttcggcttcgtcaaaaacaggctttgaaagccccctgtaagaacccccgacggcaagaacaagagcccccgaaaggtctgcggaatacatatccacggcgtcttttctgtctgccgccacaaccgagattccgcgtcttttcgcttctttcagaaaaggcacaaaatcttcgaccgccgccgcttttataaattcggacgcgcctgcggaagcccttgtaacaaccgcatccgcgctcatccaattccttttcggaactatgattcccgttgcgcccgcggcgtaaacacttctgattatgtctccgaaattgtacgggtcttctatcccttcaagcaaaacgataaacggcttttcgctttcgaaaagcgcatcgggttctgtgtattcgcgttccccgacctccgcacatattccgccgtgagttgaaccctgcgtcatctcggatattgtgtcggcgtttgtccttatacactcaatgccattttctttcgcttttcggcagatatatccgaaatcgcgcgagacttttttattgtccgtatatatacggaaaacgtcgcgattgcccgcctcgaccgccgctttaacgcttattgcgccctcaagaataattttatttgtcatagacagtaccttctcaaaaaaaatccgacggaaaaatcatctccgtcggatattatatcagaatataaatgctttgtcaacgctcgggcagcgcgtattttttttcgaacttctcgtaatcccttgcaaattcgggacttgtacgcatctcttcgcgcatttcctcgtgcatattcatgctgttgtttgccgcatctatgatgcagtccgcaatgtttgaacaatggtcggaaactctttcgaggtcggtcagaatgtcagcccatacaaacccgacttccatactgcaaccgccgttctgcagacgcagaacgtggtttgttctgagttgctctttaagtccgtcaaccacctgttcgagcggctctatatgttccgccgccaacgggtcgtcttccgaaaaagccgcgtaagttctgtccagcacttccgtaactgccttttcaagcacggcaagttccgcttttgccgtttcggagagcgtttcatttttgtctttcaactcttccgcggcttcgacaagatttaccgcatgatccgcgattcgttcgaggtctccgatacttttgagcagttttgcggatgcaacggttacgtcttcggatatgggaagcgccgtcagaccgacgagatattcgctcagcatatcttcgtatttatctgtctttgtttcttttttacgtacgctttcggcaagttttaaagaataagcgtctatgcaggacattccctctttgagagcagtaaatgcatggttcgccatttttgcggcggtggcgcggcaatgttcaatggcaagttcgggcgttgaataaagacgggtgtcgagttcttccggtttttcttcctttgttgcgggaagcacttttcttgcgattttttcaagaattcccgacatcggaagaataagaagcgtgcttgcaaccttgaacgccgtgttcgctatcgctatcgtgagttccgaagccgaggacgagagcagttccgagcccatcgggtcaaggaacgcatatttcgcaacgcagaaacaggtcatgcagaaagccgttccgattatgttgaaaacaaggtgtattaccgccgctctctttgcttcgcgctttgcgcctattgaagagataacggctgttatgcacgtccctatgccgtcgcccataactatgggaacggaagcgcctatcgaaacctgccccgttgttgaaagagcctgcaaaattccgacggatgcggaactcgattgaattatgcaagtcaacgccgcgccgacgagaatgccgaggaaagggttttcaaacgcgatgaaaagattacggaagccctctatttcggccagccccgaaaccgcattggacatcgcttccatgccgaacataagcgttgcgaacccgagcaaaattgttcccgtgtcctttgatttctgctttttcgacatcataagcataactatgccgaaaagcgcgagtatgggaacaaaggatgacggtttaagcatatttacccaaacattgtctcctcttatgcctgtcagactgagtatccagcccgtgaccgttgttccgacgtttgcgccgatgataacgtttgtcgcctgtttcagcgtcataagtccggagtttacaaaacccacgaccataacggttgtcgccgacgaactctgaattatcgaggttattccgagacccgttaaaaatcccttaaatttatgctcggtcatttttgccagcaacggacgcaatttgttgcccgcacggcgttcaagcgcctgtcccataatattcattccgaaaaggaaaagacagagacctccgacaagtgccagcgtgttaaaaatattaaatgccgaccccgaatcaaaaaaattcataataaagacctttctcaacaaaaactaccagtatacatgataattttaatagagaaaggtcaaatccgttatatggtttttgtaaaatccatgtaaagtgggactataaaacactcaaagcgtaaaatttcagaaaaaatgaggaaaaatcaaaagaacagaacttttatatctctgccggtgcgttttgctgtttcttcgggaaaatcacggttatctccgttccttttccgacttcgctttcaagcgttatttttgcgtcgtgcagctttgccgcgtgtttgactatcgaaagtccgagacccgttcccccgacctctttcgaatggcttttatcaactctgtaaaaccgctcaaaaatgcgctcctgctgttctttcggtattcctatgccggtatctctgacggaaagaatgatattttccgcattgtttttaacgttcacaaaaacggttcctccgtccttattgtattttatcgcgttgtcgcagagattgtaaacaaccgccgtcagcagttgaggtataccgtatatttcggcattttccccattcaaggaaagcgtaacgtttgctttcttcgctgcgggaagcagacttctgaccgtattctccgccgtcgcgtaaagatcgacggtctctcttgtgagttcagctgcgccctcgtcaagattcgaaagttttataatgtcctcgataaggcgtatcatgcgctgcgcttccgcatatatcttttcgctgaaagcggttttgtccttgtctgcgaccattccgtttgcgagaagttccgcgtatcccgatattgtttggagcggggttttgagttcgtgagacacgtttgccgtaaattcgcgtctcatctgctccgctctttctttttcggtcacgtcaagcacaagcaatgcggctcccgtcacttttccgtcggtcgaaacggggtttgcgagcagctgacagtttccgtctctcagcgcaaaaacttcttccttatttttccccgaaagtgctatttgtgtcggctctttcaggttgacggacgttttttcggagaaaatatcttttccgacggagtcttccgaaagcccgagcatctttgccgctgctcggttaatgcttaaaataacgcctttttcattaagaataataagaccttcgctcatattctccgtcgcggtttcaaactcttctctcttccgtttgagttcttccgattgatgttttaactgcctttgctgcgcgtccatacgtttaagcagcggcgaaagctcttcataaactttgttcgaaagcggtgagtcgagattgagtttgttcagcggcgtgactatatttttggaaaggcggtaagccagtaaaagagcaagtacaacagccaaaagcgcgattatcagcacgggccgcagcattccgaggaacagcgtcaaaaccgaatattgagaaacagaaagacggagaaccgaaccgtcggaaagtttttttgcggaatacagacttttttccgtcagcgtttccgaataacgagaacttttaccgtagccgttttcgacagcctgcctgacctcttctctttcaaggtggttttccattgaagaagcgtccgttttattgtcaaagagaacttttccttttttatctatccatgttatacgaagctcttcggagtcaagcccgtcgaaatatgaggaaccttcgtgctctatgccctgtgccgcaaggtcggtttgcgtttttaactgattttcctgcgagcccgaaaaataatcgtacagcacgcccataacaagtgccagcgacgcgaaaatcacaacaacggcaacaatgcagacggagcggaaaatcctttttgtcattttttgtcctccattttatacccgacaccgcgaacggtttctatataatcgccgcagtcaccgagttttgtccgaagtgttcctatatgtacgtccacggttctgctttcacccacaaagtcaatgccccagacgctggaaagcagcctgtctctggaaaaaacaatgccgaggtttttaataaaaatgtgcagcagttcatattctttgagcgtcaattggacgggagttccgtgtacccgaacctcgtgtcttttttcatcgagttcgaggtctccttttttcaataccgaatcatcttttttcggtgcggctctgcgcaggaccgctttgacgcgcgatatcatttccatcattccgaaaggctttgcaagatagtcgtccgctccgaggtcgagccctattaccttgtcgtattccgttccctttgcggttgccataataacgggaatgtcttccgtccgaggatcgtttttgagttttttgaggatagaaagtccgtcttcttcgggcagcattatgtcaagcattataagttgcggaacggttgcttcaagcgccgcgaaaagttccttgcccgacgcaaaccccgccgcctcgtaaccgacgcttgacagcgtgtatatcacaaggtcgcgtatgcttttgtcatcttcgacacaaaaaatcatatttcaacacttcttttctctttttattctataataaccgaaaacgcgtttttttgatagtacctgtttgtgaaataatttcaaacaatcgggtttttggttcttgtcgtgaaaaaaaagcgggcttaaagcccgcaaaaaaattattttcttgtaaaagtcgaatctatgtccgtaaccgtaacacgcgaataataaagcgtgtttaactcatttttcagcttttcgagttcgtctgacggcagaactgccgcaacttcgactttgtccgtaaactgcctgtccgtgacagtcgctccatacttttcaagtatccgcataacgttctcatggagttcgtagccgtattcgagcaaaaacgtcgtcgcaaggattatttccgttttgcccgcttcttcaacagccatcgccgccgcttttgtgtatgctcgaacaagaccgcccgcaccgagcaatataccgccgaaataacgtgttacaactatgcagacatcaacaagtccgttcagggttataactttcagcacaggcattcccgccgtgccctgcggttctcccgcatcgctgcaccgctgcacaccgtgctgccttaaactgtatgcgtaaacgttatgcgtcgcctgtccgtgttcgtgcgcaacaagatcgagtttttcgagagcctgctcttccgtcgaaacaaaaaaggcgtgccctataaacaccgattttttctcggtgaactcaacttttacgtctttctttatcgtcagaacgctcataaaaacctcaaaaaaataacagaaatgcaattccccgtcggagaaagaacatttctgttgttttcatattataccgacggaaaatcagtcggccgctctctgaaccttgccggaacggagacacttcgtgcatacgttaacgtgcttgacagagccgtcaacaacagcctttacgcgtctgacattcgatttccacattttattcgagcgtctgtgagagtgggaaactttaatcccgaaacttacgccttttccgcaaacatcacactttgccatgttcaaaacacctccatcaagatttacctggactaccattataacaaatcaattcaaaaaaatcaatagtttttgcaaagaaaacaaaaaattcacatttaacgcattctttttgcttgtaatcggtctcttattataagtcttgccctctgcgatattgacagttttaatatttaatggtatactgtaaaaaaatgtcggaggtatgttatgttttgtaaaaattgtggcgagcagataacggacggggcattgttctgcacaaactgcggggcaagtgttgccgaaccgcccgttcagcctgctcaacaacctgttgcgcccgcttatcaacagcctgtatatcagcagcccgtataccaacaaccggtatatcaacaacctgtttccaattccggcagaggtatgggcgtagccgctcttgttatgggaatagtaagttgctgcctgttttggattccgtatgtaaatacggtatgtcttttgatgggtattgccggaatcatcctttccgcaatttccatgaaaaaggcaagagccgcaggcgtgtcgtccagcattgccgttgcgggtcttgttgtttccattgtcggtcttgttctttcgtttttgtttttcttcatttacgtcgcggcgatcggaatgctttattcgacacgttattggtattaggctgattatatccggcattgcaaagatacgcggatgtaaggttttacgtccgttttttcttttataatgctgcggaaaaggtctgcctttcgcaagaataaaaaaaagttcaaaaaaaactgttgacaaatcacggctgctgtgatataatagtcaagcgataacgaaatcgcggacatttgtttaagaatgggagtttagctcagctgggagagcatctgtcttacaaacagagggtcacaggttcgagccctgtaactcccaccacttttcttaaacgcacagtccgatttcaatcgcttatacggcttcgtagttcagttggttagaacgccgccctgtcacggcggaggtcgtgggttcgagtcccatcggagtcgccatggtttgcctctgtagctcagttggtagagcaggggactgaaaatccccgtgtcgttggttcgattccgaccggaggcaccattttatgcggtattagctcatctggtagagcgcaaccttgccaaggttgaggtagcgggttcgagccccgtataccgctccacttaaaaaaaagaatgaaccctgcgttcattttttttatatataaagcatatacttttgtgtatgcgacataaggcgccatagccaagcggtaaggcagaggtctgcaaaaccttcatccccggtccgattccgggtggcgcctccaaaaattaagaccaacccaaacgggttggtcttaatttttggaagttccaccccatttcggacgtttcgcttttatgcgaaatccggttcgtaaatccgccgcagagcgcttcccgcttgcgaggtcgcggcaaggcgagatttcctgcccgcagggcaacttccggggtggcagttgtcttgtatttcaggcaacgcaaacaaacgggttggtcttaatttttggaagtcctacccctcttcggacgtttcacgaaaacgtgaaacccggttcgtaaatccgccgcagagcgcgaaccgcttgcgaggtcgcggcaaggcgagatttcctgcccgcagggcaaacttccgggtgggagttgttctgcatttcaggcaaagccgacaaatgggcgggctttatttttatatcgaaatctctccgaaaagttgacttttgccgagagaactgctataataataaatattataaaaatgtacagaggagtttccgatgaaaaatataattcttacgggcgaccgcccgacgggacggttgcatttggggcactatgtcggttcgctcaaaaagagagtggaacttcaaaattcggggcagtttgatgagataaatattcttattgcggacgatcaggcattgacggacaacgccgataatccgggaaaaatcagggaaaacatcatcaatgtcgtgcttgattatctttcggtcggcatagacccgacaaaatcgacgatatgcgtgcagtctgccttgcctgcgcttcacgcgttgactttttattatcttaaccttgtaacgacggcaagattgtcgaggaatccgacggtcaaagcggaaatacagatgcgcggattcgcggacgagggtttgcctgcgggctttttcacttatcccgtttcgcaggcggcggacataacggcgttcaacgcaacggtcgttcccgtcggagaagaccaacttcccatgcttgaacaaacgcgtgaaatagtggaaaaattcaacaggatatacggagaaacgctcgtaatgcccaaagccatgattccggaaaacgagacgcagcgcagactgcccggcgtggacggcaaagcaaagatgagcaaatctctcggcaactgtatatacctttccgattcttcggctgttctgaaaaagcagatcaacggaaagatgtataccgaccctctgcatttgcagataagcgatcccggacatatagaggggaatgtcgtgtttacttaccttgacgcattctgcacggacgctcattttgcggagtatttgcccgaatatgcaaatcttgaagagatgaaagaccattaccgccgaggcggtctcggcgacggaacctgcaaaaagttcctgttgaatgtgctggaagagacgttgcgtccgataagagcggagcgcgcaaaatgggaaaacgacatagacgccgtttacgatattattcgcgaaagcacggcaaaagcggttgaaaaaacaaacgaaacgcttgcccgtgtccgcaaagcgatgaaaatagactattttgcggatagatccatcgtaaaagaatggggagcgcttcttaaaaaagcgaaacaatgatcggaaaacgaaagaataatattcttcaataaaaagtatcgttgatttaacaattaaactgtatgaggaaaaggggaatgtaaaaaaacgcaaattttttacatttccccttttgtcttatcagttaaaaacaaccgcgtcggaaaacccgacgcggttgttttgttcaaatgtaatatcagtcgtcgctgccgggaactctgccgcagcactttttgtactttttgccgcttccgcagggacagggatcgtttctgcccactttttcggctgcggtcttgactttcggtttcgccttttctgtgcccgcgttcatcgcttccgccgtgcccgccgcgctttctttcgcaacacgctgacgcttaacttcttcgcctgttcttatgcgaacaagaagcaggtctctgacggtgtcacgcttgatttccgaaacaacgccttcaaacatttcgtccgccgcaaatctgtattcgacaagcgggtctttgtttgcatatgaacgtgtggagaccgtctggcgcaggtcgtccatggcgtcgatgttgtccatccagttcttgtcaacgttgtgcagaagtatcacgcgctctatctctctcatcttttcgggcgtgtttgcctgttcgctgactttgagtccgagatttatcttttcgatgagtttttctttgatgtccgcttctttaaggctgtgaaggtcttcgtcggaaagcgcttctatttctcttgaaagaagcgccccggggaactcttctgtaaacgccgtcaaattccattcgtgcgccttgtcggaattgcagaactgcgaaaccgcttcatctgcgatgtcctcgaccatgtgcgcgatataatcgtgcaggtcgttgccgtcaagcacaagcctgcgctgttcgtatatgagttggcgctgtctgttgatgatatcgtcgtattcaagcgttctctttctgcgcgcaaagttgttgctttcaactttcttctgcgcgttttcgatggtgttcgaaaggatttttgcttctatcggctgatcctcgggaatgttgaatctctcggagatcatcgcaagtctgtcgcccgcgaaaaggcggagcagatcgtcttcaaacgaaacgtagaagcagctttctccggggtcgccctgacgtcccgcacggccgcgaagctgattgtcgatacgtctggactcgtgtctttccgtacctataatgcaaagaccgcccgcgtttttaacgacttccgcttctttgtcaacttcctttttgaagttgtcgtaaagttcggtatatctgcgtcttgcttccagtattttctcgtcgtcggtttccgcaaacgaggtcgaagcaacgatgtattcgtgctcgaactcctctttttccatttgcttctttgccatgtattccgcgttaccgccaagcgtgatatccgttccgcgccccgccatgttggttgctatcgtaaccgcgccctcgcgtcccgcctgtgcgattatcgccgcttctttttcatggtacttcgcgttcagaacgttatgctcgatgccttcgcgtttgagaagtttgctcagtatctcggatttttctatcgtaaccgtgcctataagcacaggctgaccctttgcgtgaacttccttgaccttttccacaacggctttgaatttgccgacttcgcttttgtagaccttgtcgttgaggtcttttcttatcatcgggcggtttgtaggaatttcgataacgtcaagtccgtatatctgtctgaactcgtcctcttccgtcagcgccgtaccggtcatgcccgaaagttttttgtaaagcctgaaaagattctggaatgttatcgtggcaagcgttttggattcgttttctatcttgacgccctcttttgcctctatcgcctgatgcagaccgttggagtaacgtctgccgaacatcatacgacccgtgaattcgtcaacgatgataacttcgccgtctttgacaacgtagtcaatgtcgcgcttcatcgttccgtatgctttaagcgcctgatttatatagtgttgaagtcctacgttttcgatatcagcaaggttttctatgccaaacgctttctgcgctttttcaacgcccgaagccgtcaaaaccgcattcttgttcttttcgtccacaacatagtcgccgtcaacgtcgtcgtaattttccttgctttccatttcctttacaacgtatttgcgcagtccgcgaacaaaggcgttcgctttctgatacatttcgtcggattcttctccgtgaccggaaatgataagcggcgttctcgcttcgtcgataagtatggagtccacctcgtccacgatggcgaacgcctgcccgcgctgaaccatgttttctttgtagataaccatgttgtcacgcaggtagtcaaagcctatttcgttgtttgtgccgtaggttatgtccgccgcataggcttttcttctctggtcgttgtcaagtccgtgaacgataagtcccacgtcaagtccgaggaatctgtgtatcttacccatccactcgctgtcgcgctgtgctaagtaatcgtttacggtaacgatatgaacgccgttgcccgtcagcgcattcaggtatgctggaagcgttgccacaagcgttttgccttcgcccgttttcatctccgctattctgccctggtggagcacgatgccgccgaccaactggcagtcgaagtgtctcatgccgagcactctgcgggacgcttcgcgaacagtggcaaatgcttcgggaagaatgtcgtcaagcgtttctccgtccgcaagtcttttcttgaatatatccgttttaccgcgaagttcttcgtcggaaagcgccttgaattcaggctccaacgagtttatcttcgcaactgtcggattgatctttttcagttcacgcgaactgtgcgtgccgaaaaccgattcaaaaagtcccattatttgacctcacataaaagatgttttttcatattggaaaatgggtataaaatcccatcttgataattatagcatacttctttcgaaaaatctaccgtttttataaaatatactgaaaaaaaacaaattcgccttgatgcgtcgtcaaaaaaattgccgagagccgaaaaaagactctttcgcgtgttgatttcttcgaaaatgtgtgctacaatgtaaaatagaatattatatatatttatattcggaaaaaaatgattgaaaaaagggcggatttccccaaactgaagaaaaagaaaagaggaaacgatgtggtatcaaaggtcagagcggtcggactgagcgggcttgacggttatgccatcgaggttgagaccgatgtttcgagaagcgcggacgaaacaaaaatagatattgtcgggttacccgacaacgccgttcgcgaggcgaaagagagacttcgcgccgctctcaaaaacagcggctacggcatagagggcttttgcgttacgataaaccttgcgcccgcggacgtaaaaaaagagggttcggtttacgaccttgcgatgattctcggagttctgacttccgcggaagtcattcccgccgtcagcccgaaaaaatgttttatcggcgagatttctctttcgggcgatgtcagaccgtgctccggcgtgcttgccggcaccatagttgcaaagcaactcggctttgaagagatttttgttccgcttgccaatgcgtccgaagcggcgtgcataggcggcataaccacttatgccgtgacgaacataaaagaccttgtttctcatcttcggggacagatatcccttgcaaaagccgaacatcgccccgttaagaccgatgatgctcccgcgcttgatttttccgatatagtcgggcagcacgcagcaaaacgcgcttgcgaaattgccgcggcgggcggtcacaatatgctcttcataggtcctccgggaacgggtaaatcgatgcttgcaaaagcgcttcccgggatacttcccgaaatgtccgaagaggaaataatcgggtcgagccgcatttattccgttgcgggaaaactgacagacgaaaaacctcttgtgacaaggcgtccgttcgttaccaccaatcagagcgtttccgtgcccgctatgacgggcggcgggtcaaaccccgtgccggggcttgtgtctctggcgcataacggcgttttgttccttgacgaggtggcggagttccctcccaaagttcttgactgcctgcgtcagccgcttgaagacggaaccgtgagcataagccgtgttcgcggcacggtcgcatatcccgcatcttttatgcttatttgcgccatgaacccgtgtccgtgcggcagatacggtcagcccgagctcaaatgcacctgcacaaaagcgcagatagacagatatatgcaccgcatttcgggacctcttctcgacaggatagatttgcaggtcgaactgccgacagttcccgtcaaagacctgaaaaaccgcgcgaaagcggaaagttcggcaagcataaaaaagcgtgtcgatgcggcaagagcaagacagagggaaagatatgccgagttcggcattccgtgcaacgcaaaactgacgcccggtttaataagggatatttgccaaaaacaaatgactgcggacgcggacaaccttttgacgggcgtgtttgaaaagggctttttgtcaatgcgttcctatgacaaactgataagaatagcgcagaccgttgccgacctcgagggcagcgactcaatagaaaaaaaacatatatcggaagcggtctatttccgctcactcgataaaaaatacttcaataaataaggaaaaaacagatgaaaatatccgttttggacagagatgcgataggcaaggacatcgacatctcgggctttgaaaaattcggaaacgtgacggttcacgacaggaccgttgccgcagacgcggttaaaaatatcggagacgcggacattgcggtgacaaacaaagtcaggctttccgcggaaatacttgctgccgctccgaatctgaaatttatcgcggaagcggcgacgggcgtcgataacatagacacggcgttctgtctcgaacacggcataggcgtggcgaacgttcccgcctattcgacttcttccgtggcgcaggtaacggtctcccttgtctgcatgatgatgacaaaacttgacgttttttgcgatttctgccgctcgggcgaatatacggcggcgggtctgccgaaccgccttgttccgccgttcgacgaatttgacggaaaaacgtggggcataatcggttacggcaatatcggcaaaaaggttgcggatatcgcgcgcgctttcggttgccgtgttatcgcgtatacgcgcactccgaagcccgatgtcgaatgcgtggaacttgacagtttactcggcgagagcgatatcatatccgtgcattgcccgctgaccgacgcgacaagagggcttatcggcagagaagaatattcgaaaatgaagaaaaatccgttgcttataaacgttgcgcgcggggcggtgcttgataacgacgcaacggttgaggctgttctgaacggcgttctcggcggctttgcttccgacgtttatgacaaagagccgttccccgcagaccacccgtatgtaaagataaaggacatgaaaaacgtgtgtttcacacctcatatcgcgtgggcttccgttcaggcgagaacacggctcgttgccgaaatggaaaagaacgttgccgcgtttctgaacggagaaaaacggaacagagtggtataaaatggaactgacttcgatgaaagaactccgcccgcttatggaaaagcacggtttttcgttttccaaaacgctcggacagaactttcttataaatcccgatgttcccgtgcgcattgccgaaaacgcggggcttgacgaaaatacaacggtcattgaaataggtcccggcgtgggttgtctgacaaaggaactttcctctcgggcaaaggaagtttttgcgatagaaatagaccaaagacttatccccgtgcttgccgaaacgctcgccgactgcgacaacgtgacggttattaacaaagacgtgctgaaaacggatctttccgctctttgcgagggaaaagaacgtgtctgcgtctgcgcaaatctgccgtattacataaccacaccgataataatggcgcttctcgaacagcggcttccgctttcgcgtataaccgttatgatacaaaaagaggtcgcgcagagattttccgcaaaaccgggaaaaaaggaatacggtgcgatcaccgcggcaataaactggtatgcgagaccgaaaactctttttacggtttctccgggctgttttatgcccgcaccgaaggtcgaatcaagcgttatcgctcttgaccttgttcctcctccggttgaagtgaaagacgaaaagtttatgtttttgcttatctccgcaggttttgaacagcgcagaaaaacgcttgtgaacgcgctttccgcaaaaacgggaataccaaagaccgagatagaaaaagcggtgacggactgcggctttgaacccacggttcgcgccgagagactttccgtgacggattttgcggcattgtcggacagactgataacacagtaaagtgaaaggaacggttgatatgactgtttgcgaggacttttacggaagaataaatgctttcgttacaaaaaaactcgacggatatacccccgcgccgacctcgggcaaggtcattcacgacactatatggggttcggtgctgtataacggatgggagatacagataatcgactctcctctttttcagcgtctgcgcgacatacgccaactcggacgcgccgaaacaacatatccgtccgcacaccatacgcgctttgaacattcgctcggaacgaccgccatcgcgtcgcgaatgatagataaacttgccgagcgcagcgcgggacttgaaataacgcaaagggacaggaacaaggtgcgccttgccgcgcttctgcatgatgtggggcattgcttttactcacatctttccgagaatgtttatggaaacgcagagtcgtttttacaggtcagagcggacatagaaaaagacctcgacgagggaatacatccgaaaccgcacgaacttttttcgtatatgataatacgttccgaagcgtttctgacattttttgccgaacatgtggactatcccgaaaagggtgacagggagagctgccgtgctcttttgaaagaatgtgcgaacatggtcgtgggacagatgaacaggacgtgcgacgagaacggaaacacggtcgtttatgcgttcatgacgcagatattgaacggcgatttcgacgccgacaaactcgactacacccagcgcgacagttatacttcgggcattgccctgacttatggcatagaacgtttcctgatgaaaatagttctctgcaagattcaaaaggactccgaaacgcggtacgaacttgcgataagttccgatgcggtcacaactgtggaagaacttatattcaaccgcaatatgctttatgtttatatgtaccgccatcagaaagtgcttgcggcggaagcggctgttcgcgacgttatacacggcatggtcgcctgcggtattctttcgcacccgtgcgattttcttgaatttaccgacgacaggatagcgacgcttgacacctgcgaccttgtgccgtatcccgacatcgcgcccaacagaactctcggcgacatgatacggcttatcaaccgccgcgcgctgccgaaacgcgcgtttgaacttcgagggtcggacatcgaggttatttccgcagacgagctccgccgcgaatttacggataaaacgctgaaagccattgaaagcagtatatcggaaaacgaaaaaatagcggcgcttaaaaattttgcggatgagtatacggaaaattacagcgacgacgaacttgtttttgccgcgctgaaaaaactttcgaaacgtctcggtttcgccgactacgacggttacatgaccttgcgcgaaaaacttttcgaaagacttcgcgacgaatatgaaaaagacggcgaaaaagcccttttcgatgtcttcgacattcacatcgtgttcccgccgctttcgagcggaaagacggaatttctcgttctgcggcgcggaagcctgacccctgaaataaaccgatttgagtatataggaacatggtcgcgggcgttcaatgcctccaactatcggggttatgtttttgtttcatctgcggtggacagagcatttgcgggcgcggtctgcacagaattcttcggcgaatacggcgacggcgttcatataaaagaaaaaaccgacgaacatcaaacggaggaacggttatgagaatagataaaataaattattatcttgacattgcacagaccgtggcggaaagagcgacgtgcatgagacggcgtttcggctcggtcatcgttaaaaacgacgcgataatcagtaccggttacaacggcgcgccgagaggcagagcgaactgcaccgatctcggatattgccttcgcgagaagttttccattcccacgggcacacgctatgaactttgccgctccgtgcatgcggaagcgaacgccataataaacgcggacagagaaaaaatgataggctcaacgctttatcttgcctgtctcggcaacgacggcagcgccgtgcccggaacggacagttgcatgatgtgcaagcgcatggtcatcaacgcgggtatttcggaagtctatgtccgagacaccgcaacggagttccgccgcatagacgtaaacgattggattttgaacgacgattcgctctccgtgcgcgaaagcggctattgattttaagttgtcgcagtccattcacggtttgtgactctgcgtttcgaaaaccgtcgctttgcgcgaaaaggctcgaccacaatatatagtgttcgaaaaatttcgtaccgactgcggacggaaaaatttttcggaattatactgtattcggttttgagaaaaaaaatgatttttcgggcggacaagcggaaaaattcgttaaatattacccgaaaaagttttttgcgtttttcaccgactttgttgataactctgttgaaaaggtggaaaactcgcttaaaaacagaacttttttcgtgttgaccgaaaaaatacgacagaaaaaaaatttttttgacatattgacacaagatatcggagtttggcatggaactgaaaaaaattctcgacgcgctttccgaaaacgggcttttgcgcggcgaatatgaaaaattcggaaatatcggggttttgtccgtaggttgcgattcacgcaaagtgacaaaaggacaactcttctttatcaagggcgcgggttttcgcgaagaatttcttgtttccgcgctcgaaaaaggctgttgcgccgttatcggagaagaagaaagaactctttccgttccgtatatccgcgtcagcgatgtccgtgcctcaatgcccgtttgcgcaaacgtcttttacgatcatcccgcatcaaaatttccgcttgtcggaataaccggcacaaagggaaaaacaacgtgcgcgtatatgctccgtaacatatttgaagaggcattcggcaacaaagtaggaatgatctccaccgtcgaggcaacgtcctgcgggcgcaacatacccaaaagcggcacgacgcccgaagcgcttgaactttactcaatactgaatgaatttgttcatgacggcgtaaaagcggcttgtatggaagtttcatcgcaggggctggcatataacagagtggacggcatagatttttttgtcggcgcgtttttgaacctcggggaagaccacataagcccgaccgaacaccacagttttgaagaatacaaggcggcaaaaatgcggctgatgacgctgtgtcggcacggggtggtcaatattgacgatgcggcggcgcccgattttctgaacgccgcgacctgcgaaacgatgactacgataggcattgacggcgaatgcgatctacgcgcctgcgacgtgacgcagacaaaaacgggaatagatttcaccgttcgcggaaaattttttgacggcgaaagattttcgcttcgcattccgggcaaattcaatgtttacgacgcgcttgtcgccgttgcttccgcggcgctttgcggcatttgcgcggaaagcgttcggaaaggtcttgccgaaacaaaaataccaggaagaatggagattgtcgagaaaaaagggataacggtcatcgttgattacgcccacaatgaactcagttttgaatctgttttcgaccatatagaaaaattttatccgaagtcaaaggtcatctgccttttcggctgtcagggcaacaaagcgcttgaccgcagaacgcagcttccgcaggtggtcggacatcacgcggattttgcggtaataacgacggacgaccccgaaaacgaagatccgaaaaacattcttgacgaggtcggcgcggaaatggagaaaacgcccgttccgtttgtcaagatagaagacagggaaaaagcggtcgaatttgcgattgagaccgcacagaacggagatgttgtgtttctttcgggcaaaggccccgaaaccacgcaaaaagttcacggaaagaccgttccctacaaaggcgatatgacctcggcgctgacggcgctcgaaaagaaataaatcttgtacacacgaataaaaacatatatgtaaaagagtttaaggagtaaaacaaaatgaagtattcagttattctgaccgacggcgcggcggattatcccgttcccgaactggacggaaaaacgccgtttgaggttgcgaaaaagccctgtatcgacgcgcttgcgaaaaaaagcgaactcggtatgctgcacgtcactcccgacggctgcaagggcggttcggagataggaaatctttgcgttatgggctatgacccgcgcgtttaccttacggggcgttcgcctcttgaagcaagaagtctcggcatagaaatgagcgaaacggatcttgctctccgctgcaatctcgtgactctttccgccgacgaaccgtatgagcaaaagacgatggttgacaacaccgcgtccgaaatatcgaccgaggacgcaaaggcgctgatggacgatgttcagaaagagttcggctcggaactgatgaccttttatgcgggtatcagttacaagcactgccttatcatgcacaacgccacggaaaaaatgtcgttcaccccgccgcacaacataataggaaaaagcatttccgaatatctgccgaaaggcgattactgcgaccttttgctcgatattcagaaacgctctttcgactttttgacaaaacacccgataaacgctgctcgtgtcgcaaaggggcttaaccccgcaaattcgctttggctctggggacagggcagacgcatgagcctgccgtcttttgaaagcgtgcacggcataagcggcgcggcggtcacggcggtagaccttataaaaggtatcgcgctttgcgctgatatgtcccttgtcgatgttgacggcgcgacgggcaatctccattccaactttgacggtaaggcgcagacgtcgatagaatggttcaaaaaaggcgttgatcttgtttacacgcaccttgaagcccccgacgagtgcggacatcagggcgacgttgcgggaaaaatccgctctatcgagataatagatgaaaaaatagtcaaaccgatatacgaatatcttgtttcgacgggcgaggatttccgcattctgataacccccgaccacccgacgccgcttacgacgcgcggtcacgcctccgacgatgttccgtatatgatataccgttccgaccgcgaggttgacggcacggcaccgttctgcgagcgtgtttgcgcaacgacgggcaacttcatcgacgagggctttcatgcgataagtcgaatgatgaaagactgattaaatagcgtttatacgcttaaaaggctgtccgcagtttgcggacagcctttttctgtatattgaggaaattttttcttcccgttttaatgttttcttcttctgtattcgccgggcaacattcccgtctcttttttgaatgcgttgtgaaagcccgtatacgttgaatatccgacggcgtaagcaacttcttccacagacggcatcggtttttgcgaaagcaggcgttttgcttcgtcaatgcggagttctgtcaggtatttataaaacgtcgttccgtaatttttctcaaaaatgcggttcaactgtcgggcggaaacgcccgctttttccgcaagcgtttcaagcgaaatatccgtttggaagttctcccgtaaatagcgttcgacaaatatcaggcgcgtctgcggcgttcttgttcttcccgcaagcgttttttcgccgtcatcggaaatacggacggtcagcgcggcaagaaaatcgtaaagttcgaatatggtctccgtcgcaacggcttttagccgcgtggcatatcctttttcttttgccccggacacgcaaagcccttttttaatgagtttggcaaggtcttccgctctttcgagacaaaccggctctatcgcgtcgaaaaactccgaaaacatcggaaaaagattttcttcctcttcctgttcgcctttttccgcgataacggagaatacggcggcgtttccgttcactgttttcgcttccgcgtttttcgataaaacaagaactccgttttccgaaacggtaaacgcctttccgtcagccgaaacgcagacttcgttctctgcggcgcagataatgcttaccgcgcctgtttccgacggaagcgcatcggaaaaaacggcggaaagcttaatgcccgccgtttcgaatgtgaaatttccgttttgtaaaatgctgtttttcatctttatttttgcggataatcaaatccgagatgtttgtatgcggcgggagtgaccaccctgccgcgcggcgttctgttgatgaacccgagctgcataagatacggttcgtaaacgtcctctattgttattgcctcttcgcctatcattgcggcgagcgtatcgagtcccacggggccgccgccgaacgaacgtatcatcgcttcgagcatatttctgtccgtgttgtcaagccctatctcgtcgatgttgagtttgagaagtgcactttgcgctatctcttttgttatcgttccgtcgcccattatctgcgcaaaatcgcgtactctttttaacagcctgttcgctattcgaggcgttccgcgtgagcgtgacgctatctcctccgcgccctgcggctcaatttttatcccgagtatgtccgcagaccgcgtaactatctgcgcaagttcttttaccgtgtaaagttcgagcctgaaaagtacgccgaatctgtctcggaacggagaggtcaactgtcccgaacgtgttgttgcgcctatcagcgtaaatttgggcagatcgaagcgtatcgagcgtgcggacggacctttgccgatgattatatcgaactcaaaatcttccattgcggggtagagcacctcttccaccgttctcgaaagtctgtgtatctcgtcaatgaaaagaatgtctccctcctgcaaattcgtcagcagagccactatgtcgcccgttttttcgagcgcgggacccgacgttattcttatcgaaacgcccatttcggcggcgatgatatttgcaagcgtcgtttttccgagtcccggaggtccgtagagcaaaacatggtcgagcgcgtctccgcgctgctttgcagcctcgatatagactttcagaagttcttttacattttcctgtccgacatattcgtcaagtctgtggggacggagcgaacgctccgtttcgtcttccgcagatagggtgcgtgcggacaaaagtctttcgtcaaaatcttccatacggttttatccttaaattctgctgagcaggcgcaaagcctgttttaccaagtcgtttacgttttccgcggggcatttcgcaaccgcgtttcttgcgtcgtttttcgtatatccgagcgcggcgagcacttccaccgcttccgctttcgcgtcgctcatctctcccgccgtttcctgcgagaatattcccgctcccgtgtcgggcaggtcggaatgcgctatcttgtcacgcaaatcgaggattattctctgcgccgttttcgcacctatgctcttgactttcgaaagccgttttgcgtcctgtgtcgcaagtaccgcggacagttccgacggtgtcatgtcggaaagtatcgctatcgccgctttcggaccgaccccgttgactccgagaagcatttcgaaaaatgttttttccgtttcgtccgcaaagccgtaaagttccattgcgtcttcgcgaacgctcagatatgtgaacagttttgcgcggctttttccgcttatctgcttgtaagtgttgagtgttatcgcgcatttgtaaccgaccccgccgcagtctatgaccgcggtcttcaagtcgagataccctatttccccgttgagataataatacattttttataccctgattttcagatttctcatattcatgctgttgccgtggcatatcgctattgccaacgcgtccgccgcgtcatcgggtctcggtagtttcggcagattgagcagtctttgcgtcatcagcatgacctgcatcttctccgcgcgtccgtagcccacgacagcctgcttgacctgcaacggcgtatattcaaaacattcaagcccttttttccgtgccgccaaaagcaaaacgccgcgcccttgcgcgacctttatcgccgttgtcgtgttcgtgttgaaaaacagttcctcaaaagcgaccgtttcgggcttgtagtactcgacgagtttgctcatgtcgtcaaaaagttgttcgagcctgtcctcaaacggcgtttttgcgggggtctgtatcgcgccgaaatcaacgcaggtgaatttgctgtttacatagtccacaacgccgaacccgacggttgcgtaaccggggtctatgcccaaaattctcattccgtcagcgctgctcctttgtgaactctctgcgtatgcgtctttcgctgtccgcttttgccgcggaatcgcgcttgtcgtaaagctttttacctttgcaaagccctatttcgagtttgatgacgggacctttcaggtaaagcgaaagcggcacgagcgtctgtccgtcgagtttgaccgcttcaaaaagtttcagtatttcttttttgtgcatcagcaaccgacgctgacgcagcgggtctttgttgaagatgttgcctttttcgtaggggctgatgtgaagcccgttgacccatatctgtttgccgtccgtggtgcagtaactgtctttcaggttagcctgaccgagacgcagacttttaacttccgttccgaaaagttctattcccgcttcgtacttgtcaagcacaaaataatcgtgatacgcttttctgttttgcgcaagttgttttattgcttttttgtctttattcatcggtttctccgtcttcgttcacgagattgtagcaaaggtgcatcagcgagtccccgaggtggacgttttccacctgtgcgccgggaacgtcgagctcgacgttcgaaaagttccagaacccgcgcacgcccaatccgtaaagtttatgcgccgttccgaccaccgcatcgcgcggaacggtcagtattgctatgtcgggcttgttctttttgcaaaactcctcgattttttctgcgggaagaatctcgttgccccgtatggtctttcctatcttttccctgtcggtatcgaacagtccgataaggtaaacgccgcgacggtcgaatttcatgttgtttgcaagcgcaagccccatgttgccgagaccgacgattatcgcctttgtgtgtctgtccgctccgagcagatgttttatttccgaaagcagattttctatgttgtaaccgtaaccctgctgtccgaacccgccgaagcagttcaagtcctgccttatctgcgacgcagtaatattcatcttttcgctgagttctttcgaagatatcctcgtaacgccggaaagactgagttcgttaaggtatcggaagtatctcggaagccgtttgatgaccgacggcgaaacggttctgttcttcatttttctctcctgttccgacgaaatattttcgcaacgtgatattatttttattatatattattttattcaaaatgtcaagtgcgacggggaaaaggatttagtttttgcgaaaaaagcctccctcccggattccggacacggagacggcgcggacaaacgcggattttttcggaaaaaaccgccgaaagcgtgaagtttttatattattcgagtcttttccgttttttgaatgttgattttgccgcaaaagtatgctattatatatccgtataacgtttgctcattatgcagaacagtttgatttaagctcttttcggaggtgacggaaaatgaaaaaaaccgacgttttgttctcttcccgcaaattcagaacagttgtttttgcctgcggcgcggcgtttttggctcttgccgccgtattccttttcctgttcttccgagagggcgggttcggcattctttttgcaaaagcaaaagatttcaaagttgttatgagtgcggacgaacacgtttttgacaagataggagaaaagtttgttctttccgcatctcttgaccccgacgacggcgttgaactcactttttcttcgtcgaacgaggatatagtcaacgtgaccgccgacggcaccgttacgtccttaaaaggcggtgtggcggctgtcaaggcttcctgcgagataaaaggcgaagaagtattcggcgtttgtgtagtcaccgtcaatgcggcgcagaccgcgggcggcaacagcggcaccacgggcggtgacagcggctatgttcccgaaattcccgaagccgagttcgacaaggacggctttttgagcggcgacaacttttttgaatattatcagatgaatacggacaccgtggcgtggcttcatgttcccggcacaaatatcaatctgcccgttgcacaggcgccgatgtccgaccccgaatattatctttcgcacggactgaaccgttacaagaaatacagcggttccgcttttgtcgattcttcgtccaaactttcgcgttacggcggttttgtcggcatttccgaattgaataccgtggtttacggtcacgctcgcggagacgatatttttgaccaactcgaaaagaacttggtgctctcttcatggtttgaaaacaaagaaaacagatacgtttacgtcaacacggcgaccgaactgacaaaatgggagatatttgccgtatattacacggattttgccgttgacagcaacaaaaaagccgttacaaggctgaattatatgctgacgaccgaggaactgaccgaaaagtacggcgaagattaccttgccgcacaggcgcttgcggggaatcttgaaaaactgatgaaaaacggcgcggaaatggcacagacggcaaactcctggcgtgacagaatggacacgacaagttaccgttacggcgcgttttccaagtctctgggtgcacgcgattggggcgtaaccgttaccgaaaacgaccgcataatatctcttgtcacctgtgccgataacgacaccgacgtgcgcttcgtcgttcaggcaaaactcgtatcgtccaaggacagaacgacgggaaaaataacaaattacggaggttgacgctatgtccagagcagacggaaaagccgaaagagaccgcatcgaagcagagcgtgccgtccgtgaagcgattgcggcaaaacaggctgcggcacagtcttcttccgtgccgaaaagacctgccgaaacaactgcggaacgccacagaagaattgctgaaaagacccgcgaagcattcgcagaacttgacgagatagacccacctaaaagaaagcccgttacctcttattccgaaacggaaaatccgcgcacggcggtttcacgttctcggacggaagtgcaaccgcggcaggcttcttcacaatcaaacaggaactcaactccccgtcccgcaaaccgaaccgcaacgggcggcaacgcgcagcgaaatgcaaaatcattttccgagcctcggataacttcttcaaaaaccgcttcacaaacgcagcagacaaacggaaaagaaaatgctcaaaaaaagaaaaacggaccattgactattgttatttttgtggtttgtctttgcgtcttcggcttttcggcatataaagtggcggactactttatctctgcgcatatccgcgattcgggctaccgctcaacgataggcgatgtcgaaaacatagacggtcaggttcccgattggggcggaatcgtcgataaccccgcaaaccacggcaacggcggcgattcggacacgaaaaccgaaataaaggtcgttcccgttgaagatgtcgatataggagaaatcaagtatatagatacaaattattcaaaacttaaacaggagaaccccgacgtaaaaggctggatatatttccccggaccgtcttccatatacggactaccgataaacgccgcgctggtgcagggtgacgacgattatcattatcttgactacaacgcaaaaggcgaaaaggattccaacggctgtatctatatgtccgcagggattgaccccgaccttgtgaacaactcaaacacgatgatttacggccacgcaaaaaatccctatgcgtttgcgggactgaaatatctgaacgacgcaaagcgttggtattcggacggaaacaaccatttcatccgcataaaaacggataattattactccatctggcagatattctcatggtacgagagtacggacggcggcgattttgaccgcctttcaaccgataattgggcggaatactttacctatttgcagggacttaacgagatcccgtctctcggaaaattcgagttcaaagacgaagataaaataatttctcttgtcacctgcaagggcttttccgacggcagagtggtggttcacgcaaaacttgtcagatattcgcccgtttcgggttgatttgacagacacgcacttactttttgcctgtcggcggctgttcatcctttcggaaaaatcttgaaaatgcaaaacatacaaaacggcagaagttgttttcggtacaactctgccgtttatcttttttgtccttttcgatttatatttattcatttttttataggaacatggagtcttttattaacgatttccgtcgggtatttgttgtgttctctttatatattctgtactgtttttagaggtgaaaaacgttctttctttttgtctccgaaacaatgcttttcctttgccgaggtcggttctgttattgtccgactctgttcgccgtcaggcgctgctcctcttttgctttctgcgcatcaaatcccgaaaaatgccaaaaaaaaccgcttcgggcaaaaacttccgaatttattccgattttgcaaaaaagtttgcattttttgtgcaggttgcacaatggatttaattgcaaaaaaagttttacaaacgtatatattgcgtttgcgtcccgtttttcggcgttatttttccacatcttgtttcggtgctgtaaagtctgcataacaagtgacaaaaaacgcaactgaaaaatatactaaatgtaaaaatttaaacccgaaaatttgtgctgaataaccaaacggatatgccttgtcgggggcttgcgaaacggcggcggaaaggtcgaaaacacgggtttttacttgacttttgagcaaaaaagtattataatatatgcatatctgaacgaaaatgtttttgtgctttctgcgcaatacggcatttcggcattcaaagagaggctgcggaagtcttttttgcgatgccgagggtgtcgtgttctcttttgcgttttacacgcgtatgcgcacgcgaaagcccgacggtttttctgtcggccctttttcgacagaaaaagcgttttttatctatcaactcccgggcgcgtgcctgagaaaaggaaggtgttcccaagtgcgaaaatcaaggatccttgcagttctgttgacaattttgctctgcgcacaactctgcgcggcttgttcgtcgagcaataaggacagcgatgagatcaacatcgaaacaccgttcgttcccgtttattcggcggggtcttacggtgagtttctccaacttcaatcgagaactctcgacgacgttgatttcactctctacaaggacaacaagaactacaacgtcggcaagtacggtttttatccgataaagaccgaacagggcgacaatgccaacccgataacgaacatcaagtcttcgggtgacctcgacgacaattccgtcggaaagttcaaggacgacgacggcgttgagagagttgcggttcacacaagcgaagagggtttcgtcgaatggacgataagcgttccgtcggcgggtctttacacgctcggaatcgactatatggcggataaatcgaaagcgggtattctcgaatattcgatttacgtcaacggcgaactgcaatatacagagtcgagaagtgcggcgcttgacagaacatacgttgataaatatgcattcgaacttgaagaaaacggaggcaaactgaccgacctttctcagcgttttgagccgaagtccgagtattactacgacatcgactccgagggcaacgaatcgagaggcgttcaggaacagcgtcaggtctggaccgacaacagcactttccacgattccaacggttcatacaccgttcctcttaaattttatcttaaaagcggagaaaacgtcgtaagaatttcttccgttcgcggcgtttcctatatttccgatatttatttctataccattccctcgaataacagatatacggactatctttacgaaaaacagggcagcgaagtgaactcctccgatgtttccgattggacgagttccaaacttcaggcggaatatccgacctccaaatccgacccgatgctgttctccactttcgacagagcgtccgctttcaccgagcctcccgcttcgacaaacattaaacttaacataatcggcggtgagcgttgggagacggtcggacagtggatagaatataccgtcaacgatattcccaagagcggtctttataagatagcgattcgttacagacagaatctttccgcaggtatctttacttccagagaaataaccgtcaacacgggtgccgagggtacaaagggcgaaaactttgacgaatacatagttcagttcccctacggcggcaactgggaagttacgaccccgaccgattcttcgggcgacgcttctcttttctggtttgaagagggaacgaacaaaattcgtcttaaagcggtaacgggcgaacttaacgaccttatcaacgcctgcgacggaatagtaaggtctcttcagtccgattataccaagatcacggctattacgggcggcgaaccggacaccttccaggattacgaccttgccgagaccattcccgaagttatttccgacctgaaatctcagggcgatatgcttaatcagatatacgaaaaacttctttccgctcttaacggagaagagggacagtataccgcgcagataaagcagatagtaaacgaactttatgtaatgtatgatgaccccgagtccatcacgacttccggcggtctgagaaacctcaacagcgcgataacttctttgggagactttgttgagtcgtgcagcttgcagcccatcgaaatagactacattgaagtccttcccgcagatgcggaacttcccgcagccgagggcgacgcgggcaaatccattttgcaccagttcaaaatgttcttcgcgtctttcttccaggatctgaactccataagcggtgaggggcaccccgagtatgaagaagaggttgagatctggacgacgctttctcgtgactatgcgatattgacccgtcagataatcgacagaggttttgtaaatcagtacggaattaaccttacatataaattattccccggccaactttcgtcttcaatgcttgcgggacttatatgcagcgcgcagacaggtgtcggtcccggtacgattcaggactatgcggcgcgtcactcgatgtatccgataaatacctttaaaacccgcgacaaggatatttacaaaacggatacgaagaccggcgaaaagacatatctgaaaacgataaccgttcccggcttcaaggatataaaggaaagatacgacgattcgttctggaacggcgttaccgttgaaatgtaccgtgaatacggcaacgttgacgccggtacggcaaaccttatttacggcgttcccgaagttctttcgttctcgcttctttattaccgtgaagatatatttgataagtataatcttactattcccaatgtttgggacgactactatacttatatccccacacttcagaaatacaatatgcaggcggaggctccgcaggcaggcgtgatgatttaccaatacggcggtttgatgtataaatacgataacagccgacaggtaaatgcaagagcgtccaacatcgacagcgacctttatcttagactgtttgataaacagaacgctttctataccgaatataaatgccccataacgatggacggtcacacacgtttcagaacgggtgaagttccgatgataatcggtacgctgagcacatggaaaaacctctatgcgcaggcacccgaaatcagaggtctttggaagttccacattcttcccggcgttgaacaggaagacggaaccgtaaacagagaacaggttccgaccgttacatactccgcaatttacgccgcaggcgcaaaccatgacggagcatgggaatttatccaatggttcaacgactatgaatgctcgaacgaattcggacgtgaagtcgaagctcttatcggtcaggttgagcgttacgcttctgccgtaaaagaagctttcaaaatggctccgtggacttcggacgaacttaaagttcttatggcaacatgggatactttgagacccgcagaggtctgctttggcgactactacggcggaagatacataggctttgcgcaaacggaagttatcgttgacggtacgggagacggtcatgcgaccatactcgaacacatgcaggaaataaacaagtccatcacgcagaaacgtgaagaacttaatcttccggaataaattaaggaggaaggctgaaaaaatatgaaaatcacggcactcaaaaaaccgaagtttttaagcccgaagtttttgaagaaatttgagaacctcgacctgctcttcttcctcggtccctacatggtggtgttctttgtttggacgatacttcccgttatcgtttcttacttcatcgcctttatgcagttcaacaccattgagttccccgtctgggtcggacttcaaaactatcagagactgttcctttccgaggaatacttcactctctgtttgtcgaactcgcttgttctcggtacgctttcgggcgttatcaactaccttttcgctttcggctttgcttggatactgaacgaagttccgccgaagccgagaacgatactcacccttttgttctatcttccgtcgatgaccggcggcttcaccgtcattctcgatatgctcctttcttccgaccgttacggctggctgaacggctggctgatgcaggcgggcttgatacaggaccccattcagtggtcgaaagaaacggaatatatgctaccgcttgcaattatcatcatgctttggag

SEQ ID NO: 3682 - DNA, 10889 bp, Unknown
  16S sequences of unknown bacteria
gatgccgatatattttaagagatcgcccaccgccatcttctccacaatgcagcaccatggccagctgagagcccatccaggcgccgatcagggcgccaacagcgctgtataaggcggttttcaaatgcacattgccgcttttgaaatatttgaaagaggagacgcaggtgcccagagcggcggaaaacttgttgcagccataggcattgatcatgggcaggccggcgaaaacataggcggggatggagatcagtccgccccctccggccaccgaatccacaaatccggacaagaacaccaatgggcagacgatgagtagtgcgtgcagactgaaatccataaccaaaatcctctctttttcaagtgaaagcaaacctcatttatcataaatcaaaaatggcgccctggcaaggtatcgacgaaaaaagtctttgggaagtctggatttctaaggcttttcaaattgccctaaaactgattggattggagagagacgctggcccagctcttcatcaacccgcaaaaagccgcgacctgtgcgtggcttttttcacttctcaaggggcaagtgcgggccgaaggcgtgcatatatccccttgcaaaaactcggaaaagcggcaagggccgcttttccggcatacaaaaaagtccttgggaagtctggcttcccaaggacttttgtatgtcagatctgaatggcttccacctggcggtggtttttatctcctttggcaaaatacagctgaaacatccctttttccattcccaggctgttggccgcggcgatggcctcctgctggttcatttcgggcagcatcaccgagatgccgcagctttgggacacttcccgcagagtgggaatgacggtgatggaatagcggggccggaggatcttctgggcctccatggccgaatgggtgttttcaaaggagatcacataaaattctgtccgttccatcagacgcgcatcatcttgccgcaagcggtgacggcttccagaatttcatacatattgctcacagtgccgcactggagcttgtcggtgatgccgaagaagttcaggcaggtgccgcagaccatcacccgggtgcccttctccatcagtgttttcaggctctccacgatctgctggttttcacagggcagcatgacgccttcgttcataaaggcaatgacagagggcggggtgtccatctgggtcagggtgtagaaatacatattgatcaggttgtggcccagctcattgtcggcggaaccgatgcggttttcggtgcagaaaatggaccaggaacggtcttcataggcctcggctttctgcacatcggcattggggtcctttttcagggtgacggtgtaaacaccgttgtcttcctggctctcatgggtatagcccacgctggcggcaaaacggctcaggttctgcacggcggtggggttgtccaccagggtctggatctcttcttcaccgttctgcacggcggccttggtcatgaggacgggcttggggcaggcttcgccccgggcatcgactttatacattggggaaccctccagtttcaaaaaaatccggacagggacaaagaccctgtctcctggtttcattataacagccgggtttttccccgtcaatcaaagggagggttctatcgaaaagggcgataaaaacaggggcttttatcgaaaaatgccggcttcagctgccgtagtcctccaacagcatctggagttcttcttcgttgcgcaggccgatgccctcttttagcatttcccggtcctgctggggaagaacggctgtgtcaaaatcggtgacatactgaggtgtctgggcctccatagaagaatagacggcgatttttccctgataatcccgcaccacatattgatacagggccttttccaccggctgtacctccaccttctggctttgatgggagacggtctggaggggggaagcctcttcgggacgggaagaaacgagggcggccatccccatggccagggagaccgagaccagaccccccaggataaaaaaacggcttttggcagcggtcatcgtgattccacctttccggtttgtctgctgcttattttttccatgaatgggggtctttatacaaaagttttggattttttcccgaatctatgttataatgtaaaccgattattgtatctgggcagggaacaaatgcccctgcgcattcgtctcaatcagaaagatacccggggaggcctcagggcccttctcccacaccccggcgaaaggagaacggatctttggataagcaactcacccccaatgaaggcgcaccccaggaaaatcagcgcaaaaagcggaaaaaacggaaaaagcaccgtttgttcggcatgcgtcccattccctttgtgctgctgtccacggtgctcattgccattaccaccgtggccatctgcggcatggccttcgccctgtatgtgaacaagtatatcaaccccaccatcgatatcaatctggacgatttccggctgaatttcaccagtttcgtcacctatatcgacagtgagggcaacgagcaggtgctggaggaactccacggcagcgaaaaccggatctgggccgatatggatgagatatcaccccaactccagcaggccttcgtggccattgaggacaaccgcttttatgagcatggcggcgtggactggaaacgctccatcggcgcggccctcaactacattgtgcccttccgggacaacttcggcggcggctccaccatcacccagcagctgatcaaaaacatcaccggcgacgacgagacttcggtgaagcggaagatcacagagatcatgcgggctctggagctggaggataaatacgaaaaggacgatatcctggagttttacctcaacaccatctacctggggcagaacgcctatggcgtcaaagctgcggcccagacctattttggcaaagagccctcccagctgacgctggtggaatgtgccgccattgcgggcatcaccaaaaacccctataagtatgacccggtgcgcttccccgaattcaacaaggagcggcgggacctggtgctggagcagatgtacaaatacggctatatctccgaagaagaaaagaatgaggccatggcccaggaactggttctctatgagcccaccgaagaagaagaggacgaggaagtctggtcctactttgtggacgaggtcttcaccagtgtggtggaggatctgatggaggaaaagggctacagtcagacggtggcccgccagatggtctataccggcggcctgcgcatcgtcagcaccatcgatcccaatgttcaggccaagatggacgctgtgtttcaggatgaggacaacctgcccggcgtgctgggcaaggacggcaccatgccccagtgcgccatggtcattatggaccagcacaccggcgaagtgaaggccctttatggcggacgaggagagaaggagggcaacctggtgctcaaccgggccacccgaaccacccgttctcccggttcttccatcaagccggtgagcgtttatgccccggccctggagatggggctcatcaccccggcctctgtgctggacgatgtgccccaggatttctccatcaagagttccggctggcccaaaaactccaccaacggcggcgtgtggcaaggccgtatgacagtgaaaaaggcggtagcggtttccaacaataccatccctgtggatttggtccaacagatgggtgtggatgcttcctttgattttgccacagaaaagctgggtctgcccttggaagagggacgcaccgtcaccgataaaaagggcaacaccagtaccgtgtccgataagggcctggcgcctttggctctgggcggcctgaccgacggcgtttccgtgttggatatgaccgccgcctatgccgcttttggcaactatggctattacaacgagcccaaggtctataccaaggtttatgactcccagggcaatgtgattttggacaacaccggcgagacggtggaggccatgagccagaaaaccgccgactatatgctggatctgctggtgaatgtggtcaccggcccccagggcaccggcgcacgggccaagatccagggcatcgaaaccgcaggcaaaaccggtaccaccgacgatgattacgaccgttggtttgtgggcatgaccccctattataccgccgctgtgtggttcggttacgatactccccaggtggtcaagggtgtgagctccaacccggccctggccatctggaaagatgtgatggaggatgtgcacgccgatctgcccaatgccgagtttgaccggaagacggccatgaaaacggtgtatgtctgcgccgacagcggtctcaaacccacagaatattgcagcagcgatatccggggcagccgggtgatttcggcccgtgtggcggcagaggatgtgcccacggccagctgcgatatgcatgtggccgcccagatcgacagtcaaaccggccagctggccaatgactattgcccggtggccgatgtgaagacggtgggtatgctccgcgtggaccgcagcttccctgtttccggcgtacgggtttcggatggaggttatgtgcttcccggcagtgattccagcggctatcccgccgccagcggagcggattcgcccaatcacacctgtactctgcacaatgcagaaaatgacggcaatgccccggtggagcccgatcccaacgatcccaataaccccaccgatcccaatgatccaaacaatcccaccgatcccaatgaccccaacaatcccacggacccggatgatcccaacaatcccaccgatccggatgatcctgatccggatggaggaggggaaacgacacccgatccggaggtgcctcccgctcccgatgacaatcaggacccggggaccacggtgacgccatcctccccttagggggataaagcgaataaaaaagagacccgatcgggtctctttttttattgtttttgccttagccctggaaggtgcgagccgctgcaatggcccggtccagatcttccatggtgtgagcaccgctgacaaacatggcttcgaactgagccggagccaggtagatgccgtttttcagcatatggctgaagtaggcggcatagcggtgggtgtcgcttgtctgtgccgaagcaaaatcggtgacagggccttcggtaaagaaggcgcacaccaggcttcccacctgattgacggtgcatccgggcagggcctgacgcaggccatcggccagatgagcgcccatcttttccaaccgctcatagagggcgggatcgctttccagcttccgcaggttgcaaagtccggccgccatggccaccgggttgcccgacagagtgccggcctggtaaacactgcccaggggagacacctggctcatgatggcctttttgccgccgtaagcgcccaccggcatcccagcgccgatgatcttgccataggtgaccaggtcggcctgtacgccgtagtattcctgagcgccgcccagagccaggcggaagccggtgatcacttcgtcaaagatcagcagcgcaccgttttcgtcgcacagcttccgcagtccctggagaaagccgggagcagggggcacaacacccatgttggcgcccaccggctccacaatgagggcggcgatctcgccgggattttcctggaacagctgctccaccgaagagaggtcattgtactgggccagcagggtatcctgggccgcgccacgggtgacaccggcgctgtccggtttgccgttggtcaaagcgccgcttccggccttcaccagcatgctgtcgctgtgaccatggtagcagccggcgaacttgatgagcttttcccggccggtatagccacgggccagacgcagagcgctcattacggcctccgtgccgctgttgaccatgcgcaccatttccatccccggcaccagacggcagatcagctgagccatctccacctcccggcgggtggcggcgccaaagctcagcccttcctgtaccgcttccatgacggcctgctccacatccgggtcccggtggcccaggatcatgggaccccaggaacctacaaagtcgatgtaggtcacattgtcttcgtcggtgatgcgggcgccgcggccgcttttgatgaaccggggcgcaccgcccacggcgttgaaggcccgcaccgggctgttgacgccgccgggcatcacttgttttgcctgttcaaacagttcttccgatcgtcccatatcagccgatatcccctttcatgatggcgtccgccagttcgttggcatagtaggtgatcaaaatatccgctccggcccggaagatggagacggcgctttcgcacatgacgccgtattcgtcgatgagcccggcctgggccgccgccttgatcatggcgtattcgccgctgacgctgtaagccgccagaggcaggtgggtgttttctttcaccgcccggatcacatccaggtaggaaagggcgggcttgaccatcagcagatcggccccttcccgggtgtcctgcatggcttccttcaaggcttcccgcacattgtggcagtccatctggtagctcttccggtctccgaaggagggagcgctgccggcggcatcccggaaggggccatagaaggaggaggcgtatttgacggcataggacaaaatgggggtgttttcaaagccgttttcatccagggcctgacggatggcggccacccggccgtccatcatgtcagagggggccaccatatcggcgcccgcctgcacatgggacagggcggtgcggctgagataggggagagtcttgtcgttgtccaccgtttccccgcagaggatgccgcaatggccgtgagaggtgtattcgcacatacacacatcggtgatgagatagacctctttgccgtatttctgccggatagcccgcagtccctgctgaacgatgccgtcctctgcataagcgccgctgccttccgggtctttgttggcgggcaggccgaagagcaggaatttgttgaccccgtggctcagggcttcctcgatgccccgggagacttcatcggggctgtaatggaagtggccgggcaggctggggatgggggagcagatcttttccccttcctgcaaaaacagaggcagaatcaggctttgcggactcatgcgggtctcccgcaccatgccacggagcaggggagtggtgcggagacggcgggaacgatcaatcatggaaaaaacctcctatcaatgtatctatcatggaatcgatggtggcttccggggacagagtgacatccatccccatttccgccgcctttttgccggtttccggcccaatgcacagggcgggaagatgggaaagatcggcgccggggcagctgagcaggaagccctccactgcgctggcgctggtgaaggtgagagcgtcatagacccgggggtcgatgtgctcttctcctgcttggagcagggtctcatacacaggcaggatagtgtaggggacctgcatctccttcagggcctcttccagatggggcccggcctttttggcccgggggatgagggcccgatcctccggtgtgaggaagcctgcgaccttcatttccgctcccagggctttgccgctgtattcccggggcacaaaatcggcccgcagcccctgcttttgcaaagcacgggcggtctgactgcccacggcggccagttttttgccaaaaagagcccggctgtccaggcccgcttcccacagcccttcaaagaaacaagccacgctgtgggggctggtgaagagcagggcggtggtatctttcaggtcgggcagggagaagggcagctttttccgtgcaatcgccgggagcagatcggcccgggcccccagctcttccaggcggctttgcaggcgggaaccctcctgtcggggccgggtcaccaggatgcgctttcccttgagaggcagggcatcgaaccagtcaaactgaggggacagggacgccaccttgcccaccagcaaaatggcgggggaagtgacctgttgctcccgcactgtttctcccaggtgggaaagggtggtgaggatggtacgctgatccggccgggtgcccttttcgatgatggccgctggcatctcccgttccatgccagcatccagcaggccctgggcgatctgaggggcggtggacaccgacatgaggaaaaccagggtgccctggagccgtaccagggcgggataatccagcgtcagctctccgtccttctttttgtggccggtgatgatgtgcagggaggagcagaagtcccggtgggtcaccggaatgccgccgtaagccggagcagccagagctgaggtgatgcctgggatgacctggaaaggaacctgctcttttaccagttcttccagctcttcgccgccacggccgaagaggaagcagtcgcctcctttgagccgcaccacatcctggccctttttggcttcttccgccaggatctggttgatccgccactggggcacaggatgctctcccgactgcttgcccacatcgatctttttgcactccgggggaatgaggttcaggaccccttcgcccaccagacggtcataaaccaccacatcggctttttccagggcttcccgtcccttgcaggtgagcagacccgcatctcccggtccggcgcccaccaaagttacttttccttttgtcatttgcccctccttgcagccattgtccgggccagtgtggttcccagttcttctgcgtcggtcacagagccacggatctcatcgatctcccagccctgctcgtcccaatataggcctcgcaaacggatggtgtccccatccacctgggcataggccgccaccggggaggagcagcccccgtccaaaaaccggacaaaggcccgttcacacaaagcgcaggcggcggcatccttgtcctctacttcccggagcagggaacggtcaaaatcctcccggccctggacagccaggatgccctgaccggcggcgggcagcatttcctccggggaaaacaggcggctgatccgcccttccagccccaggcggcgcagtccggcggaggccagcaccaaagcgccgtagtccccccggtccagcttttccaggcgggtgagcacattgccccgcaccggttccacccggcagccggggaagagtttttccagctggatgcgccgccgggcactggcgcagccgatgggcttggtcagatccagctctgtctggccctggggcagaaccagagcatcccggggatcttcccgctgggaataggccaggatgggaaggcgggggtctgtttccatgggcatatccttcaggctgtggacggtgatgtccgcccgcccgtccagaagggcctggtccagctcacggacgaaaaggcccttgccgccgatcttgtccagggtgcggtccaggatcttgtccccggtggttttcatggtaacaagctccacctgatagtccgggtggtgcttttggatgagatcggtgacgatctgggtctggagcaccgccagccggctttctcggcttcccacaagcagttttttcattgttccaacagcctcctgatctgcccagcccgctgggcgactgcggcgtgatcccggccgtcgccggcaacgccgatggtgatgggcccgtcctcaatgagggcggggaaataaaaggtgcattcctcccgccggtcggccacgctgacaaaggccccggcctgtttccccagctgtcccgccagggcgttgacctgccgattgtcggtggcggccaccagaaggaaggcacccttttcgtcccccggggcaaaggtgcggcgagagacggtggcaagcccctgcttttccagctccagaatatccgggtggagggtgggggcgataatgtgaagggcaaaggaaaagcgggaaagggtgcggcaccggcgggcggcaatggcgccgccgccgatgaccaccgcttttttcccctggatatcacaaaaaaggggaaagtggtttttctgctccatgttcagcacccggaggcccgctgggcccgatagctttcccatttgtgcagatcctgacggtatttttccacgatctgtcgggcctgctggagaagcagcgcccgctcccgggtaaattcctcccggcccagggtgtcgatgtcgtaaagggcggctttttcaccgcaggcgggatcgatgtcccggggtaccgccaggtcgatgagataccggggagccttggcaaggcgggagaactctgcccagtccacggtgtagtgggggctggaagtggcgctgaccaaagcgtcaaaacggggcatctcctggtagcgcagggcgtagtcaaaactctccgccccttccggcacctggatctggccgtgcttatactgacgcagggtcatgctcaccgaaaaaccttgttccagcagccgggagcacaccaggcggccgatctctccgttgccgatgaccagcacattgcggggagcatccggagcgttttgcaggatctccaaagttttggtggccaccgatgcttccgaacgggtgaagcgcagggtggttttgatctttttggcggcggtgacggcggtgcggaaaaatacttccagcagcgagtcggcgcaatgctcttcccgggccagggtgatggcgtttttcacctgggtgatgatctgatcctctccccagatctgggagagggcgccgctgcccagaaggcacagatggtcaaagcactcttcgccccggcgcaccttgtaaaggccgcggcagtcttcaaagggcagattggccgcctggcagaacagggcaaagggatcgggggagaagccttcccggcaggaaaggtagatctcggtg

SEQ ID NO: 3683 - DNA, 31058 bp, Unknown
  16S sequences of unknown bacteria
ggggaggcatctccccggcttttcttttctcgtttttctgcgttttgttttcccatagccgccgccaaagagagtttctttctatgaaaaagtatcgaggacgacggctttgttttttgccgcgtcgtaaccgacgcggaccgtctgtcccgaatagttcttcaacttattcggtccgatccattccgcggtgaagagggcgaacgtcctcacgattctactctgtccgccgaaattcatcggcacctcaaagccgaggattctcggccagggcgtgtatatcctttccagtttgacttcctgaatatccgtccattccgtctttgaaaaatagcgatacctaatcagataataaatcccgatcggcataatcacgacaattccaatccctcccatgatggcgagaggcaggaatatataagggaaatcccgagcgccatgcgaagaagacgcgactccctgcgcgataaaagcgcttataattatgccgagcgccaataggactcccatgccggcaaggcaatatatcatccagaatttataatacttcgttcccgtattcttcatattcccctccaatttcctttacccgcgtcccaaaccgcccgaacaaaaaggcggcttcctgcggggacgtcgcctttttccgttttctcaatacgccctcgcgtaaatgatcatatgttctgcctttttgccgcagacggcgcaggtttccgccctttcgccttcggcatagacgcgcgcgctcgcggcggtctgttccttgatcttatcctcgcacccgcggcagccgcaccagcccgccttgacgaaatttccgccttcgacgcccgcgagaatcccgtctatatcgtccgcatagacgattctctcgtcccgacgcgcccgcgccgcttccagcatctctttctgaatattcttcaaaagcgctttgatcccttccgcggcgttttcgagcggcagttccgtcttttccagcgtatcgcggcgggcgcagagcatttttcccgcctcgatgtcgcgcggtcccagctcgatgcgcacgggcacccctttcatttcccattcgttgaacttccagcccgggctgttgtccgtgttgtcgaacgcgacgcggatatccgcctcttcgagctccgccttcaatttttcgcacgcttccacgacgccgcccttgcgcgccgcgatgggaacgatgacgcactgcacgggcgccacgacgggcgggaatacgagtccgcgcctgtcgccgtgcgtcatgatgatggcgccgatcagacgggtggacacgccccaggaagtcgtatatgccgtcttgtgcgttccgtccttatcgagatactgaatatcgaacgcggaggcgaaattctgtccgagatagtgagaagtgcccgcctgtaagctcttgccgtcgtgcatcatcgcttccatgccgtaagtggccacggcgcccgcgaatttctccttttccgtctttttgcccgtgatgacgggaatggcaaggcaattttccgcaaattctttatagacgcccagcatacgctgcgtttcctcttccgcctcctccgcggaggtgtgcacggtgtgcccctcctgccaaagaaattcgctcgtcctcaaaaaaggacgcgtggtcttttcccagcgcatgacgttgcaccattgattgattttcataggcaggtcgcggtaagactgtatccacttggaatacatcgttccgaagatggtttccgaggtgggacggatagcgagcggctccgccagcttctccccgcccgcgacggtgacgacggcgatctcgggcgcaaagccctccacgtgctcggcttctttggtaaagaagctcatggggatgagcaggggaaaataggcgttttccacgccctcgcgcttgaagcgcttatccatttccctctgaatattctcccagatcgcgtacccgtaaggacgaatgaccatcgtgcccttgacgggaccgtaatcgacgagcttggttttcaaaacgacgtcggtgtaccactgcggaaaatcctcttcgatatccgctatctgttcgacaaattgagtttcttttgccataaacgttacctcttctatgtacgggggaaaaattgcaaattctttcgcgccgcccgcagctttttcttttcttaattatacagcaaacgcgcgcaattttcaatcgatttcaggcgcgttttttcgcttttctcaacttgttgcgcgtctttgaaaaaacaaaagcggctcggagagttccgagccgttctattcgacagattttcccgtccgcagacaagctttttctcccgcgttttctttcccctatcctcgcgggaggggaacgtccctaaacgccgcggcttgattttttccgcgcacgaaaaatcaaggcgaagtttctgcccaccttgcaaacgtaactttgcaatccaaactcagcagcccgtcagctcctttctcgtcttggtgctcagccagccgcaggaaaccgaacccggtcccacgtgcgcgccgatgaccggtcccatgatgacgacctgcggccttacgccccatctcgcctctaccatgtccgccagctcgtttgcgcccgtttcgttgtcggtgtggacgatgacggcaaacttcttctcgtccatgggcgccttctcctgggattccagcacgtaattgaacgcctttttcatgccccggcatttgtcgatgactttgagctttccctcggtgtcgaagacgatcatgggcttgatattcagcgccgttccgaaaacggcggaaacggcggacacacggccgccctttttgagataaaacaagtcgttgggaatgatgcagtgctggatccgcagccgaacgtccatcagataatcgtacgtttcctgcgcgctcatgcccttatccctgcaatcgcaggcgagggacactaacattccctgtcctatggtggcggtcaaaggatcgacggaatataagttgaactcgggatattcctttttgatctcctccgccgcctgttttgcgacggtgacggtgcgcgccagacccgaggagatggaaaaatgcagcacgtctttgacgcccgcggcagccattttacgaaaatgttcgagatgagcctcgtaattgagcatggaagtgcgcggaaaggcgccgtcctccacttttttataaaaatcgatataatcctgatagcaggaaaattcgtccagaccctcttcctgtttcccgtttttgtccagcgtaaaagtcagaggcgcaaaccaaatcctgcgttcctctctgtactccttatataaatcgcacgtggaatcggaagatacgtcaaactgtatcatataatctctcccaaaatattcaattttatcatagaaaactatgacaatgtcattataacacagaaaagcctttctgtcaacgatatgcgtgaaaatatattaaagataaattaataaaaattttccacacgcgttcgtccgctattctaaatatatcataaaagcgaaaaaacgcgggcgggcgaagcgttcccgctcttattctcttttaggataacacatacccctctccgtttttctaacggcatcccttttctttcttacggttttgtaagctccccaaaaaaatcccatctcaaaacggctcaatttaaaaactttcccgcggagaagggaatttcgggcgcccctccgccctgctgctccctccaaagaacgggaggcgaaaaacgggacgtaaagggaatcggcaaacaaaaaatttttgtaaagcgtaaagaggagccgaaactttggctcctcttcccccattttttcgccctatgcgggcgtttctcaatgcgcggcggcaagctccttgaagaatgcgatcagtttcttttcgctgtaagccatcagaatcttttgtcccacgcccgccgccttgaatttaacttttttctgtaatccgaacagaccgtttttcacgacgacgtccgttatttcggcaacgggaacggaaaagacgatctctttgtaatcgttattcattttaccgcgaaacgccgtcagcatttctccgtgcagggagagcaggatcagattcgccgccgcgccgatcgcaccgccgattatcgacggaaattgcgcgtagccgcaaatttcccgttcgtccagatatccctgcgccctgagtttctctttcacttcttctattttcatccctttcccctccgtgatcgagcggctttcccgcttctttacctgataacgccgtcccgcctgccgacaggggcttccgacataaccgcccccgttcgctcggaaaaaacagaaaattttttcctcttccgccgccgaaacgcccgcggttttcccaaggctcgccttaaagttcgaaactttcggacttgaacgcgcaataccgcctgccgcgcagggcggtaaatttaagcacgcagtaatcgggatcgtcaacgccttttttataatacatggtatcccctgtccgccaaatttcctctttggtttccgcgtcttcgaggacctccattgtccctatcagcatgacgccctcatagcggaatcgccccttttcgaaaaagtaaacgctcgctttgggattttcccgatattgactcacccgcagggaagaggtattggtggtaaaatacaagcaattttcctctatctttctcggcggcagcatggctttcatgttcggaaatcccgcctcgtccaccgacgcgataaacgccacgccgcgcttgccgataaactcgaaaatcttttctttcgctatcatctcgtcccttcttttatgcgcccgccttttcggcgttcttcgcacgttttctttcgtcattataatcctttttttatcgtttgtcaatcccctttttcattttagtttctccctttattcagcggcgagaggtcccccttataaaattttgccgacccttcctaattcttcccgaaagcagcccgatccggcaaattagaaaattccaaaaaataccgttttctgcactttccctgtttttatgcttttttcttgggcggaaagggaccgaaacgcccgcaaaaaagaaaatatcgcgattcatacaggaaagtgaaaatttttacaataatttttcccaaaaggcttgaaaaatacgataaaaaacgttataatagaaacagattatgtaataatggacaagagaggcttcccgaaattactttcgacgaattttcattccttcctttcggggttctttccgccacgattatatgactcggttttgttcgggagtttacttgtttatgatgactttacaggagtatctgcaactgaaaaacgggacggacgtgagaggggtcgccacggaaggcgtaccgggcgaggaagtcaatctgaccgcggaagcggcggaaaacctcgccgcggctttttgcacgtttataaaaaagcgcacgggcaaggaaaagatccgcgtggccgtgggacacgactcccgcctctccgcggcagacctttccgaaagcgtcgtgcgggggatcgtcaaaacgggcgccgacgccgtcttcaccgctctttcctccacgccctccatgttcatgttgttgaaggacgaacgctgggcgtgcgacgggtcggtgatgatcacggcgagccatcttccctttaaccgcaacggacttaaattttttacccaaagcggggggctcgaatccgaggacattcgggaaattctgacgctggccgcggcgggcgtatcttgcggcgacactttcggcagtcgggaaacaaagccctatctcgacgaatacgccgccgatctcgtaaaaaaagtgcgcgcggcgacgggggcggaaacccctttgcgcggcaagcgcatcctcgtggacgcgggcaacggcgcgggcggattctacgtcgacaaagtattgaagccgctgggggcggacacggaaggctcgcagttcctggaccccgacgggcgttttcccaatcatattccgaatcccgaaaacgaaacggcgatgcgttccgtctgcgaagcggtgaaaaagagcggcgccgacttcggcatcatcttcgacaccgacgtggacagggcgggcgccgtcgacaaaaacggcgaggaaatcaaccgcaatcggctcatcgcgctcatttccgcgatcctcttaaaagaaaagccgggcaccgtcgtcaccgactcggtgacttccgacggacttgcgcggtttattgcggcgcacggcggaagacaccaccgctttaagcgcggctataaaaacgtcatcaacgaggcgatacgcctcaatgccgaaggggaatatacccctctcgccatcgaaaccagcgggcacgcggcgctgaaagaaaactattttctcgacgacggcgcctatctcgtcacgcggcttttgatcgcgctcgccagggaatccgccgagggaagggagatcaccgacatcatcggggatctgcccgagccgaaagaagccgcggagcttcgccccgcctttgaaaaaggcatggatttcaaagcgctcggcgcaggactcctcgacgacctcgccgcttatgcgaaaacccttccgttcgttacccccgcgcccgataattacgagggcatccgcctgaatttcgacaaagcgcacggcgacggctggctgctcgtccgcatgagcctgcacgagccgatcctgccgatcaacgccgagagcgattcggagggcggcgtcaggctcatcgtccgggaactgtacgaatttttaaagacttacccgtttctcgacctttcatctttaaaaaagcttctcggagcggacgcggcagacgccgcgagcgacgaggataacgataagaataaaacggaggaaccagtcatgacagagcacaccgaagaagccaaagaactcgccgtcacgcccgaaacggagcccgccgcggagaataacgccgacgccgccctttcgcaaacgcccgccgaagagtcctctaaaacggagtttttcgcggaaaacccggccgaagaaaaaaagccgaaagaagccgccgcgaacgaggaagcctcgctttgcgaaaccgctccgccttgcgaaacgcaagagcctgctcccgaaaaggcccccgcgcctgaagaaaccgcggcggaagacgacgctccctgcgaggaacagaccgaagaggaaccgcccaaatcggcgcgcgtctgcatagaagcccccgccggggaatccgcagagaaggcggaggaaacggccgaggaaaaagaaacgacagaagccgtctgcgatgcgaaggaggcggaaaaagccgaaccgcaggccgcggcagcagaccgtgaaaaagaaaataatcaatcaggagatattataatggacgtacaacaaaccaccatcaacgcggtgaggatcttgtccgcggaagctatccagaaggcaaaatccggtcatccggggcttcccatgggcagcgcccccatcgcttatacgctctttcagaatttcttgaaattcaatccgagagatgcaaaatggaacgaccgcgacagattcgtgctgtccgcgggacacggctccatgctcgattattcccttctgtatctttacggctacgacgtgactaaggaagatttaaagaacttccgccagctgggcagcaaaacgcccggtcatcccgaatacggtcacacggcgggaatcgaaacgacgacggggcctttgggtcagggcatcgcgaacgcggtgggcatggcggccgcggaagcgcatctcgcggcgaagttcaataagcccggtttccccgtggtagaccactatacctacgcgctctgcggcgacgggtgccttgaagagggcatttcttacgaggcgtgttcctttgcgggcacgcacgcgctgggcaaactcattctcttctacgacgacaacgacatcaccatcgagggcgacacggacgtcaccttcaaagagaatatcggcgcgcgttttgcggcgcagaactggcaggtgctgcacgtggatctcatcacccggcccgacgacgtggaggcgctttccgaggcgatagaaaaagcgaaggcgcgcacggataaaccgtccgtgatcatctgccacacccgcatcgggtacggatctcccctcgaaggcagcgaaaagtgccacggctcccctctcggcgaagaaaatctcaaaaagaccaaggaaaaactcggctggccgtgcgcggaagcgttcgactgtcccgaagaagtcttcgaacactgccgcgtcgcctccaatgcgggcgccgaaaaggaaatgcagtggaagaagatgtttgcggaatacgagtacgcctatcccgatctcgcggaagaatacaaggcggcgatggagaatgcaaagcccgatttcgcgcagatggaggaattgttcgacttcgacaagcccatggcgacacgccagacgtccgcggcggtgctcaataagctcgcggcgaagctgccccagctgataggcggcagcgccgatctcgcgccctccaatctttccgatatgaaagatacggaggagaacgtgtacggaacgttcgcccccgacaattatgcgggcagaaacatccacttcggtatccgcgaacacgccatggcggcgatcgcaaacgggatgcagctgcacggcggcgttcaggcgtactgcgcgactttcttcgtattcaccgattactgcaaacccgcgatgcgcctctccgcgctgatgaacattcccgtaacgtatatcatgacgcacgattccatcggcgtcggcgaggacggtcccacccatcagcccgtagaacagctgatcgcgcttcgctctattcccaatatgaaggtctatcgccccgcggacggcaaggaaacggcggcggcgtggatttccgccctgacggggacggcgcccaccgtactcgtgctcacaagacaggcgctgccccagtacgaaaacagcggcttgcaggcgctgaaaggcggctatgtcctcgaagactgcgaaggtacgcccgacgtgctgctcatcggcacgggttcggaagtagaactttgcgtcgaagcgaaagccaagcttgcggaaagcggcgtcaaggcgcgggtcgtttccatgccctgtatcgaggaatttgaaaaacagacgggcgaatataaggaaagcgtgcttcctgccgccgtcaaagcgagagtctgcgtggaagcgggctccccgtacagttggtataagtacgcgggcgaaaagggcgaaatcgtcggcatgagcacgttcggcgcctccgcacccgcgccccagctctttgagaagttcggcttcacggcggcgaacgtcgtcgaaaaggcgaaggcttctcttgcgaaaatcaaataatccgtagagcggttgcgactgaatttcgacggcggaaaaaaggcgggactttacgaagttccgcctttgattttttatgaccggcaatcgtttttcccgccctatttttctgtgttccgctcgtttttccctgtctttttgtctgattttcctcgcgaaacgcccgtttttaaaggaagcgcctcgtatttttcaacaaaccgtcctttgttcccgttccgacttttgcctgtattccgattgaggaaaaggaattttaaagacgttttcttccgttcttttcggacttatcttttgaatgtgtaggaagaagcaaaatcgaaacttgcgtttttcaaaaaagtttccgcttttttcgtttgcgctcgccgatgtttatgtaaggcaaaatcgaaacttatttttttcggaaggcttttcttccgatttttgcttgctctttttaacgccgagcgggatagagcgaattttgattttgtatgtcgccttctccctatccatcccccgtttcttcattcttcgcctttattgcgccgaacggctcctcaaattctttcggggaaaacttttccccatttcccgcactctctcctgtttctttacgacggcgaagcgagaatggcgccccgtttttcttcgagcgaaagaaaaatttttcaacaaatcttcactttatttaaatttttctttctcaatcggggtatataatttatagtataaaattaagagcctcggaatgctcttttcaaaaaagattccgttctctttaaatttttgaaaggggaggatttttatgacagacgcctcgcagttaaaagaattatatctcacccgccaaagctgtcgaagcttttgcgataagcccatctcgaaaaaacagatcgaagaaatctgcgctctcgcgggactcgcgccgtcggcgtgcaatttgcagccgtggaaaatttacgccgtaacgggcgaaaagctcgccgcagtgaagacgctgctgaaaaatcgcggcaaagccccctttgtggacggcgtccccgcgattctcgtgatcgcggaagatacgagcgccgtaaaggcattcaatcccgcgcttccctatttcgccccttacgacgtgggcgaatttaccgctcatctcgtgctggcggcggaaacggcgggactgagcacctgtatcctcggctggcacgacgaatcaggacttaaagagctgctctctctgcccgaaaatcagtccgttccctatgtcgtcgcgttaggctacgcggcaaaaggctatgaaacgcgcgccaaaacgagaaactccgtcgaggattttctcactttctgcgactgacgcatctcctactttgaaaaaagttttattttcatcgctttaaaaatcatccgtttcccaaaaaaacggcggttttgtttcgctctaaaatttgtctatcccgtcgatttttcggcgcattaacctctacataacccaaagggtctgtccttacggcagacactttgggttttttcatttttgaaagttactctttcaaaagatatttatccgcggttccaaacccggtttccaaagtcaacaacgcgcccgattcaaagacgagaatggagggaccgtcccaatccaaagcgtttttaacagccgtttccttctccaaataccttccgtcccattccggaaaatcgacgatcatatacgcttttttgtcgggaaacgcccgaacttcgctcaacaacgcgcattcttcccgtttggtcttcgccgtcaaggctattttctcccgcttcaaatatccctcgggaatacttgcgattttatagagtcctttttctctctttttcggatcgttccactccgccgatactctttcctgaaaatttttatggacgaatttttttataaactttttttccgcttcataatccattttttacaccgcctacgttctgctttccgatcctattactatactcaaaaaagaatactccttcgctcccgataaattttcatcgatttcgtcgccaagccgctgtgcgaaccccacgtttttttaattgtatgtctatcttgacagttacgctcctaaatcccccattccgaattttcggcgccctcaaattttaatcttgctcgccgacggcaccccgtttctcccccttttattgcccgcaaacggctttcaccacttccaaaatctcggcgtccgtctgataattttccgcgacggtgtgcgcgccgtcctcgggacgaataccgatgccgtgaatgcagtttttcgtcagcggccacaggatacgcgccgtcgtcagcttgatggcgtcggattttcccaaaaaggttcggggcagcgtcgactgcatgatcccttttccgtacgttttcgtttctccgctccgcgtcgaaagataaatattttcgtaggaaacggcgccgtaatccaccatcgcgccgatgaggcattcggatgcggacgcggtgccgttgtccgccatcacggtgatctcgctgtcctcggcaaaatactcaaaataacgattgcccgtcgccttaaattcctccgttttgccgctccgataatttgcgacagccaccacgggcgcactgagattcgaactcttgcagaaatagccggcgatttcattgagaatattcaaatatccgccgccgttcgcccggaggtccagcacgagatttttctttttttccgacctgaaaatatccatcgcggcagcgaactcctccgccgccttcccgttgaactgcgttaaacgtatataggcggtttcctcgtccaaagaagcgagataattgtcgcttttcgtcaaatcggtcgcctgctcgcccgtaaaaatatacgcggaatcattggaacggtaaaagacgtaattctccacgaacgactgcttggaaaccgtcttgaagaaaggctcgccgtcctctccctgcctaagtttgaggacgaaattctcccccgcggcgcgctcgtttaaaaagacggataattcgtcgtaagattcgctctcggtgagttcctgttcgttcatgccgaatccgacgatgcacattcccggcaggatgcccgcttcttccgcgggcgaatttcccgaaacgcgcgtgatgagcaggcgtttattctcttcggcgtccttcgtcgagaaagtaacgccgagtccgctccattttcccgtcgcgtcctctatcatgtcggcatattcgtcggctgtcaaataccccgaataggggtctaaaagcccgttcagcgcgccgaaaagcgcgtcatagatcgtctgatcgtcgatctcttcgtagtagttgctttgcacctgatctttcgcccagatgagagatcgcatttcgggatcgagcatcccctgataggcgaaaaatccgccgaaaaatcccgccgcggcgatcgcgagcgcgcccgcgcagcaggccactatttttccgacgctctttttctttttgggcggccgttcttccgaggcgaacattccccttctcttctcatagagatcgggcgaaacgcctttgtcttttccgccgctttgcgcggcgttttcacgccgaaatgagtccccgcccgccgcgcggtttccgtatccgtttccccaggcgtagcccccgttttgcgcgccgtatcccggccccgccgcaacgggaggggtgccgttcgcgctatccccgaaatcgaatacgtagcctttcgcctcgtcggccgttccctcttcggtttccttcggcttttcagaggaagaaaacttttcggcggcattcccccgattctcgtttttttcggaaatctccccggcgggaaggttctcttttcccgctccgtcctgtccgttcaaatccaaactcataatgactctcctttcgccctttcggcgctcgatcggcattttgccgcgtccgcaatccgtccttttttccatttatcgcagccgtaaaacggataattccgacggttacttacatactataaagtaaacgggaaaaacaagctccctcttttttcgggcttcctgcccgcaaaccctctttcgtattccgtggatacgtctttttacttttgtgaatctttcgttactctttcggcgtccggattttttaagccgtcctaaacataattgggaggacttttaaaaacttgccgacccgcgctatttttccaaaagtttatacaaaacggtgaggacgcggaaggaaacggcgtcgggaaactgccgtatgttcagtcccgtggctttttctattttgtccaaccgatacaacagggtgttgcggtgcatatagagattgcgcgaggtttcgctgacgttgaggctgctctgcaaaaactcttccgcggtattcaccatctcctcgtcttcgaaaatttctttcgcgttttcgtccgtaagttcccccaggtattcggcgagcttgctctcgggcacgtcttccagcatcttcaccagcatatattccttgtaggaatgcacgtttcccttgctcgcgaaaacgcccgcgtatcgaagagctcccgccgcctgcgaataggaaagcgcgatgtctttcagccccttcaccgtcgagccgacgcccactttcacgtccagacccagttcctctttgagcgactgcgcgagaaattccgcgtaatcggtcggggactgatactcgctctcttcttcgcccgcgaattttaccagcacgcagttgcgctcgtcgacggtgacgacggtgtcaagactgttgccgccgtactgcgcgacgagggaaatgacctcttccatcaacctcgggacgtacagagcgagcgcgaaacaggaggcttttcccacggaaaacttagtcatatatttgtatatgcccgcggaggaacattcgcccaaaaggatgcgcttcaaatattccgttttggaaagatccgcttccttttccgcaaagctctcgatatacgcgggcagaagcgccgcataattgcgctgtacggctcccgtgcctttgaggactccgatgtatccgatatttttatataaaaaacggaaaaacgtattgttcccgtcgtcggtcacgccctcgaactgcctgtcgcaagaaggcaaaacgcccgaacgggagttctccctgtaacagccgaattcctctttgaggagcgccgtgatttcctccgcgattctatccagctccgtcattcctttttcctccgccaaatcgtcttgctcctattatagcctaaacggacgaaaaattcaagggtttttccgcgggaagaaacgtgtttcttttttttgcgatttattacaacaatatgcggaaaaaattacaaaaaattatttttttagtattgacatacgtgagagaaagtgatataataaagtaaattgaaaggttgtagtttcctgttttacaaaaagcgcagggaaatcgtgcgacgaaaacaaaaaataaactttcaggagatattttatgagcaacacaagcaccaactatgccgagctcaatgtcaccaacgacgacatgaaagaaatgctcgccgaaggtacgtttcagcccgtagcggaacaaaaaaccgctcccgtaaagaaaaagaacgtcggctaccgtattctcgcattgattttgacaatcgcgcctatcgtctgtctttgcctgatcaacatcacgttgatcatttcgacgacgtcagggtatgccgtatacgacaagtccaccctgctcaacgccttgatgtcccttttcaaaaaggacggactgagcgagttctataagaaggcggcagaggtcgtcacaggtgctgcgacctccggcttcgactcgtataaatttatgggtcttcccgtgctttcgggaacgggtacgatcggcaagctgatgggactcgtcctctacgcgatgcccgcggcgatggtcgtgacggtcgttttgatgatcattgccctttgctcgggcaaagcggcgcccgcgatgacgagagcgatcgctttcatcaatttctgggtatacggcggctatgcgctctgcgtgctggcggtttccctgtattatgcgaatatcgaaaagacgtttgacgtcgtcgtacttgcgattgcgggagcgtttttcctcctctatctcatcctgtctttcctcaaagcgggcaagcgcacgtggatgacgctgcttctcttccttttgacggcggcgtttgccggcgcttacgtgtacggtatttccaagtgcgcggacggcttgaagactctctttgcttcctccgacacctcattcatcaacagcctcacgaagggcgaattttataagtatgcgaccgtcggagtgctcggtattgccctgctcgccgcggcagtttcgtccatccgtcttgccaccagaaagggatatacgttcgatctcatccgctacatcttcaatcttctcgtggcgggcgctgtaatttacgcggcgttcaccttggacgaactcaaatccttgcagctgtacgcgggaatcgcggcgggaatcgctctcgttcagatcgttctcgtgatcattgctctcggcgtcctttcgaagaaaaagaaggcggcgaagaaggcggcagccgtggaagaagagcctgaaaaggcgcaggtaaccgaggaagaaacgcaggaaacggctgcggaagaaaccgtcgccgttgcgcccgtagcggaagaagcgcagcccgaagaagaaacgacgcaggaaacggccgcggtcacggaagaagagcccgaacagcccgaagaagcgggcgtgtatgcggaggccgtccgtttcgaaggctatccgacgacgcaggaaacggtgcgcgaagcggaagaactcgcagagcccgcagccgaaacggaacagcccgctcaggagcccgccgttcagcagtcgcccgtctacaactataacttctccgctcccgcagagcctcagcccgcggcgggcgcaggcgccacggcggattacgatttctacaacagcaggagcttcgatccgtttatcgcttccctgaacagcgccgaaagagagcagttcaccgaactcttcatcctgaaatataagggcgaaaccaaaaatctgcccgattatcaggtgggcggcgacaatacggaattcttccgcaaggtattcatctatctcggacagtacagagatagaattcccgattccctgctcggcaagatgtatcagttcgctatcagaaaataatctcctgaatgacgggagccggccttttgaaaggtcggctcttttttattgcataaatgcaaactttttattccccttttttctgcccgtccgaaaaaaaaatattgcccgtcacgcggacgggcgatagataaagacctcctcggcgtcagggacggctgcatttccaaaaacgacgcctgtcttttgtttttcctttcccttgctccgaccgcccccctatgcgataaaaacagttttaacgctcttttgaacgcaaatctaacctgctcacattccctcctcttccgccgattctcccgtttcccttccgtcttcgcatccgatttccagaccgcccgcccaggcattgtctaaaatttgttttaaaggaactttcttttcgattacgagaaaagcaggctcttggagcgccgcttccagatccttcttttttaaaatctccttttccaggacgattttcaaaggatacggcagcgatttcacatcctcctcgcacgactccaaggcctctcgcagcggcagagcgttctcgtgagcgccgtcttcgctcgccagccaagctccggcagcgtcctgatacagcgtatccaagggtccgagtaccaaggcgacgatttcggtttcccgcgtccataaataatacgaaaagccgctcgaaaacgtttccctttttaaaggcagattttcttcccgcgccgcgttataaaacaaatagtcgaaacccgacgtaattccccaataatatttgacttttaactcccgccaatagaacgattttcggtactttttcttttcgaacggcgtgcatacggcatatgcgacggcgtagatgggtccaatgaacgccacgaacggcaatacgattaatacgcacagcgttataaaaaagccgatgagaagtttcttccaaacgctttttctattttccgtttcgccttgttccgccttctcttctaatttttctttcatctctgtcttcccccgtttttcgcgcgcccgaatctaaaaccatttcgacggaaggctcaaaaagacgccttcctctcttttgaagccgagcttttcataatagcccgccctttccgccgtcgtttccaccagccactgcgaatcggggaacgcctccctgcatctttttatcagttccttcccgatcccccggcattgaaattcgggaaggaccgccagatcgaaaatcacagacctgattatcccgtcgctcagcgccctgacgcagccgatcaaagttgccccttcccacgccgaaacgacgagcgtcgaacgcagaaaaggcgcattgaaattttccgccatcgccgctgtggttttcctatcgtccgtccagcccacggcggaaaataatttcatcagctgtcccgaaggcaagtcctttctcgtttcaaatctaaattccattgttttccccttgcggcggcttatgccctgcgccgaaaaaaattttcttttggcgcgcgtttttttccgccaaagtatctgcgcgcccgttttttcgcggctcgttttctatgcgatttttttccttttaaaaacggcggaacacttttccgcccgccgttttcttttttgccgtctattattcccactcgaaattttcttttcctgcgcccagctcgaaatggtatttgacgatgcccagactgacgtcggcagattttcccgattcccgttcaatcgaaatcttgccgcctcttagttctattttgaaatcctgccgatttaaggccgtgggcgcaagcagcgctgcttgcgcgccccgcttgaaccattcgggcgcctcggcggacatcggacatacggtttccggagctttgctcgcgtgcggacgcccctgcgtcgcgccgtatccgaaagcgatcacgcagaacaacttttcgccgccgcccgccggacacagctttttcaccgttcctttgccgtacgtcgcggcgacccaacagctgttgagtcctaaaatctgcattttaagcacgagccgctccccgaaatatcccaccttttctgccgtatcggcctcgtcttttcccatcaggacaagataatttttcacgccgcgaaattttccgcagcgcgccaggaaactgccgaacgccctttcttcgtcccgtatcagacgaatatccaatccgctttcccgattgcaggcatcaatttccgcttgcagagcctccgtgagttcaaaggagatctctttttccgaatagctccgcaccgaatgcctttgttccatcgcttcccaaatatccattttttatcctttgcggaagattctccgcgccttttctatattccgcaaagcgcccgcctctcctgcgcgcctatgcgttccgaaagtaaccgccccttctccacattttttaaaaaattttatcccccgcgcccgcctctttcggtgctccgccgccggcagggatctccttcccgccaagaaacgggactatggttccgatagcgttccgataacgctgcctccttttgccttttcgaccgttcatccaaagagcttctttccccttcttccaacaaagcgctttactcgtcctcgtcgtcgggcagggaggctctgcctgtgattttgatgagcaccttaatgcttccgtcctcggtaaaggaacgttccgtacagacgctgtccacgataaacagtccgcggccgctctctgccaacacgtccgagcagaagctgtcctcgggcgggcagaagcgcacggaagaatggactttgagttcgataaactctccgtgaatttcgctttcgagcgacgccacgccgtcggaatgctgtaaaacgttgctcaccagctcgctgacgaccagcttgctgtcgaacacgctgtcctcgggcacgtcgctttccgcgagaaaatcacaaagctgtttcatcgcttctttcagcgcctcgtaatttttcacttcgataaacacgcttccgcctccttgcaaaagccccgtcttttcgccgcccgaaaatggaaaagcggcttttttcgcttttcctttcgggaaagatccgaaaagcgtcagttcttatcctctttcagctttgcgcttaaatcctcggcgtagcgcagctgaaattttcttacgttcataaacagagcggcaagcgccctcatcagcggatttttgacgcgcagcgactccgtaaacgtcacttccgtcccgccgccttccaacgcgcggaatttgcccgtccaatgcccgaaaaaatttttattgtctatatcgagttcgtagagctcgtgttcccgcttctcggtgatcgtgaaatacgtggggaaaccgttgttcgcaaactcggtgaacgtattttcccccgtgatctctatgccagacagatcggaacgccatccgcaatcggcgttgttcgtcacagcctcccatacccgcgcaaggtccgcgtcaaaaattgccgttatttccgaagttttcatccttctcttccccctgtccttttgaaagtcctctttgcgttctgtttcctcccgaaaagccgcgccgcccctttggaaacgcttgcggctatgccgcaaaacattcgcggctctcaacggaaaagagccgaaagaaaggcgcttttccgccgcttttttgttttttccgctgcgaacggcgaaagaagcttttaattcgccttttcgcggagtttcccttgatgcagcaacgccgcttcgtccgcgtatatggcggaaaaaggttttatctcttccgcaaatctcaaaaaaccgccgaaaagattttcgccgccgctcttatacggaatcctgtaaattttcccgaagctttaagagaagttttctttccattctcgaaacgaacatctgcgacacgcccagtcgccgcgccgtttcgctctgggataattcgtccacatagcgatacttgatcagcgcccgctccgtttccgataaatccttcatagccgaacgcaaggcgtcttttatttccagccgctcgtatctgtcgtcgttgtcggggatgagcgcgtacagcgaatgttcgctgtcgtcttctcccgaactcgccacgccgtcgagggaaacggtgccccccacttccagcgcgcgcaccacttcttcctcggaaagggagagcttttttgctatctcgcgtatgctcggcttgacgccgtgagtattctcgtattccgaggtaaaggtgcgcacggcggcgctgatttcgctcaaacggcgcggcagcttgacgatacgcgatttatcccggaaataatttttgatttctcccgtgatggtgggggtgatgaaggtggtgaactgcattcccatcgacggatcgaaacggtcgatgccgcgaaggagagccatcgacgccacctgcttcaaatcgtcgtattccaccccccgtcccacgaactttttggcgagaatttcggctatgtagagatacttctcggcgattttattgcggacggatttgtcgcccgtttccttgtattgctgaaacagctcgtttacgttttcttctgccataatggaaatcccgtcatcctctgctttttttggagcgtttttacgcctgaaaagaaattttctgcaccagccccgcttcgttttttacaaactccgcattgcccagcaaagcgttcaaaagcgcgtaagaaatttcgtcgtccgcgctcttttcctcgggattccccgcttcgctgcccgcgaccgagcaggagagcgtttcccccacttcgaattcgataaaagcggcgcgaaatccgttgcgtttgaggatcaggaggctttcggtgacgcacaccttgaaatcctccgcgcagtccacgtcaaagcccgccaacgagcaaagtccgcccgtcgcaagccgcaccgtcgtgagatattcgtttgacaaaggcagagaaagagaaaatttttccatgcttattcaatctccataatcgtgttgagggaacaaatcaaaaataatttcttgattttcggctgcaaatttctgagcgccaggctgtgtccgtccgtttttgcggtcttcaaaattttgacgaaggtacccagggtagtgctgtcgataaaattcagttccccgcattcaaagacgatgtccgcgggattttccttataggcggccatggtttcggcataaaattcgtccgcgttgcccgagtcgatatccccgttcaacgcgatgctcagtttgccgtccgccgcgcccttcacttgaagctctttcattgtaaaacctcccttttacatcctatactatatatgtaccgcaaaaaaaccgactttcaaacactttttcgcgtttttcttctctcttacccgctatatgtcggaaatttctttttccgcccctcccggacgccccgtttcttcttttcccattctccgcgattcctattctccgccattttttcttttcctctctgtttctatccttccgtccctgttttctaccctctttctatcgcgcgcgctctcctttcatcgttttcctatccttgcgtcccgtcacgatttttgactttcttatccgcaactctgttttttctataagtaatattctaagcatttttatatccatccgaaacacagcgtctatccttttttacgcgaaacacagtttaccctccgccgcagacctgtccccataaaaatatacttttgggaagaatcacagatagtctgtcagatcgtttaaagagttcaaaatcaggtcgggcgtatcggaagaagcgggcatcatgtccgcgtccgtttcgcccgaaagcaccaaaacggcggtaaagccgttattgtttgcaaagcggatatccgtgtgcaatctgtcgcccaccatggcaatttcgcttttttcggcgtgcaggacgccgctcaaagcatcccccatcacttcgtaaggttttccgcagacgacgtcgggagtccgtccggaagaacatttcaacagctcgataaacgagcctacgtcgggcgcggaaacggggagcgcgggacagacggtatcgggatgagtcgccgcgtaaaaactgccccgcactaaaaattcgttgaacttttttaatttttcgaacgtgagcgccgtatcgtatgcgagcacgcagacgtcgggtttttcttctgtcagagggattcccgccgcctcaaactccgacttcacttcctcccgcgccaatacgtatgcggattttcccgcgtgttggcgtttgagatactctatcgtcgccatcgcggaggtatacaccatgtcgccgttttcccaaagcccgattcgtttcagcttttccctgtactccccggacgtttttgaggaattgttcgtgcagtacaccagctttttccccgcgcggcgaagcagtcggagagtcgtctgcatttctcctatcggcgtgtcgtcgaaatagacggtgccgtccatatcgaggagaaaaattttcgtttttttcaaaagttcgcctattgttgtcgtcatagttctctttcctttctgcgataaggctttgcgcccgatttttcctaaaagcgggaaaacgtgaaattcaataaaaatttcatagcagggaaaaatcccgcataagcgccgcaatcccgtatgtcgaaagggaaagctccggcaacagccgcaaaatttttccgagcgcgtttttctccgttttcgaaaagatatcctccgctcgttttttatgcttctctattttttcttcgataccagcgattttttccgagagaatttttttgcattcgtcgaaattttccgcataccctttcagctcttccgccgtgggaatataggcggaatccgcaaaaaaacccgttttttcggcgagcgtttccgcttcctttaacctcgcgttataatctactttgccgccccgataaaatccgccgtcaaaaaagagcgcgtacagctccgccagcgcgcacgcgcacggaaacagtactttttcgaaaggccgtttaaaaaaccgcgaagcgagagaggcaaaacaaaagatttccccttccggaaaccccgagcggaaacagtattccgccgtcagtaccgcccgaaaaagcgcctccgcagcctgcggggaaaacacgctttcctcttttcgctcctctgaacaagccgcttccccgctcttttctttttcctcccttaccgattcgccgaaaaacgcgcaggcggcggagaggagcgaaaaaagcccatccccgtttgcgtcggaaagcgcccgccctctgttttccgaagcgcgacgcggatttcccgcgccttccgcgatcggagaattttcccggcagttttcgtttttgtcttgcgcgctttgcagtttaagaaggcgccccgcttcaaaggaaaagagcgaaagctttgaggcgagcagaaaggtttgcgcaagccgtattccctccctgttttcgcacattttttccgaatcggcaaaaacgagatggggaggcggaacgggatattccgctcgctttcctcccgccgtcaccgtgaccgtgccgcgaagaagtccctcgggtttgcaggaaagcgaaaccgcgacaaaaggcagcgacctcgcgcaggcaaaatatctcgccgcgcttacggcttttcccgcgccgagcacgcacgtgacggcgtcgggcgaggcaaacagaggcagaacgtcctcgccttctcctatcacgagcacgagtttttttaaaatcttctttaagacctttccgagcgccagggcgctttcttcgtcggtgagtacgagatagtttccgtaagggaaacgggctttcaacagcgcgggcaaggtagtgaggctcccctcccgcacctcgcagccgaaaagaatgtcgcttatactcataggttttttttacgtagttttttattggttgaatcgttgtttttagctttttatcttcttataagtgttcataaatattgccgcaaagtggcttaaatacaaaatttttcgtgtatcactataaatctaattatatctctttatatctttcctttgtaagcttgggcgtcaaaaaagtatcaaatggcatttttatagccaccaccatcagaatgtgaaagtggctgaaacatagaatttatgcagatttgcgccatttcacgattcgctgttagatatcatcattcgcctattttttatctgtttttaaaaaagagaaggcaacgggtattttccgtctgccgaagcagtcggaacgcgtccccaagcgcccttgcgcgttctgttacgggcttacgctttcaggagagcgtacatcttcatatccagcacccttccgtttttaaaggcgttgctcctcagcgtgccctcgcacgtgaatccgctcttttccaggattcggcaggaagcggcgtttcgggcaaacggctccgcaaagagccgaataatgtccgtgtgctcaaacacgtattcgcaaatctgctttacggcgcttgttccgattccccgcccccaatacggctcggcgatataatatcctatttccgccgttttggagtggatattctctttacggaaagcgccgatactgccgacgactttatctttcacgacgatggcaaacgaaaacacggagtctttctccgccgcaagcatcgaacggatgaaatcgactgcgtcgctttccgtatacggataaggcagaccgtcgcgcaaattgtcctgtacgttttgattgtcgatcgccgcggcaagatcggcggcgtcttcgattctccattgtcggaggaaacattccatttctttcaactcctttcagggcttcccgcgccccgtttatccgcagagcggcggtccctcgcttaaaattcaaaatggccgcgccgccctatctttgtcccgcttttaagggggaaaagctttgttctacggtatccattccggatagggtgggtacagtgcgccgagttgagggacgagattctccgcccgcccgaggcacgtcgcgacgtcggaaagataggcgtccagctcttcctgcgttttcggcgcataggagggcagggaaaacttgaacaagaatcctacgccctcgtaactccattcggagtgtacggtgcgatagagcggcggattatctatctccaatcggaaaatattgttccacctatcccgtttttcaaatgtatagtgaccgttttcgtattcaggcttgggaaagcctttgaaatgcgctttgaggcttttgccgatggtatacgtcggatccgatacgtacgtttcccgatattttttcagacaaagccccttcttcgtctgcctgtcgatctcgtgcgcgattattttcgcttttctccgcacgcgttccctttggagccgctcttcttcgtcgagggcgatcttcacgccccgctgcaccgctttgcagaaaaagtattcctcgaataatccgagaattcgtttttcctcctcccgccaggcgtcggaaggctccgccttcaacgccagcgtgagattggtgtatttgtttccgtcatcccagccgcgcagaaaataacagctcccctccgcttcttccgaaaagcgaacgccgtgcagggaatagtcgaacagggaaaaatgaaaagtgcgcggatatttcaaaaggatctcttctatctcgcggcggttatccctctcttctttccaaacgggctctacgccctcggaaagttcgcccgtataattcttccactcgccctctccctcctcgtaataggcggaaaaatgcgggtagcgggcgcagagtttttcccgggtcttgtcatctctcgacgcaagcgacgccaccacgttatccaccgacgatttttcgggctccctttcgacccgattgagtatcagcccgtacattttcatatgaaaagcgggaaggcgataagtcattttatgggcggaaaaaaacgcgttcatctctttcagcgaagagctgaaattgcatttttttgcaatattcaaatcataaagtttccatactcgcatacgattccccccgtctacgatcccgtatcgtgcgcgcttcccttcggcgccgcggctgcaaagtcctttaaaaccgtttttccgaaagcgaaaaagtcaaacggcgcagaaagcggaaagcagttcttttaaagcggagagcaatctgtcgttttcttccctcgtgcctaccgtgatgcggcagaaatctttaagcttttcggtattccagaagcgcaccagaacgccgcgttccttcaagcccttatagacgacttcgccgccgatgtcttttctgcccgcgaaaaggaaattggacgcgctctcgggtacgaaaaagccgagttttataagctcttcccgcacgcgggcacgctcctctatcacctttttcgccgtttgccgataatattccccgtccgagatcgccgcggcgcacaccgcctgacagagcgcgtccaccggataggaattgaaacagtccttggcggcaaacagccccccgatcagtctttcgccgcctatcgcgtacccgcagcggattcccgccaatgcgtaatacttggaaaacgtcttgaccacgagcagattttcgtattttttcacgaggggagcgaggctttccccgtaaaaacccatatacgcctcgtccgcgatgatgagtttgcggggattgtcccgcacaaacgcctccatacgcgttcttttgacccctacgcccgtcggagcgttggggttggcaatgagtacgccctgacactgcgttgccgtgagagcctctaaatccatcgtataatcgttctttaaaggcactacccgatagggtacggagaagaaatcgcagaacacgggatagaaggaataggtgagatcggcaaacgccgcgcctttcccttccttatcgaaaaaggcgggcatacagagcgcgagcacttcgtcgctgccgttgccgcaaaagacgttgtttttttccaccccttccgcttttgcgatcgcttcgcgcaagacgtcggcgttcggggagggatacagcggcagtttccttatatcgaaagagcgcagcgcttcggcggccttcggggagggcggatagggattttcgttggtgttgagcttgatgtacgccttatcctgcggctgctctcccgccgtatacggtttaagagaggagatgaatttacttaaaaaattttccatgagggtagcggcacttttttgaagcggaaacgccgcacgaccgctgtcgctcccttagcgggatttgcggagcgtgaacaaaagagtatttcgtcctgtcggatgaagccgaaatatctcctaaacttctcgggaaggctcaggatgacggaaaaaaccgaaatcttttaaatatccttttctccgcgcccgatgcgcggggcgtatttataaaagtacggacccgattttgtcaaaagaatttctatcttatcgccaatgcgacggcgttgacggaaaaaccgaccaaaaccgccacggcgtagcagacgacgatgagcgcaaggttgcgcttccattccctggtgtttttcaagagcacgacgaagccgagtcccgcattggcgcaaagtcccgccgcgcaagagccgaaggaaatgccgttttggaggaagcattcggtgattaccacgctggaagcgcagttgggaattaatccgatcagcgaggtgatcagcggctgcacgaaaatgtttctgtccatgaattccatgaaacgctcctccgtcaccgcatagatgatcagaccgagcgccacgttgaccgcgaggatgaaagccgcgactttcagcgcgtggaaaaggggagaaacgaaatacaccatccagggcttgctttcgtcgtgaggtctgccgcacgaggtgcattcgaactccttttcttccgtttttttcaggaatagttcgcgggccgcgtcgtcgcttttcaaagctttttcgcactcctcttctttgtgcgtgcaattttcttccatgcaaatttcggaggaaggggttgcgtcgcccgccttacgaaaaacgccgtgacgcttccgttcgagcgcgttgtcgtaagcctcgccgcgcgaggattcaagcgccccctttcgcccgacaagcttcaaaacgccgtccgcggcgtagcccaccgcaatgccgacaaaaattttcagcacgatcagcggcagcagatacaccgcgccctgtcccgaggagaggagaatgataaaggcttcgtcgctggtggatacgaaaatcgccaagagcgttcccaccgtgatatatttttgttcgaaaagctttgccgccatcaccgaaaaaccgcattggggaataagtcccgtcgcggagccgatgagaggtccgaatttgccgtttaagcgattgcgcggtcccgtcagcttggttttgtgctcgatcagctcgatgacgatatagatgagaagcagccacggaaagagctttaaggtgtccaaaagggcatcgagcaacacgtctgccattctacatttgcctcctgtaatgtcaagtttcctttaaggcgcggcatcgccgcaacgcctttttcaatgaatccataatcgaaacgtcggaactttttagcgcgggcatcgataaaagcgtggaaagttccccttttgcgtcccgtggaaaaacgggagtccgccttaaaggaatacgggggtgggaatctttttcggaagattcccgcgggcaactcccaacgccggacgccggacggaaataccgccgaataggggcgaaagaactatgcgcccgtttgcgctttttgtttccctgtcacctcttcagcgtcgcagagaggggaatggacgccttggcgttgagagcgaggggcgcaaagtttccgaggcggtattgaagggcgccttccgaggcgatcatcgccgcgttgtccgtgcagtaccgcttttcgggcaggaccaaacgcaagcccgctttttcgcaagcctttttcagactttcccgcaaataggagtttgccgcgaccccgccgcccgccgtcaccgcactcacgcgcttttccttagccgcgcgcagggtcttgtccacgagcacgtcgatcgccgcgcattgaaaagacgccgcgacgtccgctttcgaatacgcttcgccgcgctgttccatcgtgtggcagtagttgatgaccgccgttttgagtccgctgtacgaaaaattgtagccgccctcgcctttgagcattttcggcatgggtacgacagggcttccctttccttcgaggatacatttttcgatgttcgggccgccgggatatttaaggcctaacacccgcgccactttatcgaacgcctcccccgccgcgtcgtccagcgtagcgccgagaatgtcgaatttttcctccgacccggcataaagaatcgccgtgtgcccgccgctggcgagcagcgtcacgaaaggcggcttcaaatcgggcgcgtccagatacgccgccgcgaggtgcccgcggatgtggttgaccgcaatcagcggtttattcagagcgtacgcgaaggacttggcgaaggaaacgcccacgagcagggcgcccaaaagtcccgccccgtacgtcaccgccaccgcgtcgagttcctcatacgacacacccgcgtttttcaccgcgttttccaccacctccgcgaccgcgtccgtatgcgcgcgcgaggcgatctcgggcacgacgccgccgtacagggactgcacggaagccgacgacgcgatttcgtccgacagaattttccgcccgcggatcaccgccgccgccgtttcgtcgcacgacgattcgatgcccaaaataagcggctcccgcttatcgatatccgaagtgaaactacaaggacgatacatatcaattcaccttattataagccgtcatcgcatacctgcccccgtaaaacgcggcgaaaaagcctctcgcctttctttcgggcaaatatccgagataaaaagtttttctttacaaaacgcattccagctgacagtcacacggctctttttccacgtgcgccgcgcaatactctttggcttccgcgcaacccatcgcgcggtagaacgcctgactttccaccgccgaatgcgccgaaatgtataatttcttcccgccgcgttctttcgcccacattttagcccgcccgaaaagggctttgccgatccctttgccccgcagctcttccgatacgtggagagcggataaatcgaggtattccccgccgctgccgaatcgttccccctcgacggaaacaaagcctttgagccgcccgtttgaaaacgcgcccgtgaccatgccgcccgtccgaagggtattttgtaagcaggaaacgagcagttcgtactcttcctccgtccaatcgtcgatgaacgaaacgtcttcgacgcgccattcccccgccgattttctccaacacttcgtcaccgtttgccgacggcggaaatgttcgaacaaagcaaggctgatctcgtcggcagtaagagttctgtaatcgatcatacgctatccctcttttgaacgctctatccgtcctgtcgctctttgcattccatggaactgaggaagaaattatcggcagctgacgccg

SEQ ID NO: 3684 - DNA, 32759 bp, Unknown
  16S sequences of unknown bacteria
aaaagtgctaattcaaataccgcacttttttcggtcaattatattgtatcaggagaaaacaaatgaaactgatagattttgacggattgttcgatgaaaaactttcgcagtatatcgaagagaataaaggaaaatatacggagaaacagtgggagaatatcattcccaagctctataaaaaattcggcgatacgtacgtggcaaaagtgaaatccacccccaaacagcactatgcgaaaatgacggacagagaacttgccgaaacgctcggagagcatttgaaacagaaagttcccgtgcccgattttctctgttcagaaatagagagccgtaattgtgcggaggtccttttgccgctcttgaagagcgatgacggagaaacggtctcttacgctctcaatctcgcgggaatatcggaggaggtattttcggtatgtttcgacattttgacgcagaataaattcgacgtggatattcgggatgccgctgccgataagcttaaagaaaacgctgacgccgtgtcgtcggacgcgctgcgtttctatcgggaggggtgcgccgcggaatatatgcttgaaatcctttcgagagttacaaaacgaaatgaagagatttttcaaatccttttgaatgaatttctttcggatgcggaacgtgttcccgtgcgcgcgggatacctcgcctcctacggagacgaacgcgctcttccgtatctcatgaaaaagatagaggacagaacgatcggattcgtcgaatttcaggaactcaaatacgccatcgaggcattaggcggagaatacaatgaaccgagagatttttcggacgacaaagattatcgtacgatagaagaagcctctttgaaagaaggtttttcgggcggaggttttccgcttagttgattcccgttcgggagaaaatgtaaaaaacgcaaatttgcttcataaaatgacctatccccgcatatattaaaccgtaacgtttgaatgcggggattttttgcggagaaaacgcagatatccgcagaaaccacgttggaggtcggtatggaaaattacagcgtttacgaagatattgcaagccgcacaaacggcgatatttacatcggcgtggtaggcccggtgcgcacgggtaaatctacctttataaagaggtttatggaacagctcgtcattccttccgccgacgaatcccgccgcgcggtaatgacggacgaacttccccaatcggccgccggaaggacggtcatgacgacggaacctaaatttgtccccgctcaggccgctaagatttctattcgcgagggcgcggaagcgtccgtccgtttagtggactgcgtgggctttgctgtagaaggggcgggcggttttgatgaggacggggctcccagacttatcaagacgccttggagcgaacaggccatgccctttgaaaaagcggcaaaattaggcacggaaaaagtcattcgagaacattctaccataggaatcctcatgacgacagacggaagtattacagatattccgaggtcagcttatgtcgcagccgaagaacatgcagccgaagaactcaaacagatcggaaaaccgtttgtcattcttctcaattgccgccaaccggaaacgcagggggatctgcgtgcctctttggaggagaaatacggcgttcccgttattgccgtcaatgccgaatctctcggagaggacgaaatcatgcagattatgcagaaagtcctttttgaatttcccgtggtcggagtcgatgtcagaatccccaaatggatacagtatctgccggaaacaagcaagaccgtttcggcaattttagcaaaacttaaaaaaattgcaccttctttgatacgcatgaaggattgccttttactcgaaaagctcttctgcgacgaagataaatttctcaatcccgacaacatttccatggaactcggcaagggacgggcagaaattcgcatcgaggcaaaagaaggtctcttttacgaggtactgagcgaagaatgcggagagaatatctctgacgatttttgcctgatgcgttacgtaaagtctctcgcggaagcaaaacgcaattacgacaaaattaaagaagcttttgccgatgcggaggaaaacgggtacggtatggtggcgcccagtgcggaagatatgacgctcgaacagccgaaacttattcgtaagggatcgggatacggggtaaatttcaaggcgagtgccgcaagctatcatatattgaaagtagaagtcacgggggaagtcaatcctattatcggaacgcagcaacagggtgaagaatttgtccgcgatattctcgccgattatgaggagcatacggataaagtctggaatacaaatattttcggcaagacgcttcgggtgctcgtttcggaagaattgtcggataaaatggacgctatgccgcctgatatccgcaaaaaaatgcgccgtacaatcacccgaatcgtcaatgaaggcaggggaggggtaatctgtattttactctgacaatacgggaataaaaaacggaaaacgggggcatacttctttcaaattctttttttgggagaacccttatcatgagtaaatcatcaaaaaacagaaaagaaaaagtacctaaaatgacggaggagcagtatgctgaatacgtcatggctttgaaggacgaaacgccggtaaagggctatcgggaactcgccgagggaaaacacgattcacctcatctcgaagccgagcatcacgaaagatgacaaaaaacgtacggaaacaacagaaagagcgcagcgacggaaagcctcgactgcgctttttttgtctatcggcaccatggacggagataataatggacgaatttttccgttcaaacgcctcgtttgtaactttctggcaaatttttatgctttctgacgagattttttctcaaaacccttgaccgcgggaattagatgtgctataataaaaagcgtaaataaagaggatacggtatcggcgttttttctcttattgcgtttttcttcgcgacggacatggctcgtttgtctcgccgaggaaaaatcgcttacgagaatttgccggcgctgccataaaaagttttctttcgtatattttcataaaattccccttgcgaacgtcgagacagggtttttaaggaaaattaaaaaaacggaaattattttcgtaaagggtatttactttttgacgaaaatggtgtaaaattataaacatagtagcttatccgatttttatattcgcaagcgaacaagaaaaattgaggtgtaatatgacggattacggtaacaacaatcagaaacaagctccttatgcttatgcaaacgtaccgcctcgggggaacgaaacagctctgatgatagaggggttgtataacggtctcacctacgatttgcaaaagatgaaaaaagagctgatgaacgagctcaaatacgcggcaatgcaatccagctccgtataccagtctatccagaaagagactgcttccgctacggagacgaacgctcaaaccgcgcaatccatggttcgcgaactgaaatacggttatcagcagaaccaaatgatttatgagtctttatccgcagttttgacggaggacgtgctcaccaagctggatacggtggagggcaaagtcgaacttctcgagcaaatcgataaagtactcgcggaaatcaaggagaagctcgaagaacttgccgcccgtcctgaacccgattacgaggctattgcggagacgataaaagaaaaaatcgtcgaagcggttcccgcggcggaagaaatcgattacgataagattacggaatccgtttccgaaaagacggagtcgagttttgccacgcataataaagagatcctcgacgctgtagccgctattcccgtagcggagaatatcgattatacccgcatcgtggaggaagtcagcgacaaggtgatcgaaaaaatccgcgaggggcatcccaaggccgccgaggaggctgtgtctgtagcggcgtcggagtcgaacgtagattacgacagaattatttacggcgcggcggagaaggttgtagaatctcttccttatcccgataagatagactatgcgcgcatcgacgacagctttttgaaggcagcggaaaacgctaaagctccggcggtagacgaggagcttcttgccgcaaatgtttcggctgctgtattgaaagccatttccgaaatggataccgacgctttggcagaagctgtggcggcgaaggtttctatccctgcggcggaagaaatcgattatgatcgtttgtccgatatgattatcgcgaagatgccggctcccgcagatcccgaacctatcgattacgacttgctggcggagacgattatttcgaaaatgcccgttcccgaagctgtcgattacgagaagctcgccgatgctgtcattgcgagaatgccggaggcaatcgattacgagaagatttcggagacggtggcggaaaaagtgcctgtatccgaaactctcgactatgcagtgatggcgcaaagcgttgccgaaaggcttcccgcggcggaaacaatcgactacgaccggttgtccgatgccattgttgcgaagatcccttcaacggcggattcctctattatcgattatgatagagtatatcaagctgcgaaagctgcggaagttcttcccgatcccgtcgattatgacaggattgcagaactcgtggaaacaaaaatgcccgatttttccaatttcgatatagacggtttggcgacgaagattgcggaaaaagtagctgttcccgattacgatgtgcttgtagacgaggaaggtcggaaagagatcgcgcaaggcgttgtggaagctttggattatgaacttctttccgaaaaagttgcagagaaggtggtcgttcccgttgcagaagttcccgaacccgaaactatcgattacgaactcctttccgataaggtggcggagaaagtcatcgttcccgaagttacgctgcccgaacccgaggccctcgattatgaaatgttgtccgataaggtcgcggaaaaggttgttcttcccgatgtggaaattcctgaacccgaaaccatcgactatgaattgctttcggaaaaggtggccgagaagattattattcctcagcccgaagttcctacatacgatgtggtcgtcgatgcagatggcgcaaaatctatcgccgattgcgtagccgcggctatcgatctcgattcggtctccgaaaaaatagcagaaaaggtcgtcgttcccgaagttacgctgcccgaacccgaagccctcgattatgatctgctttccgaaaaggttgcagaaaagatagtcgtgcctcaacctgagaagacggaaatcgattatgaaactctttccaaagaagttgcggagaaggtcgaagttcccgcttttgaagttttggtagacgaagaaggcgcagaaaaaattgccgacgccgtcgttgaaaagattcgcgcttgttgtcccgcggtgaaagaggaagaaagcgtttgcgaagctgcggaagaagaaaacggcatagccgcggaggagacgcaggaagaagctaaggcagaagaaaccgaaactgaggcggttgaggaaacaaaatctttagaggcggagaataccgaagagtcgcaaactacggaaatgtctcaggaagcgatttccgtggaagaagaaacgattgcggagcaagccgttgaagaagtttccgaagaaaaggtagaggaaatagcagataaagccgaggacgaagcagccgtagccgatgctgcccccgaaaccgataatgaatctgagagtgaaactgagactgaaaatcagacagagtccgaagcgtatgcggatgaagctattgaagcggctgagacgtctgcatctacggaaattgcggcggctgatgcggaaacaaattcttatgacgaggtagaaaataatctcgtcgacgcagatacgggtttagtgattcgtttgaagagaagtttcacggctaagatgaaacagagcgaggataacgtaaaggggtattacagcaaaattaaaaatgaattgacctcttataagagattgaattctaatttgagctggcatggcgacagatttaatttcgggcgcgaaacagtagcgaagttaaatatctgcggtaagacgctttgcttctatcttgcacttgatcccacaaatcctgattataagacgaccgtttatcatcagagagacgtaagttctcaaaaagcttatgaacatacgccgtttatggtaaaagtaaagagcgatgcaggagtcaagaaggcattacgtttggtcggcttccttgcagaaaagctcggtacggataaacgcgagaattttgaacctgtagattacgttcaggaatttgaacatgagtctactaaacagttgttagaaaaaggactcattaaagttacaaaagaaaagaaagttgtgttagatttcaattaatcgctgttaaacgaaatcatacataagaataggaaagggagagctgataatgaaatattttcggctctctatttcgtgaaaggacaaccggtcctttaaggagaaagttataaacagtggatattaaagaacaaaacagaactccgagaaagcgtccgtcgaccgaaaagctcgacggcaattcggagagcgaaacgaagaggcgtttcgcgaataacagaactaatatccgttccgcgggaagcggagcgggtacttccatgcaggcaacttccctgcccaggcgacgagcgagtaagacagataaagaatcgccggctgcacctcaaagacaagcaaccgtaaaaaagactttttacaatatcccgcgcgacgctgcgatgcttcgcaagcccgcttttgaaaattcagaggagtttcccgttttggcggaaaaaagaggccgcggactcaaaaagaaaagagcggttaaaattctttttctcggcggcgtaggggaaatcgggaaaaacatgactgccatagaatatggcggagatatcgtcattatcgacgcggggcttacttttcccaataacgaggatatgccgggtatcgatctcgtggttcccgacattacctatctcgttcagaataaagacaaagtaaagggaatccttttaacgcacggtcatgaagatcatatcggcggcattccttatcttttaaaagaactcaatcccggaacgcccgtctacggtacaaaactgacgttgatgcttgcggacaataaaattcaagagcatcgtatccaaaatgtcaccgaacgggtagtgcagccgggggacagaatcaaattaggcgtttttgaagtagaattcatcaatgtcaaccattctatttccggcgcggtagctttggctatccgcacgccctgcggacttatttatcacagcggagatttcaaaatcgacctgactccggtcgcgggaaaacctatcgacctcgaaagaattgccgagctcggacatgagggagtgcttctctatatgggggaatcgacgaatatcgaacgtcccggctatacgatgagcgaaaccgtcgtgggaacgacgctcgaccatctcttttctgaaaatatgaaccgcagactgattatagcgacgtttgcttccaacgtgcatcgtttgcagcaaattatcgatttggccgtaaagtatcgccgtaaagtggcgctttcgggacggagcatgttcaaggtcgtggatgccgcggtaaagatcggcgaactgaaaatccccgaaggggttcttatcgatatcgaaaagaataaaaacctgttcgacggcgagctcgtcatcgtttccacgggcacgcagggcgagccgatgagcgcgcttacccgcatggcttcgggagatttcaataaagtgacgatcggcaataacgatacgatcatcatttccgccacgcctatcccgggaaacgagaaaatggtatatcgcgtcatcaataacctttataaaaagggtgccaacgtcatttacgaaagtctcgaaaaaattcatgtttcgggtcacgcctgtcaggaagaacacaaaattttgcataatttgctcaatccgaaattttttattcccgtacacggagaatacagacacttgaagcgtcatgctctgttggcgcaggaattggggatgccggaacggaacattctcattacggaaatcggaaattgcgtagaattgacggaagacacgataaaattgggcgagaatttccccgcgggaacccgtttgatcgacggagaaggattcgaggattacggtaccagcgaggtgatgaaggatcgtctgagaatgtcggccgaaggtattttcatggtcactttggcagtgacgggaaactatgtcatcaacgatccgattatcgaaagccgcggttacgtctttgcgggaaacagggattctgacaaggaaataaagaccgtcgttcagaaagcggttgaacagtacgattacgaaaacggaaccaaggaagaacttgccgccacggtaaaaaaggccttaaaaaattatattttcaaaaagaccaaacaatctccgttgattgttcccgtcatttttgaggtgtaaatcgggagcggcgcaaaaaatatcgaaaaaatgaaatatgcgtcatctctcttaaaactgaatatcgacgaacggataagatgtctccgcaaggaggctctttcccgcggaattcccgtcgcggaggacgaaactttaaattatcttttgctgatgatttccgctgttcgtccgaagcgtattctcgaaatcggaacggcggtggggctttcttcggcggcgatgctgctgcaatgtccgactgcgcaagtggttacgattgaagtggaagaggagcgctatctcgaagcgaagaaaaattttgagaatttgggactttccgaacgcgccacctgttatctcggcgacgcaggggaaatccttaccatgatggacggctgtttcgattttatatttttagacggtcccaaagcgcagtatgagaagtatttgttcgatttgaaacggttaatgcataacggcagcgtgctctttgccgacgatgttcttctatacggctgggtgagcggagaagaacctactcccttaaagagacggtccatcgtggaaaaaattcgcggatacctttccgccgtttctgcggataaggattttatcacatccgtattgaatatcggcgacggagtagcggtatcggttttgacgaaggaagacagtgaaaaggacggcgaatgaaaacggaacttctggctcctgcgggaagctattcaaaattggaaacggctctgcattttggtgcggatgccgtctatatcggaggaaaggcgttctctttaaggacctttgcggacaattttacggagaaggagctttgctcggccgttgattcggcgcaccgatacggaaaaaagatttacgttgcggcaaacgtatttgcccgcaacggggattttgaaaatctgaaagactattttcgatttctgaaagatatcggaacggatgccgcgatcgtcagcgatcccggcgtgatttatgtcgcgaaagagtcggcgcccgaactcccgcttcacctttccacgcaggcgaataccgtcaataaatatgccgttcgtttttggaaagaacaggggatttcccgcattattctcgctcgggagctttccgtttccgaaatttcggagattcgggattttgtccccgatattcagttggaggctttcgtacacggcgcgatgtgtatatcctatagcggcagatgcctcttgtccgactatttggacggaaggtcctccaatcgcggcgcctgcgtgcaagcctgtcgctggaaatatgaaatccgggccttgaatccgtccgacgacggcgaaacgggctggctgcctgtcgaagaggacgaaaaagggacgtatattctcaacagtaaggatttgaatatgctttcgagactttccgagctggaacgagcgggagtgaattccttcaaaatcgaaggccgaatgaagagcgaatattatttggccacggttatcaacgcttatcggcgcgcgttggattcgggtgcgtcacgggagatcgaacaggaactttgcaacgtggcgcatagagactatacacaggcttacgcttccggtaagaattcttttaccgtcggttataccgacagtcagaccaaaggcgattatacgtatatcgcaaatgtcatagattccgaaaacggatttgtgaccgctgaaatgcgcaatcgttttcgggcgggagatgttctcgaagttctttctcccgacgggaatttcgagaaaactttcgtcgcggaaaatattttcgattcttcggggcaaaagacggacgacgcaaagctcgttcgggaattttaccgaatcgaatgtcctttcgcgttgaaaaaaggagacttattgaggcggaaaaattccgcggaggagtcgaaaaaatagattgaaaccctttcggaatttttccgaaagggttttttcagatttcttgaaaaagtggctgcctgcatttgactatacgggtaaaaaaaggtataataatagcataaaaattgtctcagaagggcaaaacagtcgtatatgaaaaaaattcttatgatagcgacgggcggaaccatcgcgtccaaacccacctcggacggtctggcgccggggatggattcttcgggacttttgagttatgtgcccgaaataaagaaattctgcgatgtggattccgtgcagattttcaatatcgacagtaccaacattacacccgaacattggctgaaaatcgcggcgacaattcgggaaaattatgaacgttacgacggtttcgtcgtatgtcacggtacggataccatggcatacaccgccgccgttctttcctatatggttcagcattctcccaagcccattgtgttgacgggttctcaaaagcctatcgataaagaggataccgatgcaagaatcaacctcagagacagttttctttatgcttcgtcggataaggcttccgacgtcgtcatcgtctttcaaggaaaggtaattgcggggacgagagcaaaaaaaatccgcacgaaaagtttcaacgctttcgacagcgtggattttcccgaactcgcgcggatccgcgacggaaaaattatttcgtatatcgctgcaccgaaacgggaaacggcggaattttattcctccctcaacaggcgtgtgggactcatcagcttaacgcccggaatggacagcgccattctcgacgtatatttcaaatataacgacgcggtagtgctttcgggttacggaacgggcggaattcccgagggagagtattacggtttttatgacgtaatagaaaagtgggaaaataagggaaagactttggtcgttaccacgcaggtacaaagcgagggaagcgatatgagtatttatcgagtaggacggggcttgaaagagcgcttttctctgctcgaaagttatgatatgacctatgaaagcattctcgcaaaactgatgtggattttgggtgagacgaaaaatcccgagaaaattcgggaaatgttttataaaagcatcaattacgatttaatcgtttgatggggaaaaggaggcaaccatggaagatttcggcactttcggcgagctcaaatacgagcggcccgatttcgacgcactgaaagcgttttataccgctttgaacgaacgggtaagaaacgcaaaaacgtacgaggaagtaaagatctgcatgcgggaagaggaggaatattccgcgcatgtttccacaatgtatacgatagcgagcattcgacatacggtggatacttcggacaaattttacgaagaagaggacaagtatctcaatacgcagtatcccgaagccatgccgtatatgcagtcgttcagtctcgcgcttttgaacagccccttcaaatcggaaatcgataaggaatatggggaatttttcctgaaaaatatcaagttgggcgtggatagtttctcggaaaaaaatattaagctcatgcaggaagaaaacgagctcgtagaccgttatcagcgcattatggccgcgtgcaaaattccctttgagggggaagaatgtaatttgtacgggattcagaaatatttttcttctcccgacaggaatatcagaaaagcggcatggaaaaaatactccgagtttttcgcctctcatgaaaaggaaatgggcgaaattttcgataagctcgtaaaaatccgcaatcagatgggacggaatatgggattttccgatttcgttccgctgggatacatgcagcagggacgtctcgattacgatgaaaaggacgtggcctctttccgtaaacaggtggaaaaagtgctcgtgccgttctgcgaaaaattatataaagcgcaggcgaagcgaatcggcgtggataaaatcagatgctatgacgaagaattcctctttgaggacggaaacgccgttcccgtaggtaatcgtccctatctcgtagaacaggcaaaaacgatgtatcacgaaatgagtaaagagacgggcgaatttatcgattttatgctcgaacaccagctcatggatctcgataataagccgaataaggcctcgacgggatatatgacctccttggccgattataaagctccgttcgtattctcctgcttcaacggcacgacgggcgacgtggacgtgctcacgcatgaaatggggcatgcgttcgcgggatatatggcgatgcgtacgcagcctttaatggcccaatggagcgaatcgacggatatagcggaaatccattccatgtctatggaacaattcgcctatccgtatgcggagttattcttcggagacaaagcggaaaaatatcgtttccagcatttgcaggaggcgctcacgttcgtgccgttcggcgtggcggtggatgaatttcagcatatcgtctataaaaatcctgatctgacgcccgaacagaggacggcggaatggaaaaaactcgaaaagaaatatatgccttggagagactacgacggggacgaatttttcggaaaaggcggttggtggtatcataaaattcacattttccactatcctttctattatatcaattatacgcttacgacgatgggagcgatggaatttaagaaaaaaatggcggagaataaagaatcctgctggaacgattatatgacgctctgccgtgtcggcggctcgctcgggtatctcgatacgcttcgggctgcaaatctgtctgttccctttgaagcgggaagcgtggaaaaagcgacgggatatgcgatgaatattctcgaaaaacaaatgcaaaaggagtaaaacatgcggacttcacaacttaaaaaatatgcaaaattattggcaaggacgggcttgaacgtaaaaaaaggacagtccgtattcattcaggccggactcgatcagcccgaattcgtggcgatggtcgtagaagaatgttataaggccggagccaaggcggtctatgtagagtggagttatcagcccgtcgcaaagctcaatgcgacgtataagagccttgaaacgctttcgacgctcacgccttgggaaaaagcaaaatgggaatataaggcggaggatctttcctgtcgcttgtttatcgattcggaagacccggacggaatgagcggcatcgatcaggaaaaaatgagcgccgctcgccgtgcgcagtatccccagctcaaacctttccgcgaagcgatcgaaaacagacatcaatggtgcattgcggcggttcccggcaaagcatgggcgaaaaaagtttttcccgacctgcccgaaaagaaagccgtcgaaaagatgtggaaagtcattctctatacggctcgcgcggacggaaaaaatccgataaaggcatggaaagaacataatgccgatctcgaaagccgttgtgcgtatctgaataatttggggcttaaatatctcgaatacaagagcgctaacggtaccgattttaaggtagagctcaatgaagacggtattttctgcggcggagacgaaaagactttgaagggacgggtattcaatccgaatattcccagcgaggaagtatttacttctcccaaagcaggggctgcggaagggattgtctacgcgacgaaaccgctctcgtatcagggcgaactcatcgaaaatttctctgtgcgcttccaaggcggaaaagtagtcgaagtcaaagccgaaaagggagaagaactgttgaagcagatggtttcgatggacgaaggtgcgggaatgctcggcgaatgcgcgttgattcctttcgattctcccatcaataattccggggtattgttctataatacgttgttcgacgagaatgcgagttgtcatctggcgctcggacacggatttaacgaatgtctgaaaggatatgaaaattatacgaacgatcagtgtaaggaacgcggaatcaacgacagcatgattcacgtcgatttcatgatcggagcaaaagatatgtcgatcgtcggaattacgaaaacgggcgagagagtacaaattttcagagacggaaattgggccttctgaacaagttttttctctgtgtggcgccgaacgtgtgtttgaaaattgtatttcggcgttatatataaaggagtataactttaagaggtgtttttatgacgaaaatagatatattttccggctttttaggagcgggtaaaaccactctcatcaaaaaattgataaaggaagcctacacgggcgaacaaatcgtactgattgaaaacgaattcggcgaaatcgggattgacggcggatttttgcaggacgccggaataaaaattacggaaatgaattccggttgtatctgttgttcgctggtcggggatttctccgaagcgctcaaaaaagtcgaagcggaatatcatcccgacaggattgtgatcgaaccttccggagtcggaaaactcagtgacgtgatcaaagccgtttccaatgcgaagttggaaggcgccgttctcaatgcattctgcaccgtcgtcgacgcgggaaaatgtaagatgtatatgaaaaatttcggcgaatttttcaacgatcaggtggaaaatgccgcctgcatcgtcctttctcatacggacggaatatccgaggaaaaactcgcctcctgcgtcgaactgcttcgcgaaaaaaattcttccgcgacgtttgtcaccgcatcttggaaacaacttgaaggaaagactatccttgccgccatggaaaagaaggactctttggaggcagaactcaaacgccttgcggtcgagtatgaaaaagagcaagaggttggcggggaacaccacgaacatcaccatgacgacgaggaatgttgccatcacggacatcatcacgacgacggggaatgttgccaccacgaacatcaccacgatgatgaggagtgctgccaccacgaacatcatcacgatgacggggaatgctgtcaccacggacatcatcacgccgacgaggtatttacaagttggggtttggaaacgacgcataagtttacgaaagaagaattggaaacggcgctttctgtgctcggaaacgaggccgaatacggtacggtgcttcgtgcaaagggaatcgtcgacggggcagaaggctggttccatttcgactatgttccgggagagccggacgttcggacaggcagtgcgggggtaacgggcagactttgcgttatcggctgcaaaatcaatgaagaagctctcaaaaaattatttaaggcataaggaattcatatgaaaaaaaagcttccgcccgaaactcccgtatatctatttttggggtttttggaatcgggcaaaacgaaattcattcaggaaactttggaagacgaaaggtttgatacgggcgaacggactttgttgctcgtgacggaagaaggggaggaagaatatgacccttctcgttttgccgtcaagaatgtcaccgtagtcactttggataagaaagaggaattcaacgaagaaaaccttacccgattgcaggagagttgtaaggctaagcgggtattagtggaatataacggcatgtggcttctggacgagttttataaagctatgccggaaggttggatgatcaatcaggtcatgacgtttatcgattccaaaaccttcctttcctataatgcaaatatgcgccagctcatgttcgataagatacagaacacgcagatggtcgtattcaatcgtttgcccgaagagcaggataaaatggaattccataaacttgtgcgtgccattacccgcagggcggacattgtttacgagcacatagacgggaaagcggaatacgacgatatcgaggatccgcttcctttcgacgtaaaagcgccggttatcgacatagaggatagggattacgcctttttctatcgcgatttgtccgagaacatggaagattatatcgggaaaacggtaaaattcaaaggaatggttgcgacggataaacggcttccgcccgataatatcgtcatcggtcgtcatatcatgacctgctgcgaagcggatattcaatacagcgggctcgcgtgtattctgcctcaggcgatggagctgaaaacccgtgactggctggaaatcacggcgaaaatagaaatgcaggaacatacgatttatcggggaaaaggacctgtgctgctcgccaaaaaagccgagcgttgcacgcctcccgaggaacagctcgctacattttattgaatagcaaataaaaaagaaacggtttttataccgtttctttttttataaaactattgacaatcaggaaaatactttgtataatataattacttaaaaaataaaagagggggatatgtatgcaaaaagtaaaactgcccaaagacgcccttgcggcaagaattgtctttgttatcgggttaatgataattgtcggcatgatggtaacctttattgtagttctgattatgcagactttttttcctcagtcggcttcgcaagaaacttgtggctgtatgagtccgtcggccaagatttttttatttttattaattttcggaccatttgtgactttgttcgcctgtttgttttttcttatcgcttgggcaattttatatgctcccgatctcatgacagaaccggagggagcaaaaattttgaaaaggcgtagaaaagtttatctttccttcaccatcatttttgctctgttagcgatcggaacaatactgctttttgctttgtggccaataagatgatacaaaaaacgaaccgctgttgcggttcgtttttcatacagacgtcagccgacgataatattgactaaccgattgggaacgacgatacattttttaatcgtttttccttcgagtagaggagcgatttcgggggaagtacatacggcgccttgaatttcctcattggaaagtcctttggcaattattattttcgcgcggattttactgttgatttgtatggcgtattccgtttcgtccttgacgagagcgctttcgtctgcgacgggataggcttcctcaaatacagagttcttatgtcccgtaatctcccaaagttcctcggtgaaatggggggcaaagggtgcgagcaggcgaaggaaatcgtccacgcacgctttgaagaattttatattcctctctgcaccgagagcctcgtatttttgaagggcattcaggtattccatcagtctcgcaacggaggtattgaaggaaaaggcctccaaatcccgagtgatatttttggccgcgtagttgcggatataattcaattctttttccgcggctgtgtttgcttctatgttattgttttcggtttctgccgcttttcttaccaggcgttcgattctgtcggcaaattttgcgatggacttgatgccgtcgtcattccagggcccgccttccgtataactgaaaccgaacatgagatagagacggaatacgtcggatccgtactcttcgatatatttatccggagaaacgacgtttcctttggattttgacatgcgatttccgtcagggccgagaattactccctgatgaaccagtcgtttgaaaggctcgctgaaatcgagataccccatatccctgagcgccttggtgataaagcgggcatagagaagatgcatgcaggcatgctccgcaccgccgacatacacgtctacgggcaacattttatcgacaatttcctttgagaaaggctgcttgtcgttatgcgcgtcgggatagcggagataataccagctcgaacaaacgaaagtatccaaagtgtcgggatcgcggcgagcttttccgccgcagacggggcaggtacagttcataaatttttcgttcgctgcgaggggagatttcccggtaggccgaaattccacgtcgtagggaagttttacgggcaaatctttctcggggacgggaaccacgccgcatttttcgcaatgaatcatgggaatgggcgcgccccagtatctttgacgggataccgaccaatcgcgcaggcggtaatttacttttttgcagccctttccgagcttgctgagataaatggcgacggcgtttcgggcttcatcgccggacagtccgtcgaactcgccgctgtttacgagaatgccgtcctcgcagaaggggagcaccgtttcgccgcccttcttttgtatgacctgcgtaacaggaagattatattttttcgcaaacgcgtaatcgcgttcgtcatgcgcgggaacggccatgacggcgcccgtgccgtaggaatagagtacataatccgcaaggtatacgggcagttgttttcccgtgagcgggtgtgtcgcaaaagctcccgtaaatacgcccgtcttttcgcgtgccgtggagagcctgtctatatcgttcgcctcggaggcgtattgcacatacttatcgatttctgctgcgcgctcgggatgagcgactttgaattttttcacgaggggatgttcgggggcgagaacgacgtaatcgacgccgaataccgtatcgggacgagtcgtaaataccgtgatgacgtctcccgtttcacaatcgaagttaatttcacagccggtggattttccgatccagtttttttgcatgagcttggtcttttccggccagtccaacccgtcgagatctttcaaaagctcctcggcgtaatcggtgattttcaaaaaccactgcgtcatattctttctggaaaccacggctccgcagcgttcgcattttccgtccacaacctgctcgtttgcgaggacggtttcgcaggaggggcaccaatttacgagcgcttccttccgataggcgagtccctttttatagagctgcaaaaacagccactgcgtccatttataatagtcttcttcgcaggttttgacttccgcggaccaatcgaacatcgcgcccatgttccgaagctgttgttccattgtggcgatatttttttccgtggagtctttgggatgaatccccgtctttaaggcatagttttccgcggggagtccgaaggcgtcgaagccgatcggctgaaatacttcatatccctgcatttttttgaatcgggcataggaatcggtcggaccgtagttataccaatgcccgacgtgcagttttgcaccggaaggataggaaaacatttcgaggacataccattttttgtccgcattctttttattgaaattgttctgtctggatttttcccatcttgcctgccatttgctttccaccgacttcatgtccatagtaagacgacctccgaaaccgcggtatgccgcgccttaaaaatgctttactttcgttatattatagcttttttttcctttcaagtcaagcaaataaacggaacgggagatttctgcatagaaattttacggcaagaataaataattccgtttccgcggcatacaataatgttgtggaaaaaataacggtcactcaaagcggcgctcaaagcccttatatgtcttacctttacggcaaagtaacggataagttttcttttcttcccaccgactgcggactggaaacggacggcgacaggaccactctcgtctttcgttcggaaagaaagtactgcccgtacatccgcaattatacggaggaaaatattgcggacgtcatcgcggtcggatataaatatcagtatttttcaaaaaatctttttttgccgctcctgtcggcggaagaaaaggatatattgatcaccgctctggtcgcggcggaccttcccgaggacagagaatatatcaaaaaacaaatccgcggctttgaggagtactgtatcgacggcatgttcaatttccggcttcacgacctcaaaacccgttggcggggaattgcggagtatattccctcggaattcacgtcggcttcgctcgaaagttttctggatttcctcatcggagaaaataacggaaaagtatttttgaaagagggaaaactgtatgacgaagattatcgcatcctgagccgcagttccttgatcggcggccgcgtgaatccgattcgggaaattcttttgagcggcgcggataatatttactgtttcgggtctcccgataaatccacgaaagaatttcttaaaaaatattacggggaaaaggtggttttctgctgaaaacggttgacaaacttttttcaaacggttaaaatatatcgtgtaaagacaagtagcgttgtttttcggattttcagagagtccgctcctcggctgtaaggcgggcaattcgggacaaaggcgaaaccactttatgttcgtgacaagattgaaaaaagcggtcaaattgtatttggcaattaaggtggaaccgcgcaaacggaaagtattgcgtccttaaactctcggaattttcagagtttgaggatttttttatacaaaaaataaagaaagataattgaagtacggaggaattagtttatgaacatcattctcaaaaacggcgaaagcatgcagcttgaagacggcgccacctgtatgcaggccgcctcggcgatttccgagggattggcgagaaacgcggtatgcgcaaaggtgaacggggaggcggtagacctttctcacgttctcaaagagggggattcgctggaaatcgtgacgcttaaagacaaggaaggactgcacgtctatcgtcatacttgtgcgcacgttttggcacaggcgctcaaaaccatttatcccacctgcaagctcgcgataggtcccgtcatcgagaacggattctattacgacatcgatttcgtcacgcccattacaaaggaagacctcgcaaaaatcgaagcggagatgcagaagatcatcaagagcaatcttcccgtcgaacgttttgttcttccgagggaagaagcgctcaaactcatggagggttacgacgaaaaatataaggtggaacttatcgaagatttgcccgaaggagaaacgatttccttctataaacaaggcaattttaccgacctttgccgcggtccgcaccttccttccaccggaaaaatcaaggcgttcaagctcatcaatatcgcgggcgcctattggaggggggacgaacacaataaaatgctcacccgtatttacggtacggcttttgcgaaaaaggacgaaatggaagcctatttccacatgctcgaagaggcaaaaaagcgcgaccataccaagctcggaaaagagctcaaacttttcacgctcctcaacgaaggaaagggctttcccttctttctgccgcacggcatgattctgaaaaacgcgctcgtcgaatattggagacagattcacgaccgcgaggggtatgtagaagtgtccacgcccattatgctcagccgttctctttgggaaacttcggggcactgggaccattataaagaaaatatgtataccaccaaagtggacgaagaagattacgccattaaacccatgaactgtccgggcggtattctcgtttacaagacggaaccccgcagttataaggatttgcctatccgcatgggcgaattggggatcgttcaccgtcacgaaaagtccggacagttgcacgggcttttccgcgtgcgttgctttacgcaggacgacgcgcatatttttatgatgccctcgcagattacgagtgagataaagaacgtcgtaaggctcatcaatgaagtttatacgctcttcggatttaagtatcacgtggaactttccacccgtcccgaaaacagtatgggcagcgacgaggattgggagaatgcgaccacggcgctccgccgcgcgctcgaagaactccatctcgaatataccgtaaacgagggggacggcgctttctacggccctaaaatcgacttccacctcgaagattccatcggcagaacctggcagtgcggtaccattcagctcgacttccagcttccgcagcgctttgaaatggagtatgtcggagaggacggtcagaaacatcgtcccatcatggtgcatcgcgtcgtattcggctcgatcgaaagatttatcggtatcctcatcgaacattatgccggaaaattccccgtatggctttcgcccgtacaggtaaagattttgcctataaccgagcgtcaggaagaatacgcgagagcattgtattcggaaatgaaggcgaacggtatccgggcggaactcgatttgagaaacgaaaaaatcggatataaaatccgcgaagcgcaaatcgagaaagttccgtatatgctcgtcgtgggcgaaaaggaagcgcaggataagctcgtttccgtaaggcgcagggacaaaggcgatacgggcgcggttcccgcggaagaatttatttcacagataaaaaaggaaattgccgacaaaacggctttttgacgggattttccaaattttcgggaattgtcgcttaaaaacgcttgacaagaaaagcaaatctatgttattctataaaagctaagcagaagcgaaccttctcgccgcgcggttgacatatcggcgcggctcgataatttccgaaatcgtcgaattagggattgttgcgggttgctgacgtttggcaatccgctattattttgacgtgaggtgtacgactatcaaagaacagtatcagttgaacggagatatccgcgacagagaggtaagggtaatcgcttccacgggcgatatgctcggtataatgagttcgcaggaagctctgcggcttgcggaagatgaaaatttggatttggtgaaaatttcgcccaatgcggtgccgcccgtctgcaagatcatgaattacggcaaattcaagttcgaacaggcgaagcgggaaaaagaaaaccgcaaaaatcaaaaggtgatggaaattaaagaaatttatctttccatgaccatcgatgtaggggatttgaacgtcaaagcgaaaaaggcgttcgaatttctcgaagacggaaataaagtcaaagtgtccattcgtatgcgcggcagacaaatggctcattcttccatgggcgtggaagtcatgcagcgtttcttcggacttttgaacggtaaggccgtcatggataaggctcctttgacggaagggagaaatattttaatgattctttctcccgcgaaataatccatagtgcagtacccgtccgcgagagcggtcggtacggataaagacagaaaaaatattcggaggataaacatatgcctaaacagaaatcccacagcggaaccaaaaagcgtttctggcttaccggtacaggcaaagtcaacagaccgcacggcggcaaaaaccataaagcggaaaccaagagcagcaagagaaggagaacgctccgtcagagcactctcgtttctcccactcaggaacataccgtcaagagtatgatgccgtataaggactaaggaaagaaggagaacgaaaaatgcgtattaaaagaagtgtaaacgcgctcaaaaagcgcagaaagattttcaagctctccaagggctatttcggaaacaagagcaaatcttaccgtatcgccagacaggcggtcatgaagtccttgaactatgcctatatcggcagacgcagaagaaagagagatttcagaaaactgtggattgcgagaatcaatgcagcggcgagaatcaatggtctttcttacagcaaactgatgcacggtctttccgtcgcaggcatcaatctcaacagaaaagttcttgccgacttggccgtcaacgatgctcccgcatttgcgcagctggccgaaaaagctaaagcggctctctgattgacactaaaagccttttagcttctaaaaggcttttttcgtgcattgaagaaaaaatgatactcacttccaaaaacaatccgttgattaaagagacgatttccttaaaagaaaaaaaattcagaaaggaaaagaaatgcttccttgtcgagggcgcgaaaatggcgtccgagtgcagaaagagcggactcgaaatcgagcgggtattcgtttcggaaagctatcgcggagaagcggacgattctgcaatccgcgtttccgatgaagtttttgcccgcctttcggacgaaaagactccgcaggggattctctgcgtggtaaaaatccccgaaaaacctctttgtcctccgcgggaaaactgtctctttttggacggaatttccgatccggggaacatgggtgcgattatacgtacggcaaacgccgccggatatagggaactctatcttgcggagtgtaccgatccctattctcccaagagcgtccgcgcgagcatgagcggtatttttttcgtaaatctgtatacgggaacgcgaaaagagattttatcggcgctttcgggcttgccgattttggcggccgatatggacggagaaaatattttcagcttttctccgcccgcaaaatatgttcttgcaataggaaacgaggcaaacggaatttcggaagaagtgttcaaagcggcggaatatacgatcaaaattcccatgcaggcctctcaggaaagtctgaatgcggccgtgtctgcgggaatagcgatgtatgttctgaaacgggaacaatttataaaaagtaatcgataggagttaaaattatgtccggacatagcaaatggcacaatatacaggcaaaaaagggcaaggcggatgctgcgaggggaagaatttttaccaaactcggcagagaaatcgccgttgccgcaaagagcaaccctaatcccgacactaacagtaagctcgccgacgttatcgcgaaggcgaaagcggcgaatatgcccaacgataacattatgcgcagcatcaagaaggctgcgggggaaatgagcggctccgattataaggaactcacttatgagggctacggtcccgcaggctccgccgtcattattacgactctgaccgataataataaccgtacggccagcgatatccgcgcggtgatgggaaaacacggcggctctatggggaacacgggttgcgtttcctataatttcgacaataaagggtatatcgtcgtggaacggaccgtagagcttgatgaagatacgatgaccgaatatgcactggaagcaggggcggacgatgtcgtaacgggagaagacgtatatgagatttttacgactcccgaaagtttttcggccgtcagaaaatatcttgaagataaaaacgcggaattgatggcagccgctcccaagacgcgcaggaacgaagaggaagagccgaagattcgtttcgtgcaggcagaaatcgctatgattcctcaaaacaaaattacgcttcccgcagataaagtcaagacctttgaaaatatgctggaggcactcgaagacctcgacgacgttcaggatgtttaccataatgtagaccttccggacgacgaagaatgataaaaaaaatcaacacctcatggacaattcccatagaaattaaaaaatagcgaagattttcaaaaatcttcgctatttctattttactcgataaattgaattttagttttgccttcttgctttaagtatcgttttacaaatatctgcatttttaactatattgttttgaaaatattgctctaatttatttatacttattcttgtatcggctgcctttaataaattcgtaatcccgtatttatcattaccaaagttttttgccaatatttgctctttgggactgtctaaatattctcttagcagctctgatatatcggatatttcagtagtatatggataatcctcttttgaaaccaaaatttttggataatcaaatataatttccctatttaacgttatccaatacctcggtaaatttgtactacctctttggctattcatacgatatactgaacaatgaatttgcaaattaattttattatctagtattaaatataattgtttttgtagattgctccatcttttcatacgattatttttctgattaccagctattaccgtcattatatagcataaggattaaaaaagtaagcactattagcaaaaaatggatattgattgccataatctgttggagaagcgatgtttgtctgaaatcaaacaatccttatcttttattttagcatttagcgggctcactttcatatcttttattttgttccatagcgattatgcgacaagcatcacaaaaaaacgaaacgcgcgcgaaatggctcgtctcaatatgattatcaaactcttacagacaccggcatatattgttatattttgtccgagaattatttttttagcaacgattttacgtttgcgtttcctttcaatttttttatataggaaaacaaaacttgaaaatttttgccgcaatttgatataaaggagaggaaaaattttatttcgtcaagtcccagtctatgggctgaattccgtttttctctaaataggcgtttgtttttgaaaaatgccgacacccgaaaaatccattaaatgcggacagcggggaaggatggggacactcgaggatcagatgtttgttttggtcgattaacggttttttactgcgggcatttccgccccaaagaataaagacgatatgttcctttttttctgaaatcatttgaataatactgtcagtaaaccatgcccatccacaggcggaatgagaatttgcccgatgtgcacgcacggtcaaggaggtattcatcaaaagcacaccttcttttgcccattttgtaagatcgccggattcgggaatgtcgcacccgatatcggaatgaagttccttaaaaatattttcgagagaaggcggtttttccacgccttcacgcacggaaaaacaaagtccatgcgcttgtcccgcattatgatagggatcttgccccaaaagtacgacttttaccttttcaaacggggtataacgaaaacagttgaaaagatcatacatatccggatagaccgtataatggttatattcgtctatcaagaattttcggattttcaagtatcgttcatctgcgaagagaggggctaaaagttcgttccaatcgcctaaatcgaccataattttctttccctgccttgtgtttatatttattttttaaagctcttccaacaaagtcggaaggtatgtttttagattttggagcgctttatccttatttttcagatattgttcagtcgtgctcccgctacctgcaacatcggaaatcgctttgacggaatagaccggtaattgagccgcataagctgcctgaacgaccgccgcgccctccatatcccgaatatctgcctttaatgtatcagtaagaagccgataatcgtcaggtgaatcgttaaagcggtcagcggttcctaatgctttcttttttaagggagctttgaaggaggacaattttaaataattttccgtatattcgtccaaggtacctattttggtaccgtttaactgcgttacgtcaaaatcgaattgaacggcggctttaatttggtatacgccgcagagttccgtggaatcattcaaaccacccgcaacgccgaaattgaataatttttctgcgtcgaatttgctgacgagcagctgtgttccgagtgcggcatttacttttccgactccgcagactacgagggcgatgtcctttccgaatgcacggccgacatgaacagtttttccgctcacagtgagaacgcggaaagtctccatttcttccaataaaatttccgcttcgctttccaaagcgactacaattccaagcataatcagtattctccttttctcgtgtaaaattcctcttttaagtctttataagtgtacaactgttataatagtgtaacagattttgcgaaaataatcaaacggttgaataggttttttggcgaatgtagataataaacctatgaaatttcctttcggaggtaaaaaaatgaatccatttgaagaaaaaccgcaaaaaattgaaaaaagtttccaaaattggaaaaatgtactcatcaagccctatgacaagcacacggtagatccttatacccgtttgcgcatcattttaatggatggtacggagtttgagtccgtgcgtttcgggcatagttatacacggaattgtacgaataacgatattcgtcgcgaattggctctcattcgcagaagcgaacagattcagcaaaagagaatcgcttccttaaaacccatggatgaaaatattctcgaacatactatcgggtacgagcagctggcggtcgatttaacggcaaatcttgcaaaatcggaaaagaacgattacgtgagacaacaattaaacttcgcccttttggaagatttcgatcatttgtatcggtattccgatttaatggaattggaaaaatctggcgatcccgcgcttctcgtaggggattatacagaaatcatgcccggcagacccacggtagcggaatatcgtcatcctttcgacgatgtaaaattcaatatcaacagttatctgaataatacgcttacccgacttcatgtcaacatcattaccgcggcggaacaacagacgatgaactattatatgaacgtcgccaatctgtacgtgagcgatttgggcagaaaattatataatgaaattgccatgatcgaggaacagcatgtcacgggatacggctctctcaaagattcttcctgcacgtggctggaaaatctcgtcatgaacgaatataccgaatgttatctctattattcctgttacgaggacgaaaaggatccccgaatcaaaaaagtttgggaacaacattttacggaggaaatctcgcatctgcataaagccgccgaattactcttaaaatatgaagggaaagtatggcagcagctctttcccgagggcggagattttcccgaacttctcaaattccgctcccaaaaagaatatattcgggaagtgcttaaaagcgtacgcttgacggcagtggaggaaggatttagagagctttcgtctatgccggataatttccgctatttctcctataataaaggagttaacggaaacttggaaaaggtcgggactcattccgttatcaatcttgccatttccgaattcggcaaggattatcggatagagaataaagcgcatcccgtcgaagcgctttctaaacgtaccaaggacaatacggacgtaggcagagtcaaggacgcttgaccgaccgacggctaaatctcccgtaattcaatcggtccgacgcactatacgagcgtcggaccgatttattttgtccgaaaaatatcaaaggtggatttgaaagtcgtcatacttgaaaataccgtttccctgatgcaaaagttcgttttcatacagcatgtcaaaagcatcgcctatccgttcaattatctttggggaaatttttaagctatgatgtccgggaaaaagcctgtttatctccaatgcgcggattcttttgacggaatcccgaaattgctgtggatttgtagtgggataaaagatgtctaaacagccgctgtaaattaagtctccggaatataagtatttgcgctttggctcatagaagcaacaatgccccggcgagtggccgggcgtatgaatggcttctatcaccctgccgccgatatcgattcgctctttatcatgcagaagttttttaggaaaaccttgaaaaatccgatatttttctatattgaatcccgaagggaacgggcagggaactttcgtaagagcttcaattaccgtctgccgcggtatcggaaacttgacgaacagccaatctttttccgcttcgtgcactgcaatatcgtcaaagtatttatggcctccgatatggtcccaatgcgcgtgcgtggtcagtaccgaaacgggaagtgcagtcagattttctacgacttttttaatattttcaatccctaatcccgtgtcgattagaagcgctttttttgttccgcataaaagataacagtgcgtttcttcccaatgcttgtattcgctgataataaaagtatccgagtcaataggctcgacagtaaaccaattttccatttttataatgagatttgtaagggcagttgaaatgaggctgaaatattcttccgccttcgtctcgcatagattttttcttgaaaaaattaaaaaaaagtgctataatgaaagaaactcggtattgtcgcaacccttttcccgacaaagggtaacgatatgtccgtctttttgatacacggaaatgcagacgggaagctccaatcccgaatagaaaatttttccgccgataaaagaaatttttttcagatccgccgcgagagacccgcccaaccatttgacggtactttcgattgcggtccaatgatggagaaaatcttcttttccctttatttcttcccgctcgtcgaaaggaaatctggaaaggatggggcgataatcgatttcccttgaaatcagttcggcgtctattcctatattttcgtcggaaacggcaataaatcgcgtttctttggtatgcgtgacagaaaaaaataaaggggtattctctaagaaaggtttccccgtttcgctcctcgaaattacggcgtctctgattcgatagtgctcgaaaaatacctttcgtatcattcgctcgctgtcggaaaaattttcggttttcgcaaaaaataccttttccataaaattattataacaggagtacaaataaatgtcaagagcggatattgcaaaacaaaattttctcaaaggttatacgtgtgcgcaggccgttttgctcgctttttccgatattacgggggcggacgaagaaacagcgatgaaaatttctctcccgttcggcggaggaatgggaagaatgcgtctcacttgtggagccgtcagcggcatggtgatggcactcggtttgatactttcccgtgcggaggtcgattcgtcaaataagagggacgtctatgcggcggtacaggaacttgcaggcaaattcaaaacggaaaacggcagcgtcgtttgcggcgaacttctctcgggagcgcatttgaaagcaagtacggaagccgtccccgaagaacggactgcggaatattataaaaaacgtccctgtcccgagctcgtatattcggcggcgaaaattttagaagaatatctcgaagcgcaaaaagatatacgtcctgaaaaatgaacagataaatttttcaatggggagggaaaaatgatcgtttcgaagataaaggccgccgtttcgggcaatgtcgaaaaagtctggaaattcgtgacttcggttgcggattacgatagctggcgcagtgatttggacagaacggaaattttaagtccgcggcagtttgtcgaatacaccaaagcgggttatgccaccacttttacgattacgtattgcagtccgtttgaacgctgggaattcgatttggaaaacgacaatctgaaagggcattggacgggaatttttgcgcaaaggggcgacgagacggaaatagagtttacggaaaccgtgacggccaaaaagttctttctgaaaccgatgataaaattttacctgaaaaaacagcaaaagaaatttatttcggatctaaaaaaagcattggcgtaagattttcccgacgtcaatttataaagcgcagctcgtttttttaaagaccggcttgacttttaaggcagcaaaacataaaaaagcgcggaattatccgcgctttttccgtttgaaatttttttcgccaaaaattactttgagcttttagagacgttaaaataatattctacgacgtctccgtcctgcatgacgtattctttcccttcggaacgaacctttcctttttcctttgccgcggctatggaaccgagttcaaccagcgtttcccaattgacgacgtcggcccgaataaaccctttttcaaagtcggaatgaattttccccgcggcctgcggagccttcgttcccttgacgatggtccaagcccgggtttccttttctcccgccgtcagataagaaatgagccccaagagcgcataggattttttgatgaggcggtcgagtccgctttctccgagtccgaattcttccatgaatacggctttgtcgtcgggatccatttgagagagctcttcttccgttttcgcgcagatcaccaaaacctcgctgtgttctttcgcggcaaattttttcacctcgacgacaaaggggagagcttcctcgtctttgcccatatcgctttctttgatgttggcggcatagattaccggttttacggtgagcagaaaaagatttttcaaaaactcctcatccgtatcctgtacggggaaagtccgcgcaggcttttccgcttcgagatgtgcgtacagcttttcgagaaaagcatattcttccgcggcttttttatcggctccgccgcgcgcgttgctcttaatttttcccaacctgttctgtacggcttccatatcggagagaa

SEQ ID NO: 3685 - DNA, 10568 bp, Unknown
  16S sequences of unknown bacteria
ttctggcggatgaaggtgatgttggcgaggtcagggatcgagcggatctcgtcatagatggcctgcttgccgcctgccagcagacgctcctccagttcaggagagcggtcgaagtggtcctcaatggcgcccttgccccgaccggtgatgatcaggatctcagtgatgccggccttcacagcttcttccacaatatactggattaccggtttgtccacgatggggagcatttccttggggatggatttggaagccggcagcacacgggtgcccaggccggcggcgggaatgactgctttgcggatcttcatggatctaagtcctccttatatgattcaaagcatggtagttgccaggatctgataggtgatgaggtaggagatgccaaataccactgcggcactcagcagggccatgccgtaacccattctggggttggtgcgtccgttgaacgccagcatggtgaggtactggtcctgggacagggtcgagggagcagcactgcggagctttttgatctcccgcaccacatgattataatagaggcggtcactgaacgaggccaccacgaacatcagagccagctggacgatgttgatgatggagatcagggtgcccaggttgttgagcagacccagatcgtaatccaccggaacctgcatatagacattgaggaaatacttgatggattcgctgctgtacatcagacgggggataaacagcatggcgaccagcgacatgacaacgatagccggacggtagagcttgcggtagaacaggaagcagtagttgaagaagaacgccgaccagttgaagctgaagttgtgccccgaatcccgcatcatcttgaatacgctgagatagcggcggtaattcggcccgataaagacagcgatttcctgggcggtgacaccgtcgaaatcgtcatcctgatagatcggccccatgggggtcataataggctggggctctgccggacgggaatagttctgatacccgccggactggaatccgccattctgatagcctccgttctggaacccgccgttctggtagctgccggcctgacgcccgccggctgtgtttccgggctgcggaccctggtaactgccgtccagcggaataccgcaggtggcacagtactgggcatccgggagattcacagcgccgcaccggggacaggtgacattctccttgggagcggcttcctgacgggggtcctgccaggtggagccttcggtgtgctgatcctgccgggcgcagtgccccagttccagatagcagctgcggtgatggggagcgccgcagtccgggcaaaccaccacatcatcgtcctcagtgaatggcttgccgcacttggcgcatggtacattgacatacttgttcatggtatcctcctaaacatccagggtgggaacgccctgaaagggctcagaattctgggccttttgcactaattcaatattatatagtagttggaagaaaaaagaaaggcagaaaatatgaataaatggacccgattatgaacggaaacggcagaaaaacaccggaatgaccgggtcttacagattattctttacaagtacgccgccggatactataattataatgtattataatctaaaaacggaagaaagggaaacgctgtatatgctgcaatttgaagaactgcgcctggggctgctggcacaggaaggcgagctgaagaacctgtatgaggcgatggacattgagaataagaagtcccgtcttgaggagctggaagctcagactgccgtaagcggattctggaatgaccaggagaactcccagaaggtagtccgggagatgagtcatatcaagaatgtgctcaagggctatgaaaagctgcgcagtgcttatgacgatacactgacactgatcgaactcgccattgagatggacgatgaaagcgtctatgaggaagccaagaagggctatgattttgtcatggctgatctggagacccagaaactgtccactctgctcaccggcgagtatgatgaaaacaatgccattctcaccttccatgcaggtgcaggcggtactgaggctcaggactgggctcagatgctctaccggatgtacacccgctgggcagagcgtcatggcttcaagtacaagatcctggactatctggacggcgatgaagccggcatcaagagcgcttcgatcctgatcgaaggtgaaaatgcctatggattcctgaagtcggaggccggcgtgcaccgtctggtgcgcatttcgcctttcgatgcgtcgggccgccgccagacctcttttgcttcgctggaagtcatgccggagctgagcgatgaaaccgacatcgagatcaatgaagccgacctgaaggtggatacctatcgttcgggcggtgccggcggtcagcatgtaaacaagaccgaatcggcagtgcgcatcacccatattcccactggtgtggtagtagcgtgccagaacgagcgcagccagttccagaaccgtgaagtagccatgaagatgctcaaggcgaagctggcagagatcaaggagcgcgagcacctggagaagatcgaggacatcaagggcgtacagaaggagatcggctggggcaaccagatccgttcctatgtattcatgccctatactctggtcaaggaccatcgtaccaactttgagatgggcaatgtggcttcggtcatggatggtgacatcgatggctttatcaatgcttatctgaaggccaagagcctgggcgaactggcataaattttgtcagaaagatttataaaagtttaacaaagtttggtattctgccttgtgtaaccaatcggcttatgctatacttaggccgtttagaattttgtaaaggtggtttattgtgatgctgacgcaggccaaaagagagtttattgagtttatgatgagcgcggatgtgctccggttcggcaactttgtaaccaagagcggtcggaacaccccctattttgtcaacaccggcaactatcgtactggtaagcagctggcaaccctgggcaagttctatgcccgtctgatccatgaaactctgggcgatcagtttgacgccatgttcggcccggcttacaagggtatcccgctggcagctgtaacagcttctactctggctcaggagtatgatctggacaagccctacttcttcaaccgcaaggaggagaaggaccatggcgaaggcggcagctttgtaggctataagccggtggacggcgaccgcatcattctggtggaagatgttatcactgccggtacagctgtgcgtgaggtgatgcctcagatcatgagctgcggtgatgtcaaggtgaccgatatgttcatctcggtaaaccgctgcgaagtgggcaaggacggcgaaaagactgctgttatggaagtaaaggagcagttcggcattgatgtacatgccatcgtaaccgtacaggatatccatgagtacctcaaggaagatcccaagtatgctgatgtactggctcacatggagcagtatatggctcagtactgccggttctgattgacccggaatactggtgtgtggaatgagaaggagggaaaccatcatgtggaagcggtggcttgccttgcttctcgcaggaatgctggtgctgtgcatgaccggctgccggagaaccggcggcggggagcccagtgatcagaagattaatgtatataccagcaaggattatgaaaccaaggattttgtagcacagctgggcaatgtggattatgtcggtctggtggaggagattctcgccaataccgaaccggtggactccgttccggaccgtacaccggactatattgtacagattctgccgcccaaggggatcgaaggagccatcacctggtggttctggactgattccagcggtgagctgaccctggtcaatgccagtgaggataaggagaaggcctatcgggccactgccaatacctcccatgatttcggcaagatgctggaagaggctacactgggtcagggcgcaaagtgctgctgatcagctcggtaagcaagaaaacccggagattccaacgaatctccgggtttttctgttgtgccggctccgggcagcatgctcccagccggacatcacctcagaatcttagcgggcggggagagggcaaaggctgcccggagctgccgccctgccgcagcaataccccgccgcaaaacccagctttctgctggatgggcattctgccccgcaggctggcgcagcggtactggtggcacgacccggtaaaacaatacccccggaagagatcttctcctccgggggttctgttttattgggatagggcggttattccacgaggacagcggtaccgctggcggtgaccatcagcatgctgccattggcgccgagggtctcatagtccaggtccacgcccacaacggcgttggcgcccatggcggaggcccgctgctggagctctgccagagcctgttcccgggccttctgcagctcgccttcataggagttgctgcgtccgccgaagaagttggtaagtccggcagcaaaatccttgacaaagtccacgccggagattacttctccaaagacgattcccttgtattctacgattcttctgccctcaatggtgggggtggtggtcagtgttacgaacatagcagttcctcgctttctgttacttcagatcagggttatagacagcccgttctccgccgatgctcttgggacggcggcggacagcagtgagatgggcttcacccacactcttcacactcagccggaccggaaccgccaccggcttgatgtgcattccaataaaggtatcgccgatgtccagaccggcgtcggcctggaggtattccacagctacgggttccttcatatttttataggcgcaggtggcaaagctgccgccggccttgggctggggcactacattgacaatgtccagccgcagttcccgggccaggtccgcttcgatgatcagcgcccggttgagatgctcacagcactgcgctgccagccacagcccttcttccgccaggatcggagcgatggcggcatggatttcctccgctgtttcatagctggagtgggtgccgatcttttcgcccagcacctcgctggaagaacagccgatgacaacgatgtccccacggtgcagcctggcagcagccaatagctcccggatggcagtctgacaggtttcgcgaatggattctgacataataagtgcctcctttatcagtgatggaccaatagaattgctgtaatgggatacagctttacagacacagctcctgagcctggatggcggcgccgatcatgccggcggtattgcccagccgggcctgccggatatcggctttgcggaagttggggaggagttcgttttccagacgggcacgcacccggttgaagatcacagtgttttccatgatgccgccgcccagcacgaccaccggcggattgagcatgtggatgcaggaggtcagtccggcacacacatcgccgatccagcggttgaccgtttcattgatgccttcgctgccctgttcacacagttcgcagatcccccggccgtccagggtcagcttgtgctccaggtagacccggcggatcagggcggtggtggaggcataggcttcatagcagcccagccgtccgcagctgcagcggatgccgtctgcccgcagggtcatgtgccccacttcaccggcggcaaaggtctgcccatagtgcagcttcccgccgaggatgatggctccgccgatgccggtgccataggtcaggcagaggaagtcggggcagccggtggcagcgcccaggcggccttctcccacagcggcacagttgacatcgttgtcaatgctcaccgggatgcccagatcccgttccagcagttttttgacctgaagcccggtaaagccggggaaggtctcggtggcggaggagatgcacccctccaccgggttgatctggctggcaaacgagattcccactgcctgtttttccgggaactggtctgccaggtgccgtacggtacgcagcagggcttccgggccctggtcggcctgggtgggaatggctcctggctctgcgaggacaccgtcctcaaactgagcatacttgataaaacttccgcctatatccagcgcaagaatcttcatggaattcctccttggctgacgcagctgccagcctctgtcctgatgatgtccggcagggaaagacagccccgctgccggcggtaaggctattatatcataatttgacagaaaaaccaattctatcccaagtcttttctgtgcatttccatatccggcaggcgcagacagggaaaaggtggctccaaaggttaaaaaattgtaaaaaatctgcaaaagcgcaaattcccacttgatttttccgtgaaatgggttacaatgatattagcacttaaagataaagagtgctaaacactcgtatcttacaatattggaggaatcaaaatgaacattaagccactgtttgacagagttgtgatcaagatggttgaagcagaggagaccaccaagagcggtattatcctggcaggcaatgccaaggagaagccccaggttgcagagatcgtggcagttggccccggcggcgtggtggaaggcaaggagatcaccatgcaggtcaaggtaggcgaccgtgttctgatcagcaagtatgccggcactgaggtcaagctggatggtcaggagtacaccatcctgcgtcagaacgacattcttgcgattgttgagtaactgcagttttttcagatgatattttggaggtaaggcattatggctaaggaaattgtattcggcgaagaggccagaaagtcgcttcaggccggtattgacaagctggcaaacactgtgaagatcaccatgggacccaagggccgcaatgtggttctggacaagaagttcggttctccgctcatcaccaacgatggtgtgaccattgccaaggagatcgagctggaagatccctttgagaatatgggcgctcaggtagttaaggaagttgccaccaagaccaacgatgcagccggtgacggtaccacaaccgcaaccctgctggctcaggctctggtacgggaaggcatgaagaacattgcagccggcgccaacccgatggttgtcaagaagggcatcgaaaaggccgtagctgctgctgtggagtccatccgtgccgattccaagaaggtttccggctctgctgatattgagcgtgtagccaccatctctgccggcgatgccgccatcggcaagctgatcgctgaggccatggagaaggtaacccacgatggcgttatcaccatcgaggagtccaagactgctgaaacttacagcgaggttgtagagggcatgcagttcgaccgcggctacatcactccctacatggtaactgataccgagaagatggaagctgtcattgatgacgcctacatcctcatcactgataagaagatctctgccatccaggagatcctgcccctgctcgaagagatcgttcaggctggcaagaagctggtcatcattgccgaggatgtggacggcgacgctctgtccaccctgctggtaaaccgtctgcgtggtaccttcacctgtgtagctgtcaaggctcctggcttcggtgaccgcagaaaggaaatgctgcaggatattgccattctcaccggcggcgtagtcatcagcagcgacctgggctacgagctgaaggataccaccatgtccatgctgggccgtgcccgtcaggtcaaggtacagaaggagaacaccatcatcgtcggcggtatgggcgaccgtgctgagatcgacagccgtgtggctcagatccgtgccgagatcgagaacaccacttccgacttcgaccgtgagaagctgcaggagcgtctggccaagctggctggcggtgttgcagtcatcaaggtcggtgctgccactgaggtcgagatgaaggagaagaagctccgcatcgaggacgccctgtctgccactaaggctgccgtagaagagggcatcgtagctggcggcggtaccgttctggtcaacgctattcccgctgtcaccgctctgctggctggcactgagggcgacgaaaagaccggtatcaacatcgtgctgaaggctctggaggagccggttcgtcagatcgctgccaacgctggtctggagggctctgtgattgtggataagatcatgacctccggcaagaagggctatggcttcgatgcttacaacgaagtttactgcgatatggtatctgccggtatcgtagaccccaccaaggtaaccagaagcgctctgcagaacgccgcttcggtagccgccatggtactgaccactgagtcgctggttgctgacaagcccgagcccaaggctcccgctgccgcagctcccgacatgaccggtatgtattgatccaaaaccgcacagacggctgaaagggccggacagtttcccgctgagagggctgtccggcccttttgtctgccggcattgacagagccggggcatcggcagtaagataaaagaaaacgaccgaaaaggggagaccatcatgctcaatatcgcacaccggggattcagcggaaagtatccggagaatacactgctggcattccagaaggggattgaagccggggcagacggctttgaattcgatacccatctgaccaaggacggggagatcgtcattatccacgatgagcgcctggaccgcaccaccaatgcccagggatttgtgaaggattacaccctggaggaactgcggaaggtggacgcttccaagcccttcccggagtgcggattctgtgggattcccacactgcgggagtattttgagctgatccggggccgggatctgctcaccaatattgagctgaaaaacggcatcttctggtatgaggacatggaggagaaggtcatcgccatgatccgggaatatgggctggaggagcgggtgatcctgtcctccttcaaccaccgttcggtgatgaagtgcaaggcgctggcgccggagatccgctgcggctttctcaccatgtcctggctggagcgcccgggtgagtacactgctgcccggggcgtggagtgctatcatccgctctacctgaccctggatcgggaaactgtggacgagctgcacgggcatggcatccggatcaacacctggaccgtgaacgaggaagccgacctggcccgcatgaaggagctgggtgtggatgcagtgatcggcaacttcccggaccgtgccgctgcgtattgcagggactgagccgctcaggctctcccaccctcgggtgcggtgcggagaagccgcccatctgtgcaagccccgccggaaccggctctgacgggtccgctgcccggtgtgtacctgcgctgcggcaggctcccatgcaggccatactcacggcagtgccgcagtgcgccaggcgaagggacatatcccatcgtgaatgactgcggcgccgggcagcttgaatagaggcttacaggccagtatttactgtaaaacgggaaacccccggaaggcaagttccttccgggggttttctcgtgtatgcgttaggtgtaggagaaagcaggtgtaattacagaagtccacgggcttccagggcttcccgggccacttcggtgaggtcacggccttccacatccacagcgtaggtgaggtcggtcatatcctcgttggtgaactgtccgcccagcatgttgaggacttcctccaggttgggagccacatcggcaaattcctcaaagatggcgtcacgcaccagcagggcgccattgtattcggggaagaagcccaggtcgtcttccagcaccttcaggccagccttgcggttgaggccgtcggtggcatatacgaccatgacatcgaagttgccgttttccacagcggagtacttgagggagttatcgatggcgatatgctccttgaagttgagcccgtaggcttcacagaaggggccgtacttcatcgaaccctccagggtgaagaaggcatgttccgcaccgaaccgcagttcgggggcgatctccaccaggtcgctgatggtctggggattgtacttatccaccacttcctgggtcacagcgatggcataggtgttgtcggtgccgatctgatccagcaggtgaacctggtactgttcttccgcaatctggttggcgtagtcgtagagggaaatgccttcgggaacttcactggggtcgatcttcagatagctggtgagcagaacgccgtcataacagttcatcagctcacagctcggattatccgaagaaagatccttgaaattgcttactgccgccatctggtcgaggatttccacttccgcgtcggtgtgctcctccaccagcagttccaccatcttgtgaatcaggctgctttcggtaaaggtaccgtcatagatacggattgtcttggtgtcctcgccgccgcagccggtgagagccacggagagcaggcaggcagacaggatgcacgccagcttttttctcaggatttcaatgttgacagaattttacgggggct

SEQ ID NO: 3686 - DNA, 1675 bp, Unknown
  16S sequences of unknown bacteria
gccttgccgcctttttatactttgcctttgcaaaggggagcagcagacggcagagcgttcttttgaaaaagccctcgtcgcttatattgtcctttattttccgataaaacagcagcattgccacatcggccgaatagtcaatggcgtttgaggaggtgcacagcttgttgcagcggacaaaaggattaaagctgcagcggcacttttgaaatttcattccgccgtcattctcacaggaaagacggataagagcaagaaaaacaaaatcataattcagggtaaatcgggaaagaatgccgtatcttttaccaagcgtcttgcaaagagtgcagtaaacgcccttataggcctcatattcccttaccctcaaatccggctttgccgcctttacatatccgaacaaaggaaatctcccttctcattttatgtcattatacattaagaaaaaaagcaatagtttaactcaatgtaaatattaaagcagctctttaagaaaatgtcccgtgtaggattttttacttttcgccaccttttcgggagtgccgcagacaaccacacgtccgccgccgctgcccccttcgggaccgatgtcgatgatatagtcggcggtttttataacgtccatgttgtgctcaataataataacggtgttgcccgcatccacaaggcgttgaagcacgtcgatgagcttgtgaacgtcggcggtgtggagacctatggtgggttcgtcgagaatatagacagtcttgcccgtggcgcgcttgcaaagctcgcttgacaacttgacacgctgcgcctctcctcccgaaagggtggtggcgggctgaccgagcttgacatatcccatgcccacgtcgcaaagagcctgtatctttcttgcgattttgggtatgggctcaaaaaattcaagagcctcctcggcggtcatttcgagcacgtcgtaaatgctcttgcccttatattttatctcaagggtttcgtgattatagcggtgagccttacaaacctcgcagggcacatatatatccggcagaaagtgcatttctatttttattatgccgtcgccctgacaggcctcgcagcggccgcccttgacgttaaaggaaaaacgtccggcattgtatcctctgatttttgcgtcgggtgttttggcgtaaagctcccgtatatcgttgaaaacgccgatataggtggcgggatttgagcgaggtgtgcggcctatgggctgctggtttatgtctatgaccttgtcaaggttttcaagaccgagcacgccgtcacactttccggtctttttacgggcgccgttaagggtgtttgcaagggttttataaagcacctcgtttacgagggaggattttcccgagcccgacacgccggtaacacacacaaactccccgaggggaaatttcacgtttatatttttaagattgttttcctttgctccgacgacctcaataaactttccgttgccctctctgcggtgtttcggcacctcgatttttttccgccccgagaggtaatcgcccgtgagcgacccttcgcaggccataatttcctcgaccgttccggcgcagacgagatttcccccgtgcacgcccgctcccgggccgatgtcgcagatatagtcgtgcttcccttggcataagaaaccgtagccttatcacctaccgca

SEQ ID NO: 3687 - DNA, 7240 bp, Unknown
  16S sequences of unknown bacteria
ccgcgcaggtcttgacaacccgaacatcgagtttgtcggcatcaacgatccttttatgactcctgattactgtgcatatatgctcaaatatgacaccgtacatggccgttacaacggtgaagtaaaaattaccgagaactccatcatcgtagaaggcaaagaagttaaattctacgcagagaaagatccggctaatattccgtgggctgagtgtggcgcggagtacgttgtagattctactggcgtattcaccactaccgaagcttgccaggcgcatatcaaaggcggtgcgaaaaaggttgttatctccgctcctgccaaggataaagagactcccactttcgtaatgggcgtaaaccacgacaagtacactaaggatatgaacgttgtttctaacgcttcctgcaccactaactgcttggctccgctggtcaaggttgtgcatgagaaattcggcataaaagagggtctgatgaccaccgttcatgccactaccggtactcagaaaaccgttgacggtccttccaagaaagactggagaggtggacgtgctgctgctggcaacatcattccttcttctactggtgctgcaaaagcttgtgctttggttatcccggagatgaaaggcaaactgaccggtatgtccatgcgtgttcccaccttggatgtttctgttgttgacctgaccgttagcttggagaaagctacgacttatgaagaaatctgtgctgcgctgaaagaggcttctgaaggcgagctgaaaggtattttgggttacactgatgagatggttgtttcttctgacttcatcggtgatcctcatacctccatctttgatgagaaagcaggcatcatgctcaacgatcactttgtcaaactggtttcttggtatgacaacgagtggggttattccaacaaagttctcatgctcattgagcacatggcgaaagttgaccacggctgctgctgctagttttcgactatttgaagaccgcaatcgagaggttgcggtctttttttattttcaaattttcacctttgtttgtaacccaagcacaaacaggataaaaaggacaaacgattttatgatgttttagcctcatccgaaactttagacttatttgctttccacgacttttttcgtaagaattttcagacgggctgtgctatactggtaacgatttgccgaaagaaagattaaaaatcaaaaagatgtaatagatttgtaaaaataaataaaaaaaacaccatattattatgataaaatgactattttgcacaatattatattgcaaaaaaaaggaaagtgtgttacaataaaaataacaggaatgggaggtggcggagatggaaaaatgtccgtctaaagatatcagcgcaataatggatttttgccacggaaagcactatcatgcctatcagtttttgggggctcatcctaaaaaaaaggataaaggaaaaggttttttcttccgggtttgggcgcctgcggcaaaagcggtttccgttgtgggcgacttcaatgaatggaatccttcggcgaatcctttggaaaaattgccggttggcgggatttgggaaggatttattcccggtctaaagcaattcgatttgtataaatacgcgattactggatccaacgggaatgttgtcttaaaggctgatccttatggctttcaccatgaaacggcgccgggaacagcctctaaactttatgatatcgctggctatcgctggcatgataccgtttggatgaagcaccgcaaagagcaaaattcttttgctgagccgatgaatatctatgaaatgcacctaggttcctggcggcgatacccggatggaaattgtttttcttatgaaaaaacagcagaggaactcatcccatacttaaagcaaatggggtatacgcatgtggaattgatgccggtcacagaatatccgtacgatggttcctggggataccaggtgacaggctattttgctccgacctcccggtacggtacgccggaacaattcatgcgttttgtggatttgatgcatcaggcggggattggggttatcatggattgggtacctgctcattttcccaaagacgcccatggcctttacgaatttgatggttcgtcctgctatgaatacagcgatccaaagaagcgggaacataaacagtggggaactcatgtttttgattatgccaagccggaagtacagagctttctgatttcttctgctatgatctgggtacaggaatttcatatagatggaatccgggtagatgcagtggcgtcgatgttgtacttggattacggcagagaagcgggagaatggacaccgaatcatcagggtggccgggaaaatttggaggcggtcgcttttttacaaaaactcaatgcggccgtcatttcagaaaatcccggtgtactcatgattgcagaggagtccaccgcgtggcctttggtcacaaaaccggcatttcatggcggattgggctttcactataaatggaacatgggctggatgaatgatattttagcctatttttccatggatcccatttatcgcgcgtataatcatgataagctaaccttcagtatgttttatgcgttttcagaaaattttgtgctgccgatctctcatgacgaagtagtgcatggtaaatgttcattaatcaataaaatgccaggggactatgaactgaaatttgctggcatccgtgcttttttgggctatatgatggcacatccaggcaagaaactgctgtttatgggccaggagtttggccagtttattgaatggaatgaaaaacaggagttggactggctgctgttgggatatgaaaaacatatgcagctacagcaatacgtaaaaaaattgaatcattactatttggaacattctccgctctggcaaattgaggattcttgggagggctttcagtggcttgtccccgatgataaccagcaaaatattattattttccgccggatggatgaaatgcaaaaaagcattatggttgtctgtaatttctgccctgtggcacgatatgattatgtagcaggagtgccagctgccgggagatacaaggaagtgtttaattccgacgcgaaggagtttggcgggagcgggcttacaaatggtacggtacgcacgcgaaaaaaaccgtcccatggttatgatcattctgtcagcttaaccataccaccactgtctacgatgtatcttgagtttactccggcagctccgcgaaagccccgtcgaaaagcagaggggaaaagcgaaggcaaaaaaaccggcaaaaaatgacgaacacgggttttactcccgtttttaagaaggagggtttcccttgaggaaaaaagaatggatcgcaatgttgctggcaggaggtcaaggcagccgcctttatagtttgaccaaaaaccttgcaaaaccggcagtgcctttcgggggaaaataccggatcatcgacttcccgctgtcgaactgtgtgaattctggaatcgataccgttggcgttctcacgcagtaccaaccattggtgctcaacgaatatatcggaagcggccaaccatgggatttggatcgacaggaaggaggcgttttcgtactgccgccttaccagaaaagctccgggtccgactggtatacgggaacagccaatgcgatttatcaaaatttgccgtttattgaacgatataatccggaatatgtcttgatcctttccggcgaccatatttataagatggattatgaaaaaatgctcaaatttcataaggaaaaagaggctgactgtaccatagcggtactgcaggtccccatggaagaggcgtcccgttttggcattatgaacgcacaagaagatggaaagatttatgaatttgaggaaaaacccgctcatcccaaaagcaatctggcatctatggggatttacatattcacttggaaaaaactgcgggagtatcttgaacaagatgcaaaaacgcctggcagcgcaaatgattttgggaaaaatattatccccagcatgcttgcggcaaacgagcaaatgtacgcttatgccttcgatgggtattggaaagatgtaggcaccattgacagcttgtgggaggctaatatggatttgctggatcccaaggtgccgctgtctttgtatgatcctgactggaaaatttacgcccgaaatccggcgctgcctccccactatattgcccctggagcacacgtgcaaaattcaatggttacggaagggtgcgtcattgaaggaacggtagatttttctgttgtttttgctggcgtaaccatcgaagagggggctgttgtacgcgacagtattattatgcccggaagtgtgatccaaaaaggcgcagtagtcgattatgccatcgtcgcagagcagacgataatcggagaaaatgcggtggtcggcgctcgtccggaaggggtggaggatatttccggttggggtgtaacagtaattggcagcggcgtagccattggggcaggcgtgcatattgcgccaaaagccatggtggaaacggacattgccgctgaggaggtgctggtaaaatgatcaaacgcactgctatgggaattgttttttccaatatgcatgataatcatttgggaagtttaacaagggagagaaccaccgggtcggttccgtttggaggcagataccgtttagtggattttgtcttatcgagtatggtaaattccggtgtcagcgaggttggcgtaattgcaaagtccaattatcaaacgttgatggatcacttaggtagcggcagagaatgggatttggcgagaaaactgggaggattaacggttttgcccccttacagcagtggggatagccaaggtatttatgccggccggctggatgctctgtctggtgtatcgggatatatccgcaatggccgtgcggaatatgttattctagctgattgtgatttgattgccaatctggattttcagagtatgattgcattccatgaagaaaaaggggcggagatcacattggcataccgtcgagaaaaaatccgacgggagggcaatgagaatattgttgtttttgacgcggaagatgacggcagagtgggaagagtttggctttctccgcagatggaggaagagcaaaatgtttatttgaatgtagcggttatgaaacgggagttattggaaaaaattgtggaggaggcgcgcagccgcaataaacgcagttttaccaaggatattttgatagagcaaagcgattccatgcgcatttatgcttatgagattgaaaagtatgtcatgcggattaatagccttcaggattattttgacgccagcatggcacttttgcatccgcaggtgcgtcaagagcttttccctgcggaacggccggttttaacgcgggtacgggatcaagtacctgcaaaatacgggctaggtgccattgtaaaaaattcgctggtggcggatggctgcattatcgagggaactgtcgaaaattcgattattttccgcggcgcaaagattggccgcggcgctgtgatccgcgacagtattattatggcgggcgcggtcatcggagccggtgcaaggctggaatatgtagtagccgaccgggatgcgacgattcgagataccagaatgttggtaggatataaaacttacccgcttttcatcgaaaaaaagagtgtaatttaaaagagttttgcttgcaagaacagcatgggacaggaggtttaatttatgaaaattttgtacgccgccagtgaagcgcttccctttgcggcatctggaggattggcggatgtagctggatccctgccaaaagcgattcgcaataaaatgcaggcttgccgagtagtaatgccgctttatagtgatataaaaccggaattgcgcgcaaaaatgaaatatgtaaccaattttactgtttacttatcttggcgcagtctttattgcggcgtgtttgaggccaatcacaatggcgttgtctactattttttggataatgagtattatttcaaacgtcccggcttgtatggatattatgacgatggagaacgatttgcatttttctccaaagcgattctggaaatgctgcattatattgactatgcacctgatattattcactgcaatgactggcagacggcgctggtcccggtttatttgaacctgttttacagaggggaaaagaagttccgtgatcttaaaacggtactgaccattcacaacattcagtatcagggaaaatacgggatggaaatggttcaggatgtgttggggcttccacaaagcgccaccccaattgtcgaatacgacggatgcgtcaactatatgaaaggcggtatcgatcaatgtaatatgatcacgaccgtcagccagacttatgcacaggaaatactggatccctggtattctcacgggctggatcggattttaaaggcacggcaattcaaactgatggggattctcaatggtattgacgtagagggatacaatccccagaccgactcgaatcttgcggcacctttttcttcggatgatccatcgggcaaagcggaggataagcgggctttgcaggaggaaatgggtttgccgaagcaagaggatgtcatgcttttgggaattgtcagccgcttagcggatcataagggccttgacctggttaaatatatcggggaagaaatgtttcaggaaaatttgcagcttgttgtgctgggttccggggagtatatgtttgaatcgttttttgaagagatgcagcggaaatatccggagaaggtcagctttacaaaaggctttattcctccgcttgcgagaagaatctatgcgggtgccgatgcgtttttaatgccctctaaaagcgagccctgcgggttggcgcagatggtggcgctgcggtatggtaccattcccatcgtccgcagtaccggcggcctgaaagattcgattcaggatttaggtggaaacgatggaaatggctttaccttccagtcgtataatgcacatgatatgctcggcgctgtaaaacgggctttggatttatatggagaaaaagaggcatggaagaaggctgtcattcatgcaatggaatgtgattttagctggaagaagtctgcaagtgaatatattgctatgtatcacaaaatattagaaggatagtgaagtaaggaaaaaagaggaagacttgcgctactcctgataggggtaccttgaagcgtgtcctcggattaggcaggcagtg

SEQ ID NO: 3688 - DNA, 32759 bp, Unknown
  16S sequences of unknown bacteria
ctaatcattgcatttgattttcccaaaaattcacagcgtcgtttatccaaccctccgcaaccgttcaccgggatttcctttgaagaagaacaagcctgtatcttcttttgcaggatcagccgctttttcttcatcggtataaatatcgtaaaagattacatcgccgttttcagcatggcttttcatatagtttgcaatctccaccgttttgtcggggtcaatattgttgtaccaagtaagccccagttggcctaatgtatcgccgccgtaatagctgctgttcacagggaatatcagcctgccgtaatcgccaaaggcagtgtcatttataacttgggagattttcgtatcttgcatatattgttctgtatcattctgatttgtttgcacagtagtttctgctcctttgtaatctgtgtccggttcagtgctgttcatatctgcgctgcaccctgccaagaaaacggctatgcaaatcagtaccgcaacaaaagcatttgctctcaaagtcgccaccggcctttctgattacattataaaaaaaacgagaccccatgagaagtctcgttttgttcattagtttatacccaaaggttataacaatctgtttagtggtacaattccttgctcaccttttcggcagcatccaaaaactgctgtacgataggcgttggagtgggagaatggaggattccatagggaatacaatggttccactccacaggtattactttcagtagagggtgaacgttcgcccatccgggaatagccagcaatacatcatttgtattctcacaacgattaaatatatccattccgtaaaagtcaaaatcaacaatatttatttgtgggtgattctgccaaaggtcgtctcggagctgatcgacatagcggctccagccacggtgcataagcagcagattttcgccgtagaggtcagaaagttgcaatttatctttggttgccaatcggtggtgaatagaaacagcacaacaaaaggggcctctaaccaattccaagcctgcacaagcacgaacatctaacattgtatcatcgaagataccgccgactatatcaatgtttttgcctaaattggctaaaatttctcgtgcattttcgggggtattctcaaagggtacaatttgaaatttgatatttgggtgcaaggcttgaactctcgaccaaagttccataagaagctgtgcaggggtaataggcgatgaaccgatacgaataatattgctatcttcctgcattgcatttttggctcttataatggaatctctacaatattgtataatgtattttgaatcctgatatagagagcgtccggcctttgttaagtgtagccctctgtgtgtacgatcaaatagtttaacgcccaaggaattttccagcaaattgatctgtttgataacagctgtaggtgtaataaaggattcctccgccgctttgttaaagctgcctgcgtccgctacttttataaatgtttcaagctgtgggttatacataacatttcacctgccttattgggacgaattatcttttcttcgtaaacctgtcggcttgttcgctgttttaggaattatctaagaacgcccgaatttttgtattccgtctattctggtttcttcgcatagttttgaacacgccgcccggagatttcccgtctttgcgccccttctctgactgatatgtaatccatttctttattccaaaaagtacgcataatcgaataatcttacaattatattttattctgatatgcgtaccttgtcaaggacggtaatatataattaagccgcctgcatttctgcaagcggcttgtgctttcatttgcaacccccgtaatgcttgtatctgatgtgttttcaaattacttccttatgtggtgttagcattaagagaatgcagttatttttataagtatttattcaaatcagaattcttccggtttcataggtgcggaataaacatcttcatatgcaggaatgtcatatgtcttaaattcatcccacatcttcttgattgtctcctcatcgccgaacaaatccaaagcaccctgagcaagaaccttaccggcatgaacagcgcctttcataccgatttgtgtgcctgaacaagctgtaaccgtccagtggtgacccggcaatcccttaaccaaaccgccgccgtggaggtgtgccgtcgggcagaagtaggacatatcggaagcgtctgtggctgtcaattcctccataagaccctcatagtcctttttagatgtaggaagaatttcttccaaatcttccggtgcgttttcttcaccgaagtaatttttgtaaagttcctttgcccatgcgatttcatcttccgtataatcagcttccggaactttcaatgaggcctcataaagctttttagaaagggtatcgtttgtatagaaataaggaataaggaaaattacaccgtaatcaagctgtgtttccgtctgtgtagcggcgccctgtgcgcaaagaacaattcttctgagcaagtctttggtgttttccgtagatgcggagcggaggaaatatttaacagatgcaaaatccggaacgatgttcggtgctgtaccgccggctgtaatctggtagtgatagatgcaatcctttgtaacatgttctctcaaaaattctgcgcccatattcataagctgaactgcgtccaaagccgaacggcctgaccaaggtcttgtggcgtgggctgttttgccgtggaattcaaagtttacacccatcatgcacaagccgtgctgtggctcggtgttaaactctgttgaacccgggtgccacataatgcaggcatcgcaatctttccacataccgtcaaaggcaagcaatgacttaccacggcctacttcttcacccggtgcctctacaagcttcaatgtgcctttaacgccctctttttccatggcgtatctcaatgcacatgcggcacccatacatgaacctgcgataaggttgtgaccgcagccgtggcctgcaccctcaacttcatcctgataaggtgcgtcgctctgacccaagcccggcaaagcgtcaagctcacctacgatggcaattaccggtttgccctcgccgtatgtagcaaatactgtatttggatcctcgcttggttttatgccctggcctgctctcataagcattgcatccgggaaaccgtgagtttttgcaaactcggcggctctcttggcggcgtagccgttcttcaagcctgtttccgggtgtgaccagatgtcgtgcatcatctcgtcaagttctgcttcatgcaggtcgtaccattcttttatccatttgttaagactcatttttaaataatctcctttaaaatcagtttatagtgtgcgtaattgttattatacatactttgataaaaaatacaatataaaaccttaaagttactttcaggtttattcgtacaaaatcaaacatatgaaaacacctcccgtaatcgggaggtgtttttgccataaaaattaagtttgaaataaagcagaaacgcagaaattaaagggctttaacggcagccaaaagagcgtcaaccttatcggtattttcccacttaacgccaaggtcttctctgcctatatgaccgtaagctgccaactggcggtagataggttttctcaaatcaagtgtttcgataattcccttaggcgtaaggtcgaacacctgctcaacggccttttcaatcttgtcctcgtcaactgtgcttgtgccaaatgtatcaaccaaaattgaaacaggctgtgcaacaccgatagcgtaagcaagctgaacttcgcacttctttgcaagacctgccgctacaacattttttgcaacatatcttgccgcataagccgcacttctgtcaacctttgtcgggtctttgccggagaaagcaccgccgccgtgacgggcgtaaccgccgtatgtatcaacaataatctttctgcctgtaaggccggagtccccctgcgggccacctacaacaaatctgcctgtggggttgatgaagtactttgtattttcgtccaaaagttcccgtggaataacaggtttgataactttttcaataatatcttctctgatctgttcaagtgaaatttccggtgagtgctggcttgaaataacaaccgtgtcaactctgacaggcacgccgtcgtcgtattcaacagttacctggctctttccgtccggacggagataaggcaaaacatccgtctttctaacctctgtaagtttcttggcaagtttgtgtgccaaagagataggcaaaggcataagttcctttgtttcgtcacaggcaaatccaaacatcataccctggtcgccggcaccgcctacttcgtcgtttgtgcccaaggcaatatccgatgactgtttgtcaatagatgttataacggcgcaagtgtcgcagtcaaagccgtacttggctctgtcataaccgatttcttttataacttttcttgcaatatcacctatattgaaattgtatgttgttgtaatttcgcctacacaaacaacaagacctgttgaaacggttgtttcacaggcaacacggccgttagggtcgttagccaaaatttcgtccaatacggcatctgaaatttggtctgcaattttatccggatgtccttctgtaacggattccgatgtgaagtaatgtcttgacataataacttcctttctgtacataaaaattttgtaaataatatattgaatgaattaaacttattgaaataaaaaactcacaggcaaaacccgtgagtataattacttatctcccggtttcttaccgatggatttagcaccttacttatgcaggttgccggacttcacagggccatttccctctgccactcttaataagctgaattcaatttgcgaaacttattgtaccaaaccacacgcataaagtcaataggcattttcttgattttgtggtaacacaaacacatatgtgtataaaagaaaaactccccgtcaaagcggggagaatgtactcatcatttgccggtggcagtacaagtcgtttttcttatctcttgccctttaaaataggtgaaagaggtttgtaaataagcattgaaattgcaaggcttatcatacctttcataaatgtaaaaggcatattaaacataataagagcctgccacaaatttgtaacctttgggtttattgcgctgtaagcggcaattatagcctccataggcataaagtttgtatataccggatatacaaaatagtagtttgagaaaatgctcataactgccattgcaactgcgcctacaagagcgccgataaaagcgacttttttggttttcattttgctgtaaataagacctgccggcacaacaaagaatatgcccaaaagcgcattggaaatttctcctacgccgccggtctgtgaaccttgtataagcaggtgaagaagatttttaagtacacatataactgcgccccgtaccgggccgtaggcaaaagagccgattaacgccggcaaatctgccatatcaagggttataaaacttggcataaagggcaatttaatgccgatatacataagtatcgcaccaacggcagaaagcattgccgtacctactaattttcttgttttgtttacactgttcataataatacctccgagtatttttaaaatatatagaggtctgtttcccaattataatgtagacttcggtttatactaacagaaatgatgaactgtctgccacaacaaaaagcccctttgccgtttgcaaaggggcgatattgcggacatgtaaataagccgttgtttctttcatccggactataccgtcggttttggaatttcaccaaatcagtgccataaggcagtcgtggactttaccaccggtgaggaattgcgcctcgccccgaaacagactaccgtaagtatacatcaaaccgcaaaatttttcaagtactatttaaaatattagttaaaaatttaataacagcatcttgggcaatatacaaaaggcaagcagtcccttgcctttaaattttttatcaatccttatccgtaataaccaaaagcaaagccccgtctttaacggatatttcaacggtttcgcctatgaactcattacttgtgcctatggggtaaaagttggttattgtgtaattatcaagggggtattttgctccctttatacttacgccctctgctgtatcccccatagaaaacagtgagaaaaacttgccgtccatattcggcaaggatactttaccgttgtgaataaccataagctgagagtggctgtctatcattgtggcattaactcgctgtttggcaaaaaagagcagagtttgaatatttgcaatggtatgttctattcttgcgccgccgagcaatccgcataaaagaacatcggtaaaatcattttccacaacatatcttgctatgtggaatgtgtcggtatcgtcctttaccaccggcaaaacaacaatatccgtatcggtgtcctcaggctttggcgaggagtcaaaatctcctacaatcatatttggttttatgccgtgagccttggcattaagccagcctttgtcggcacagattacaaaatccgtgtcttttataagtttttcgtatgggtaatcggtttcaaccgcaccgattataacacatcttttcatttataattcccactcttttatattcttttgtctgtcatacaaagccttatagctttcgtatcggctttggggtatttcgccctcatcaacagcacccttaacggcacaacctatctcgtttatatggcggcagtcggcaaatttacagttgcccagatatggggcaaattccacaaatgcgtactgtaaatcatcttttgaaataaagttgtcgtcaacaagctcaacggaagaaaaccccggtgtgtccgccaccatacagccgtcggtttcaaaaatttcaacccggcgagttgtatgtttgcccctgcccagctttttgcttgtaatacctgtttccaaagacaggtggggaaacaatttattcagcaatgtggatttacccacaccgctgttgccggaaaaaacacagagtttaccctgcatttcactgcggatttcttcaagttgcccatcatcgtcggcgccggtgtaaaacactttaaatccggccttggcgtaaacggaacggatattttcatactcggccatatcggtttttgtgataaccattattacctgcacatccttgttttccgcaatggcgcacatcttgtctatcacaagataattcggcgcagggtcaacggtggatataaccaagaccaaaagatccagattagcaaaaggcgggcgaataaacttattttttctcgggtgaatttttgtaattacatttgtactgccgtcaaattcggtgtccacaatatcaccggcaacaggagaaagggaaagattgcgaaactttccctttgccttacattcaatcacttcgtccccggacttaacatagtaaaaaccgcctatgctttttaaaatcactttttcagacatgtattttacctgttaattctgttattctgttccgctgggagcagttccctcggacgatgccggcggcgttgtagtttccggggcagtactaggggtaggtgtcgattccggtgtaggtgtcgactccggagtaggtgtcggctgtgccgcacttgaagctgcttcatcgtcccgcttcttcttcgggcaatcgtctacatcgtggccgtgttcatggcaatatgagcactcgtgccggcttgtttcgtgttcgccgccgcaaataccgcaaacaggttttggcggaccggaggaaacaacaaggtttacccttgtgcctgcggaaacatactcccctgccgcagggttctgctcaataattgtgcctgcccggctgccgtcctctctgtatgtgtaagagcctataacaacatcgctggcggccaaagttttacctgcatcggtcaaattcgtaactccgattacggacggaacggaaacatgggttttaattttgtccaaatcacctgtggacaccaccagggtaaccgttgagccggactccacaatactgcccattgccggatcggttctgattacatggcccattgacacgctcttgttgttctcgattataatgtcaacattaacatcaagatctgacaaataggactctgcgtcggctcttgaatagccggttaaatctttaagctggcttgttgtagggcctttgcttatttttaattttacggtgccgttttcctttacggacttaggcggcttaggggtttggaatataaccgtgccgcttggctgccgtgaagttacatattcaaagttatatttaaagccgtagcctgcgtttttaacttcgctttcattcattccaacaaagttaggcagttcaacatcccgccgccttgttaaaagggggttgccgctgagcttgaatatcatatagcaagatataagagacaccaacaggaacgcccgggcaacgccggccataacaggcaaaccgccctttataccttttgtcacttttgtttttttgcttttggttttgttcactttatccaccgccacaaactgagttttttcattttgcaaatcatcataatggaaatcaatatcgggattggccttgaatttatcaaggtcggctatcatctcttccgccgtttggtatctgtccgccgggcgtttttcgatagccttcataacaatttgctccaatcccttaggtatggtatcaactatttcgcttggcttctttgcaatgtcggaaacctgcttcatagcaaccgaaactgccgtgtcggacacaaaaggcaatgtgccggtaagcatttcgtacatcataatacctatgctgtatatatcgcttctggcgtcactttctttaccacgcacctgctccgggctgatatagtgcaccgaaccgatagccttgtccgtaaccgtgtgctggtttgccgtggaaagtcttgcaatgccgaagtccattatttttaaagtgccgtcacgcaaaatcataatgttttgcggctttaagtcacgatggataatgccgttttcatgggcatgagccatggcctttaatatggtggcagtaaatataacggtctcctgccgagagagaaccttgcggttttccatatactgttttaaggttataccgtcgatatactccacaacaatatatttttcttcgtccgacatatttatgtcgataacttttattatatttgggctgtttaacagcgaaatagccttgctttcgtttttaaaacgcctaaccagttcttcgtttgtgtaaaattcttgctttaaaaattttacggcaacggttgcaccggtttttttatcaatggctttatacacatttgacataccgcctacgccgataagagacagtatttcatatctgccgtcaagcaatttgcctatatagttcaaatccataattataccctttcgttagtattccaaaactacggcggtgatattatccgtagaatcgtttgcgacagccgtttttaccaatttttccgccacattatatatatcagatgttgacaaaatttgcaacaattcttccttacttacaaaatttgtaagaccgtcggaggcacatagcagtctgtcccccggctgcaatttaagttcggtaacatctgtttccacatcttttttaacccctactgccctggttataagatttttctgtgggtgattttgcatatcctcctcggttatggcaccttttatataaagttgctgtaccaccgagtgatcaagggttatttgggtcagtaccccctgccttaaaatatatgttcggctgtcgcctacattatatacgatacagttatccccctgtaccgtaaccccggacacagtggtacccataccctttaaattttcatcggacagagatttttgatatatcagcgaacaagcggtatcaatggcgtccaatgtgaccttttccgcatccattgccctgttgtcgttttgccgataaagatattcttcaataaccttgctcaaatatccgctggcaacactgcccccattggcgccgcccatgccgtcgcacacaaagccgaaacttgtgccgttagccaaggtgccgcctatatatctgtcctggttttcgggtcttttgtcccccttgtccgttctgccaacaattttcatacttcacctgttttcgtttctaagctgaccgcacgccgccgaaatatcctgtcccaatcttctgcggatggtggcgtttacatggagagcctgtaattttttttggaaagaatgtataaccctgtcatcactttgtgtgtacggagagccgtccaccgggttgatgggtattaagtttacatggcttatcataccctttaacaagtccgcaagctcccttgcgtcctcatcggtgtcatttacccctttaatcatagaatattcaaaggatattcttctgcctgttgtccgtgtgtagtcacggcaggcctgcataagttcttcaacgctgtaagcatttgtaaccggcatggtaaccttgcgcttttcggtagttgtggcatggagcgaaattgataaggttatgcccaatttcagctttgccaaatcataaattctcggcacaagaccgcaggttgaaaggctgatactgcgttggctgatgtttttgccctccggtgatgagataattctgataaagcctatggcgttgtcaaaattatccaagggttcgcctatgcccatcataacgatgttgcttattctctcgcctatgtccctttcggtgttgtaaaactgctccaaaatttcgcttgtccgcaggtcacgaaccttgccgtgctgtgtggaagcgcaaaatgtacaccccatacggcagccaacctggcttgaaacgcaaatactgttgccgtgttcgtagcgcataagcaccgtttcaatacagttgccgtcttcaagttgataaaggtacttgattgtaccgtcctttgaaacctgtttctttcttatggaaatttttgttatgttgcagttttcctttaacttttctcttaaatcctttgagatgtttgtcatctcatcaaaagaatttacatttttttcgtgtaaccagccgtaaatttgctttgccgcaaagggttttgccccaagggaaaccacatattctttcagccggtcaagctgcatactttttatatctgtctttgccattttaccacactttttccaatactgccacaaaaaaaccgtcatattcagtaaaaccgggtaaaaatgtcactttttcaccgatgttttttgctcccgcaacggggcaattctgttttacaagtcggaaattttcattggcagatataaatttatctatctgtctttcgttttcgtctttatttatcgtgcaggtggaatagacgatcctgccgccttttttaagataccttgccccggttgacagtatttcgtattgcaacttcacaaggctgtccgtatcggacatatctttgtatctcaaatccggctttttggggataatgcctatgcccgaacaaggcacatcgcagattacaatatctttttcggctaaatcttccctgtatatttgccctaaattttttagggttttgatatttttaagatttaatctgcctgcgccggaatttatcaaagcaagccttgaatcatttgggtcgcagcttgtaaccgagccggtattgttaagcaaaatgctccgggcaaaactcttgccccccggggcggcgcacaagtccaaaatatcctctcccggttttatcccggcggatttaacccggtaccggcttgtcaccccttgaacaaaaaagtacccctctttaaaaccgggcaaggcggtaacactgcctccggttttaagttcaagtgaattttcaagctccgtatcccgatattttacgccgttttcgtcaaaaaatttttttaaattttctgcggaaatcaccgtttcgtttatgtttatcgtaagtttcgggcggcggaacattgcggcaaatattttgtcataatcattccgataatccctcattataatttcggcaatgtccgggttcacggagtatgtaaccgaaaccctttcggtttcactttgaaattttgctttttcaatgtggaattttgccgcctttcttaaaacagcattaaccaagcccttggcacttgtcttttttaacaggggacaaataccgacagcttggttgattgccgcaaattccggcacagaattcatatataaaatttgatacaaaccgctttccaaaaccgcaagaacatccctgtctaattttgaaaggggctttgatatatatttttgcaaaatataatcaagggtgattttatgctccaaagtgccataaaacacagcggttacaaaatttttgtctttttcttgaagatttccctcttcaaggagagagggcagcacaaggtttgaaaatcccgattgagaaaccttttcaagtccctttacaactgccaatctccgaaaatctttcgccatagattcctctttttatcttcttctgtctctaccgtttcttccaccgaaaataagcaccatacgcaaaaggtttgccacagacaccgccaaagccgcaacataagttaaagccgcagcgtccaaaacctttttgacatcgtaaagctcctcgcctgtcataagtccgccctgacccaaacagtcaacggctcttgagcttgcgttaaattccacagggagtgtgacaagctggaaaaccacaaccaacgagaacaaaatcaaacctaagtttacaagttttgaactgcccaaaacaaagcctataaataccataggccatgaaattgaagagccgaactggcataccggtataattgcggaccttatttttacgggtatatacccctcggcatattgcactgcgtggccggcttcgtgagccgcaacccctattgcggatatgctgtcggaggagaaaaccctctgtgaaaggcgtataacatttgccccggggtcatagtggtcggttaaatccccgtctatcatctctatttgaacattgcgcaggccgtgggcgtccaaaattctgcgggcggcttcaaagccggtcatacggctgtatgtggaagcatttgaatattgattaaaggctgactttacttttttctgggcccacattgcaaacagcaaagccggcacaaccaaaataaagtaatagtaatcaaagtacatattttaaatatcccttcttacttgaatttattgttcttattttacgataaatatttgttaaaatcgtaaaaacagatacaaaaaattattatttcagtatatcgcctttcttaaatctgcgtcccattgcccaagcagtgccctccataggttttgacccctccggtccgacctgcaaaagctgtattgcgccgtttttagcggccactgtgagaggtttaagggacagaatctctcccggttctcccttttcatctgtcggtttgctctttaatacttttacctttttgccgccatacatgaaaaacgcacaaggccaggagtacatacctctgattttattgtgcagggtgcggctgtcttcctcaaatgtaaaaagagccatctcttttgtaaggggcggcgcatagcttgccaaagaatcatcctgaggcacaggatttatattgcctgccagcacatcttcgcatactttgcttaaaaatactttgcctttggcggccacatggtcaaaaagttcttcccgtgtttcgtcctcgcctatttcaacaggcaaaacatcaatgatgtcgccggtgtcaagaccttcgtttatatacataactgttacgccggtctgcttatcgccgtttattacagaccactgtataggggccgcacctctgtactttggcaagagagaaacatgcaaattcacacagccgtattgtggtatatctattatatttttcggcaaaatcctgccgtatgccacaacaacgattaaatccggggcaatttcccgaattatatcccctgcgtcgccctttaatgtctttggctgatacacggttatcccgtgcttttcggccacttgtttaaccggcggagcagtcataatcatttttctgcctaccggcttatcttctcttgtgaaaacagcgcttatattgtagccgtcgtctatcatttgttcaaggcagtcccgggctatgtccggggtgcccataaatattattttagcctgtgatttattcatcgtcgtcgtcaattttcactttctttctctgttccggggtaaggtcttcatagaatattttagttttatccaaaaccgttataccgttcaagtgatcattttcatgcaaaattgcccttgcaagcataccttcggcctctatttcaaaccagtcgccgtttctgtcctgggctttccgcttaacatatttaggtcttgctatcgcaccgtttctgtccgggtaagaaaggcaaccctcccaaagggttacggtttcttcgcttgtttccaagatctccgggtttacaaaatcgataatttcgtattcttcctcgccgtcatcgtttaagtaaacgtcaagcacaacaaaaactcttctcaacataccaacctgagggccggcaagacccaagccgttggcatgaaccattgtctcccccatatcgtccaaaagctgtgctaatttctcgttaaattccgtcaccgggcggcaaacttttttcaaaatcgggtcgccgtcctgtactatgtttctaagtgccataattatttctcctttattctgtcatcgggtttacattgatataaactgacgatttattgtttttatcttttaaatacctctcggtaacaccgttcaaaaaatctctgaacctttggttgttcctgcactttatactaagtcgccagcggtaatttttatttaccatttccacatcaaaaggcaccggccccaggcaaataaggggtatttccggcgttgacatctttttgattatatccaaatatgtctttgcgtccttggcgcacaccgcccggttatagtgggtaaaggcaaccgttattaaagtgcagaagggcgggtacatattgagtttgcggtaggcgatttcaccgctgtaaaaatccgggtaatcctgcttagccgcaaggttcaacaccgggttttgaccgtcaaatgtctgtataacggcctttgctccccggctgcgcctgcctgccctgcctatgacctgggttatcaaatcaaaagcctgttcgccggcagaatatcccgggtagttgagcattgcatccgccccgaaaacgcagaccaaattaacatcttcaaaatcaagccccttggcaaccatctgggtgccaatgagaatatcatattcttttctgccaaaggctgcaagcatctcctcatgggcgccgattttttgcgttgtgtccgcatccatacgcagtattttagcggttggtatggcgttttgaatatactcctcaatgtgctgtgtgccgaaaccgccgtaaattatctctccgccgcatttggggcatctgtcgataatcgggtaaaccctgccgcagtagtggcacataagcctgttttgccgtttatgttttaccaaatttaccgagcaatccaggcactttaacggctctttgcactctttgcaaatgccgattgtctggtatcctcggcggtttatcaaaactatgctctgtttttccgccgccttgttttccgccaaatagcggagaacaacatttgaaaccggcccggtatcccctacaagccgctgttgagacatatctataatttccaccgacggcaaaggcagctgcgcatacctttgctccagcttgtgcagatgataaaaccccttttgcgccaggaaatagctttccacacttggggttgcgctggaaagcaccaattttgccccgtgagttttagctataaactgtgccacacgaattgccgaatacctgggcgaattttcgcttttaaaagacctttcgtgttcttcgtctattataatcagctttaaattttcaacaggggcaaacacggcgcttcttgtgcctacaacaacttttgactgtccctttaaaataagattatactgtaaaagcctttccgtatccgtgagctttgaatgtataacactgacagtatcgccgaaatactccctcataagccttatcatttgcggagtaagagaaatttccggaacaagaaccattgctccgcctccccggcgcaaaatattttgtatcagttttataaaaaccatacttttgccggaggacgtaaccccatacagaagatgggttttattatcggtacaggtttctatttcttcaaaaactttttgctgttccccggaaagttccacccggtcacggcacttttgaatatgattataagccacagtgtgcctgtcccggtttttaacaatcagcgcccctttttcctcaagggttttaatcacccggccgcttactccggcggcccgacaaagttccttttctgtcagatacccttctttaaccgcattgtaaaccgccttttgtttttcggttttcacaatgctccggtcacaatccgggttggcaccgtaatacttggttttgtactcggtcagttgccgtgacaaaaagccgccttttatcttgtacaagccgccgtagggtataacagcctttacggcctcgtaccaggtgcaaaatgtggtttcctttaaatgttttattaaagacaatgtgtaaggagttatccggctgtcggcattttttaaatccgcaacatatttcagtttctcgtccctctgccgattaaaatccgcctgcaaaacaatgcctattcgcagtttatcccccttgccgaatggcacaagaactatactgcctacctttaaatcccgccgaaggttttccggcacggcgtatgaaaaaattttatcaaaatcaagggtggctttgtcaaccgcaacacctgccacaatcatataagccgcccccttttaaagttatttttctccgtcaaaaatttttattattgaccgggcgcactgctccacataattattttcaactatgtaatcgtagctgctttggaaacccagttcttcttttgccttaaacaggcgctgtttgataactccgtcgtcctcggtatttctgtcccttaaacggcgttcaagttcctccaatgatggaggagcgatgaatattgtaagggaatccggataaacttttttaacattccgtgcgccctcaacttctataaccaaaataacaaccttgccggattttaccttatcctctatttggcttttaagggtgccgtagtagttgtcacagtaaagggtgtgttccaaaaattcaccctttgatatttttgatataaactcggcagttgacaggaaaatataatccactccgtcaacttcataaggtctttttgcccttgttgttgcggaaacgctgagagcaaatctgtcgtcatggcttaaaatatacttgacaacagtgtctttaccgcagccggaagggcctgaaataactataagattttttcctatttcactcattttcttctgtctccataaattctattaaactgtctttgcttgtgccgaaaattctctctgcggtaaaagcgcagagaataacccggtttgtgtcggttataagcaccgtttttgttttgcggccgaaagatgcgtctataagcattttgtcgcttttagcttttgtgatcattcttttaacaggggcagaatccgggcttagtgccgccactattcgccggctgttgatcatactgccgaaaccgatattcaacattgacattttgttcaccttattcgatgttttgaatttgttctcttattttttctatctcggccttgatttcaacaaccttgtttgtaatgcttaaatcgtttgccttagagcctattgtgtttgtctcacggtttaattcctgggtgagaaaatcaagctttctgccccgtggctcaccggaattcaaaatatttctgtactgtgcaatgtggctgtgcaatcttgtggtttcttcgtctatggctactctgtcggcaaaaacagcagcctcggttagaattctgccctcgtctatctgcttatcctccaaaattacaagcaattttgaatagagtttttctctgtaagcctgcacacgcaaaggcgcttcgatttctatttcgcctaaaatattttctatggtgacaaggcgtgataaaacatcttctttcagcttttcaccctcggcctttcgcatttccaaaaagccttccatagccttgtgcaaaacgatattaacatccttccaaaggacgtcggcatcttcttcggttcttgtccgtgtgaggacaccgtcgaatttagaaagctcctttacgcttgcattaaggggtatatcaaggctgtaagctatactttgcaatgcctcgtaataacttttggcaagaggtatatccgccgtaattctggtgtcgcttttctgggtgtagtttatcatcaggctgacttccaccttgccgcgggaaatcatgctttgaacttctttttttatcttatcgtcaagaaacgaatacgccctggacattctgccggtgtattcaaaatatctgtggttgacgcttttaacttcaacggttatatctctgccgttcagtacaaggttgcccttgccgtatcctgtcatactgtaaaccattttttaatatcctccgtttaatagcttattttacaccatttcaaagggctgtgtcaattacttacggcttaattttatattgctaaaattttgtcgatttcccggcggtaaaaataaaaaagcggagcaaaaatttgccctgcttttttgaataaattatctgtctttaaccggctttttggcgttttttctgcctgctttctctgcggcggcctttaaagccaaaatctcgcttggtttaagctctctgtacttgcccggtgcaagcatacccagtttaaccgcacctacactctttctgctgagccttgcaacatcaagacccactgcccggcacatacggcgaatttgtcggtttttgccttctttaatcgacatttccataaccgttctgtcctcgtcctcggccacaactctgataatcgccggcaaagtttttgtgccgtcgtccaaaacaacgccgttggcaagagcaacaacctgttcctcggtagccgcaggatgaaccgtaacacggtacattttagccacctgatgagacggatgtgtaagggcgtttgccaatgcgccgtcatttgtaaacagcaaaagaccctcgctgtccttgtcaagtctgcccacgggataaactctctccggaatatcctttataagctccataacggtttttctgcccctgtcatcgcttgatgtggttatatagcctctgggcttgtggagcatataatatttgtattcttttttctttggcgggcgaatggttctgccgtcaacagacaaaacgtcttcgtgcatatccattttgtcacccaatttaacagggtggccgtttaactttactctgccctctaaaataatccgctctgcctgtcgtctggaacaaagtcccatatccgcaagagctttttgtattcttgtgtccctcatatactttccctattctgttttagttttgtgatgtctgccgtttttcgatagcggagattacctcccgctcatcggtagtttcggtctttggctccggctgccgtttttctcctttgtcggactttttgtcttttgagataaagccctctactttgtccaaaacttccggaaccatattgagaacacggtcaactgcccgtccgttttccgcaagctgaataagtttaacgctgtcgccttttataaccaaaaagcccacaggagtgattgacgcaccggaagaagccgcaccgccgaataaatctttttgcttttcgttggcaaaatcggtgccgccggacacaaagccaaaactgatttttgacacgggcaaaattgtcgtgccctcccgtgtggtaatcggcgtgccgataacggtgtttgaatccactatctcacgcattttacccattgcgtcgttaataagctgttgaattggatgttccatatcaattctccttttctttggcgatgtccgcctttttgttgttttccaaaattgttttataccgtttaaaaccgtaaagcgccgccgccaaaagcaacaccgggcttgcggttatctgaccgtaaaaatagacgctctgcccatatttatcagcaaaatccgccacaaatatagggcttttaaaactgatatttacatacatttgtaaaaatgaggacagggtgtaaaaggcggttgtggccttgccgtaggcctgccgggtttcaaaggcatcctccttgtgtataggcaaggtgaaagaaatatctttaaactttattgcctttaaaactcttttcatcaggcctttaaaggcggaaaccgtctgttttaccaggtcaaaagaaaactgcaagtcgtccgatatattgggttttccccctttgtctttctccgatttcggctcccgtgacggctttttttcttcctttttaaaagacggcagctttggcaaagggtaaattttaaccttaaagaaaatcagccttacccacaggcacactttgtcccttgcggtgtattctacccaaaaactgcggggtattataataacccacaaaataagtgcaagcagacacagcaaaactttgcccaaaaccgctaatattttaataatcaacctgagattctccgtctataatttcctctgcggaaatctgtccctctatttcccggctcttgtcggattttatctttggcagttgagataaactgtcaagaccgaaactccttaaaaatacgcctgtggtgcggtaactcaaaggatgtcccggtatgtcaagtctgccggcctcctccacaagcccctttgtaatcaatgtttgaacgctggatgtgctgtctattcctcttacctgctctataaaagcccttgaaaccggctgattataggctattatagcaagggtttccatagcggccgccgaaaggggcgcacttttcttaatgctcaaagccgattttactatgtccgccacatcctcatcggtcacaaggcaaatattttcctcatttgccaccaacttaaccccggaggacggcacattgtacttttctttaagggtttctattatatatttaagccgtttttcgtctatttccaaaatttccgttaggctccgggggcttactccgtcgccgccggcaaatataattgcctctgcggacttaaccgcctgttctatcgtcatttaattttccccttcggattaagttcatatcgccgttccgatttattttaatgcggtgggcacggacaagttccaacactgccaaaaatgtggccactgcctcgcttttcccttttatgtttttaaaggcgtcccccaagccggttatgctctttttcataagtcctttgagaacattgaaaattcgtgaacttaccgaaaccataggggcatttacgataggccgaaaattttctgccgtaggcggggactttctcaaatcccttgctgacagcttggaataagcatttgtcagggtggaaatattgtgggttaaactgtatgtgtaatccacccccacttccattgctggccttaaaatcatcttgtctcccgtgtacatttcacgcataagagccgccgcctgctttgcccgggagtattcgatcaactgcccttgcaattcggctttaagtttttcgccctcttcgtccttaggcaataggtaaacggattttagatatataagtcttgcggccatatcaataaaatcactggctatatccaaatccacagcctgagcttgccgtataacatccaagtactgatttattatggtgatgatttccacctgggcaatgctcattttattttttgaaataagagtcagcagaagatccagaggcccctcaaaatcgtccaatttgtaatttattcttgtcattcgttctcccgaatatattgtctattataggacgagataaaaaaatttatccacaaaaaatgtcaatgcgtccaacagtttatatacgcaaccgtttaaaaatgcaagaggtgcgtccaacaagcctgtaaaaaccaatgcaaatacaatcataaaaatgtatctttcatattccataattttaaagtaccgcctgtcgcttaaaaacaggctgtaaattctggaaccgtcaaaaggcgggaaaggcaacatattaaaaatggcaagagaaatatttatttggcacatatatgagaaaattatatacagccaagacaacactttgccccctaagctgccgtaactcaaatttgaaataaagtgaacccagtaaatcatcttgctgataatcatactaaaaagcgccattatcaaatttgacatcgggcctgcggctgcggaaatcgccatgcccttttttctgtcctcaaaattcatggggtttataggcaccggctccgcccagcctataccaaaagccaaaagtgaaagagtaccccaaaggttatagtgtgcaaaggggtttaaagttagcctgccggcatatcttgcggtagggtcgcccaatctgtccgccacataggcatgggcggcttcgtgcaccggtattgccgttaaaagaactatcaccctggccaacagcgtaaacgggtcagttgaaaaaaatgacataaatatttctcctttatcttgcaaggcgcaaaacaacgccttagttatttattatatgttgttttctcttgtttttcaagagattattttgattataaccagtgtttgtgattaaactttaaaaaaaagaaaatttttgcttgcatatatttaaaagatgtggtaaactattttagcaataaaaaagttgtgcgcttactattgcaaatatgcaatgtttgtgttataattcaatggttatcaaattttaggaggtgcaacagaatggcaaaatgcgattgttgtggcaagagtatggaattcggtattaaagtttcacactcacacagacgctcaaacagaacttggaaaccaaacgtgaagagagtgaaggctatcgtggatggttctccacgttatattcacgcttgcaccagatgtcttcgttctggcaaggttacaagagctatgtaattcagccttgaaaaagggaaaatataaagacagcttcggctgtcttatttttttaccattttcagcacaaaacattaaatttaattgtaatatatcgcttattggtatataatcaagacaaataaacttttaaggagttgcactatgaaatatcaggtttctgaaaatgttaaaagcaagtttgacgccttggttaaagacgaaaaagttttaaaggccgttgaatttgtaaaggacgataatgacgcaattatcgacaaacagattgaattaacccttattcctgcccctacattccatgagcaggacaaagccgcaagacttttggaaatgtttaaggaagaaggccttgaagattgccatatagatgaatacggcaactgcgtcggcataagaaaaggtaccggcggcggcaagacaacacttgttgagggccatcttgacacggttttccctttgggtacaaagcttgaaatcaaaaaagaggacggttttatcaaatgtccgggcatctgtgacgatacaagaggccttgccagcgtactttccacaataagagccttaaatgccgcagacatcaaaacaaaaggcgatattcactttgtaggcactgtacaggaagagggcaccggcgcattgaaaggtatgcagtactatgtacagcaccacccggaattgcaggccagcatttccgttgacggcgacggctaccaagaaataacctacgaggcaacgggtattcaaacttttgaagttacgttccacggcataggcggtcacgcctgcggcgcatttgcaaaggttgcaaacccgatacacgcagccggcagagccattgcaaaaattgcggaacttcgtgtgccgaaagaacctatgacaacatttgccgttacaaaccttgaagccggcagcattcaggcggtacacgccattgtgccacgggctacaataagatttaacttccgttcaaacagccaggcggaacttgaaaaacttcacgatgctattttcggcgcaatcgaagatgcctgcaaggaagaaacagaccgctggggtatggacacaatcacatacacagttaaacacatctgcgatgtaaacgccggtaatcaggacagccacgcacctatcgttgagggtgctatgctcagtgcggaatttttaggctgtgaagaaccgaaactgggcaacggcggttcaacaaactgtaaccgtgctttggaagcaggcttgcctgccgtatgccttggcggcggtatggactatgactcaaagtgccacacacttgacgaacagttcagaattgacgacgcatataagggatgccagcaggcactgcttatggcattgctttgcgccggcacagacgcagctgagagtattatagaataaataatttctatataacctattttccataatttaatataaaaaatcattccacttgcattttattgtgcaagtggaattgttttattttttaaatataaacagatattcgtgtgctataagtaaaaagttgtactttacactattggttttccagtatccggttgctttgcaattatgttgttctttgataataagctctttcaaagtaaatccggcatcttgaaaaattttcataacatcaaatgacattgggatcatacagccctttttccttgtatcccccataagtaccgcacaaaacttgccctttttaagtacacggtaactttcggctgcaaccttttccatctctttgagaaaatctctaatttttaacaaagataaatcttccgcaatatcttcgctgtaatgaattatatccgcatagggcggatgtgtacaaatcagatctatactttcactttgaataaagtcaagatttcttgcatcgccttttcgtatataaactttgccggttgctccttcatgttcaaacgaaactttttctctgcatcgttctaatgcaatatcattaacatctacgccaattatatcacgattgagtaatttagcttcgacaagcgttgttcctccaccggcgaactgatctaaaaccaattcgccctcctttgaatatctcaaaataacatttctcggtatgtatggcgaccagttaccgcgccattaaaattctgtccattcagttacttcgttctcagggtttacaattctcatttgcttgtattgaacttctcctggagctaattcaaactcaccgcttttatacttttgctctgcaatgctcatagctttttcagcactttcagctgtaacttcaaattcatctacaacagtttcctctattacaataataaatttcttcattataaaacctcatattattttcatatatcttccgtcacctaagaattcaatgacacctcgatctcttaaaaattgaagttgttgtcgtattttaggctttatattactatttttaggatatttaatatgcaattctttctcaaatttatatatttcattaagagtaaattcctttgttggtataatattgatacaatgcaaaatatccataagccaaccgcgtccgttaatattattgattgcaagttggttgcttttatttaccatcttaacaacatcttttatatctgcaatatttccgtttgatattatatttattattccttgatttggtattttatcaaccaatatgttgcaaccaatccaaccggctcgcctagcgctaggtgataacggattgcgtttttcaataatgtccggcacaaaaaagtgttttggaactaaaaccaaatcttttactttcatttcattctttgaataactcatgaagaaaaagtccgggttattgtttgaagttattcggtctatcatagtactatatgcaccgtcgctaaccttgtgccccaaatttccgtctttgctttttaattcatattcattgtgacaattcggacagaaaaaatcagcaacaggtcggttgttttcaaagtgttttattcgagtttcaccgcatcttggacaatacatattatcctttacccaattttctgtcaaaattctggctatttgagagttggaataatatgtagccgtaatataattactatcaaaatcagttgtcatcacattttgctccatatttttatttctgttttcccataatcacttttgcacctttttaatccatatcatcaacaaaatgcgcaagatcttcttgttttccgtcatcgaacaaattttcggtatatgaggtaaaacttgatgtgtctgtaataggtctgtacggcggatcaaagtatgcaaatgtgttttcatctataaatctttccgactttttataatcacccattataatagttacattttttaatttttgagccgcatttcgtaaatttttttcatcgcatataattgggttcttgtacgagcccatgggtacgttaaaaaatccgtttttatttactctgtacaatccgttaaaacaggttttgttcaaaaagatcatcaatgcggctctttcgacaccgctatcaaaatcgccatattttttcagtaaattaaatcgctctcttttctcgatataatacttttttcgcaattccgtatttaaaggaacaaattgtttttgcatttccgtaagagtatttatcaaatattccacatcatcgcgcactgtacaatatgcgtttataagatcgccgtttgtatcgcttacatatatttcgtcaagttcaaatttattgagtacatcaaaaagaaccgctccacctccgagaaatggctcggcatactttgttatatttccatctttaaaagggtaataacattctatttcttttatgagttggcttttaccgcctgcccattttaaaaatggtttagcgtaaatgtttgaatttttattttccataaatctcaaccgcaataactaaatattttaatcttattatattctaaaactactccgataacaatagtaattttgttgcacaagcaaaaagggcataaaaacaccctttaaatcaaataaaaagcggcctttacggtcgctttttcttaattatgcaaagttttaaatgccttaaattatcggcttatatctccacaaatgtgcctatgccggcttcagtggcatattcgtaaatcatattggcggcggaaatatcctcaacggaaatgcctacggattcaaaaaatgttatttcatcatcgctttctctgcccggggcggtgccgtttataacccggcctgcctctgtcatttccggcattttctttatttccccattgtttaccggaataagtatatcccctgcgtctcgcaacacggcctctgtccagtcggtgaagattttgcttttttctattgtttccccgtcaacctctctgcctgttgcggtacaagcgccaacccggttaatatgtgcgccgggtttaatccaccgacctttcaaaaacggccgggtgcttcttcctgttgtggttgtgcagattatatctgcgttttcaacggcggattttacatcggcgcaaatggtaaacttaactgccgggtattccccggacaaaatttccgcagctttttccgcccttgcccgggttctgttccaaagagttacggatttaatatttctcacaagcataatcgcccttacatgagccataccctctttgccgcagcctaaaattgcaagattttctgcatctgttcttgccaaaacatcggttgcggctgcggaagtggcggcagttctcataactgtgataagacctgcgtccacaatggctttaaggctgccgtcggaaattctaaacagcggaataacccctccgcttgtaccttttttagctgtctctgcgcccggaaaaatcgtaatctttgcgccggttacatcttcccgaatatttgaggccggcatattggccaacttgttgtcgttgtcatggataatcatcgttctctgcaaaacctttgtccgtccgttgctgatggcggccaaagattttctcatttcgggaatacacctctccggggtgagaatttcttcacattcttttctgttcacaatcaaaaccctgttcataactgcctccgtttaaatttctatcttagcccatttgccggtggcaaatctggccgaattaagtacgcatcttacggtttggtctataagggtgcctacccaagcgcctataagacccatacccagcgggtaacagaacacccaagcgcccagcggtcttataatcgtaatacttacaaaagccacaaaagctacaaactttgtgtcgcctgcgcctttaaggcaaccggcggtgataacctgtcttatctgcaaaagaacccggacagccaagacttttgttattatgctgccgtaattcaatatttccgggtcgcttgaaaatgcccggaaaattgccctgccgcaggtaaagaagaacacaaacataattgcggaaaccgtcatgccaaagcgctggcaggcaccgccgtacatggcggccaaatcccggcgtttttcacccaggctcatacctataaggcttaccgccgcaacattaaagccgtcgccgaatgcaaaggaaagcgacatacagttcatgcctatttggtgtgccgcataggcggttgtgccaaggtgggcaacaaccattgagaacatcaaaaagccagctctcataaatatctgttcaacaaatgtgcttgatgtaagatcaagaaccgagtgcattgttctcttgtcaaatttaatacctctttcgtgatgtatgtacaaatatccgtcttttttacagatggacataagagatataacaaacccgaacacactgcctattacagtggcaatggctgctccccttacgcccaatgccgggaaaccgaaatgtccgttgattaaaagatagttaaagaaaacatttacaacatttgaaattatatttgttttcatggctatttttgtgttacctatacccctttgggcggcatttatagtcattgttgtgaggttgaaaaaacttagacccataattatctggaaatattccgtggcgtactctattgtgtcagactgtgcgccgacgatttccattaaaggccttgcataaattgtcattatcgaaaggacgataacctgtaaaattattgaaataatcaaaacttgtttcaaaattctgttggcggaatctctgtcgccttcgccccttcttctggcaacaagggcggacatggcaacattcaatgccataaacacggcgtaacctacaaatttaggctgtgtggtaagacccacggcggaaatagcataggtgccaaggcttgaaaccattatgttatctataaaacccacaagggcaataaggaaagattccacaacccggggccatgcgattgatattgttctgcgcattattgtctgtgcgctgggcatttcacccattggtttaaatttgccgataagtttgttcggctcgaataactttgaatacaactctaaaataaatatcactcccctaaaaataaatacacaagaaaattatactattgattttgcgtaaaatcaagtttacaaagccataacaaaatatttataagcggaataatataaaacagaataggaggtattttcttgtttatatttgcaagtttacttgccgcaagtattgacgcctttctgcgggggtttttactgggcaagatagaaataaaatgtcattttgtggattatttcaaaatttttattataatttttctcgtttgtgcattggcctgttttttgggagatgaaataaaccaaatttacagccggcggtatcttaacataatcgggggctttttaatgctctttctctctgcgtccgcttttaacggtgccagaaaaagcaaacttccaaaaggttctttgccggttatggccttatcccttgcccgggacggtgccgccgtatgtatgtatcttgctttcagcggatacgatatactttttgtaagttttttctcggcgctgtttcatattttaatgctttgggcgggagttgcggcttctaaatttttttcatttaaaaatgaaggagcaatgggcaagtatttttcggcactggtatttttccttatagccgtttacaaattttgtcaaatatgaaaaaagattgcagaacaataaccaaagaaaaaccgcactttgctttaaagtgcggtaaaaaatcaaattttattatacaaatagtaatttttaattaaaatataaccaaataatcaatatttattgtagtggacacggctttcgtcatatctttcaacaaatttgttggcgttttcctctgccgggtaacctatcgaaacaacaccgaaaggtttaacattttccggcaagtcaaaaatttttataatgttccggtctctttcgtcaccgaggcctgcgcccatccataccgcaccaagacccagttcaactgcctgcaaaagcaaattttccatacaagcgcccatgtcctggggcacatgaccctgagcacgaagtcccgtgcgatttaacagcaccatggccaaatgggcatctgcaacaaattttgaatatggactgaaagaagaaagttttttcaaaagctctttatcgtcaacaacgataaattcccaaggttgttggttggtggcacttggcgcttgcatagcccggcgcaaaagtttttcaactttttctttttcaacaggcttgtcggcatattttctaacgcttcttcttgtaaaaatttcattcatagtcaatcgtcctcctttaatatctgttcaaacacatcgcatactcttacggcatctgccttggagacatcattattggtgataaatcgcaaataaccaagttcctctcctgccattttaataccgtgttccaacattttacccggcaatgaagctataaattgcctggatttgtcaactttaaagaaaacaagatttatatccacatggtcgctgcggacacgaacccctttcattttggataatctgtccgctatgtactttgcgttgtcatggtcgtcttttagtcggtcgaccattttgtttatggcgattattccacaggccgccaaaagcccggcctggcgcataccgccgcctaagagcttgcggttttttctggctttttctataaattcggcactgccgcagagaacgctgcccaccggggcgcaaagcccctttgaaagacaaaccataacggagtcgcaatattgggtaagttcttttgcttctacccccaaagacaccgaggcattaaaaagccttgctccgtcaaggtgtacaggcaatccgtgagcctttgcggcgtcatacacggctttcatctgttcaagggtcataactttgccgttggaaagggcattttctatacacacaaggccggatttcggctgtgttatatcctcatcagagggtcggcaagcactttcaataatcgcaggggtgagaatatcatcttggcattctaccgccttcacttttacgccgcttaaaattgcagccgcacctacttcgtgtacaactatatgactgccggatgaaataattatttcatctcctcttacggtgtgtgtcataaccgccaactggttgcccattgtgccggaggccacaaacagcccggcctctttgcctaccttgcgccgacacaactgttcaagatttttaaccgtcgggtcatcgccgtattcgtcgtccccaaccggcgctgtgtacatagcatctctcatttcctgtgtaggttgggtgacgctgtctgagcgcaaatcaatataattcattcttaacctcttaatttatttggcggtaaatgtaacgcctgagtaatagtgcgacaaaatttgctgatagttccagccctcgtaggaggcgtaaagctgtgcgccccactggcttaaacctacgccgtgaccgtagccacgggttacgattgtaaaattgccgtcggcataggaaatatccattgcgtgactgcgcagataaaccccgccttttgccataatatcatttacaaaccaatagcccgttatatttcttgtgttgccgtttgaggccacataggttgtcgcatcacctatgtgcaatctgcgtatatagccgccgtcggtgtaatccgcaactgagaaccagtttgccgcattctccaaatcaaggttcacggaaactgactgttctattatttctttcatcttttcggcggaaatcgtgtatgttttttcataatttgaagccaaatagtcatatttgctttccaccgtttgcaggtaggcataattttgcccccaaacttggcttgccgggtttgtgtaccctgccgccgatgcggagtaaacggcatttacatagctgccgttgtactgcataaccacatttgccacttggcttacggcgtttaccacgctttgcgacgggcttgatctgccgtttaccgccggtgcgctgttgccttgggcatatt

SEQ ID NO: 3689 - DNA, 7442 bp, Unknown
  16S sequences of unknown bacteria
acccccgacctgctgattacaaatcagctgctctaccaactgagctacaccagcaagttgttcgctgaacgcaagtgataatatatcataaaagcccgccgctgtcaagagtttttttaaaaatttttaccccgaaagggtttttaatattttcaggtctcagccggcttttgctgctcggaaatcggagtcagcgaaaaaacaaggtcaaaatattccttgccgtaattgtgaaagctcccttcctttatcatgcgggaaagttcctcctttgagacccacttggcccgctcgacctcttccttttgcaggttaagccccgcaggctcgacatcggtctgaacctgccatatatcaataaaggaaattcggcgctttatgcgggcggcaaagcgcatttgtccctcggaaggatttattccgagttcctcaaaaagctctcgtcttgcgccctgctccgactgctcgccggcaaccacggctcctcccgtggcagcccattcacccgccatgggctgtttaaagggactgcgctgctgaataagaaactcgccgcgtgaattggtcacccaaatatgcaccacaaggtgaaaccgtcccttggggaattttcccttgagccgacggcaaaccgtttgccctgtcggacggcccttaaaatccaaaacatcccaaaactctttgttcatctaccgcctcgtccccctttcgactcggatttttcgttttcatattcttcaatgacctgctgccatttttcgtcgctcataagctcgcccgacaccgaaaaacgggaatagattttatttatctcccgctcaaaggccgccctttcaagacgcgcgtcccgaagctcgattatcagaattacaagggcaaaaaccgccataagcagcacgggcagataaaaccatacaatcatgttgggattggcggtgcggtagtcgttttccgaattgagaggataaaccgcggttatttggaaaatatgtcccgccaaaagggcgatgttgacaaaagtaattatgcaggaggcaaccctctttttcttaatcatgagcacaaagcttgcggcaagcagcacaaggcaggcaagggtcataaagcggtcgtttgcaaaaagcgacagcttttcggcattgcccgcggcggcatagcgctcgacggcaagagaggatataaaaagatttaaaattataacgaggaaataccacaccgaaaagacataaaaaagaaattttgccgtgttataaagacttccgcccacatgcttgtatttttccttcttgggcaggtgtttttcaaaaagctcgcctctgacccgctcgagcaccaagttttctccgcgggttctcagctcctgtgacgatattttttccatgctttcaccttcttttattattatacatacatccgcccgtcattgcaagagcaatatactactgctccacgcccttcatggtgaggcttatgcgctttttttcaagatcgaccgaaagcaccttaacattcacgacgtctccgacgcttaacacctcggaaggatgctttataaatttatcgcatatatgggaaatgtgcacaaggccgtcctgatgtactccgatgtccacaaaggcaccgaagtcgataacgtttctcacggtgccctttatggtcatgccttcctttaaatccttcatttcaaggacgtcggtacgcagcagcggagcggggagctcgtctctcgggtctcttcccggctttgaaagctcggctacaatatcgttgagggtgggaacgcccaccgaaagctcctcggcgagattttccgctccccgagtctttacaagtttctcgagagagcccggcttttcacccgacagctcctttttgccgaatccgaagccttcaagcagcttttcggcgattttatagctttcgggatgaaccgatgtgctgtcgagaggatttttcccgtcgtagatccgcaaaaatcccgcacattgttcaaaggccttggggccgagcttcggcacctttttaagttccgtccgcgattcaaaccgtccgttttgctcacggtaggacacaatatttttgcacaccgccgaggaaagccccgaaatgtgggaaagaagggattcggaggccgtgttaaggtcggcgcccacgctgtttacacagtcctccaccaccccgtcaagagcctccgaaaggcgcttttggggcatatcgtgctgatattggccgacgcctatcgccttgggctcgattttaacaagctcggcaagagggtcctgaagccgccgtgcaatggaaacggcgctccgaagggtcaaatcaaaatccggcatttcctctgcggcaagcttggatgccgagtagacgcttgctcccgcctcgctcacaaccatatatgacaccttgcggtttacttccgacagcaccgacacggtgaacatttcggtttccttggaggcggttccgttgccgatggcgataatatcgaccgagtgcttttcaataagctttttaagggtctgctttgaggcctctgcctgcgccttgccgtgggtgggatatataaccgccgtgtccaacacctttcccgtggggtcgacaaccgccaccttgcaccccgttctgtatcccgggtcaagacctatggctgttttgccctttatgggcggttgaagcagcagctgacggagatttgtgccgaaaacctttatggcggcctcgtcggccgattcggtcagctcgtttcttatttcccgctcgaccgaagggaaaacaagacgggaatatgcgtcatcgcaggcctcctttacggcagccgcgcagggggtgtctccctttacgaacatggaatatacggcgttgaggggcttttcggcgtccaccgtcaccgacaccttcaaaaagccctccttttcccctctgttcaaagcaagtacgcggtgccccgcaattttattaaccttttgggaaaattcataataggtttcgtaaacgcttttttcgtcctttgccgccgaggattcgataaagccgtttaaatagacaagatttctcaccctgcgcctgacatcggcattgtcggaaacactttcggcaataatatcctttgcgccggcaagagcctgttcggcgttttccacctgcttttcggggtcaacatatttttccgcaaggataagcggctgctcgcccgtttgctgacagagcagaatttcggttgccagcggctcgaggcccttttgctttgcgaccgacgcgcgggttttccttttcggcctgaagggacggtatatgtcctcaagctcagttaaggtttcggcctttttaagggcagcggtgatttcttcagtcatgttgccctgctcggaaatcagatttccgatttcctcacggcgtgcatcgagctttcgaaggaattccagacgttcggcaatgctccttatgagctggtcgtccattgttccgtgcatttccttgcggtaacgggcgataaaggggatggtgtttccctcgtccagaaggtctattatattctgagcatgaagctccttcaccgaaaattcttcggcaagttttttggcatagtccatttcatttttcctttcggcaatcgattttgccgttttttttattataatatcatatttttccgctaagggcaaccttaagcaacaagcaactcaaaccgcggtgagtgataaatcggaggcttattcgaaagcttacaatccttcagtcagcttcgctggcagctccctttacacaagggaggcggcacggcacagccgtgacggagggattgtcattctttttcccatctcattcaattaagcaacaaacggtcgaaccttgcgcgaaaaatttttccgtgatataattacccttgtcaaaggagaaattaaatgaaaaatattatattgattgatttggacgagacccttctcgactttaaggccgacgaaaaagccgccctgacaaagacgctcaccaccctcggcattgagccctcaaaggacacgctcgagctttacagccgcataaactcggcgcaatggaagcggcttgaaaaaagagaaataacaagagagcaggtaaaggaaaaccgctaccgtctgctttttgaggccttgggaaaagacacggaccctcaaaaggccaacgaaatttacgaaaaagagcttgcaaagcaggggcggctgctttcgggcgcaagagaagcccttgagcggctttacggaaaagtccgcctttttatcgcctcaaacggaaccgttgacgtgcaaaacgggcgtataaacaacaccggaatcggtaaatattttgaaaaggcctttttttccgaaaaaatcggtttcgaaaagccggacaaaaggtttttcgacgcctgctttgcccaaatcccgaattttaaaaaagaaaacgccgtcataatcggcgacagtctttcctccgacattctcggcggaaaaaacgcaggcatcactaccgtttggcttaacaaatcgggggacggctctccccttgccgacatgaccctgaaaaatataagtgaggccgccgatgccgtaataaagggcttgtaataacggacatttaatgctataatgacttaactgtgactttttaatagcggagtgataaaaatgactttatacgaagaactcgaatggagaggtcttattcaggatatttcctcaaaagaccttatcgacaagcttaacgccggcggaatgaccttttatataggcaccgaccccaccgccgacagcctgcacctcggacactattcctccttcctcatcacccgccgtcttgccaaggcaggccacacccccatcattcttgtgggagcggccaccggtcttatcggcgacccgagaggcaccaccgagcgcgctctttccgacagggacaccgttttcaaaaactatgaggccttaaaggctcaggttcagaaattctttccctttgaagtggtcaacaattatgactgggtcaaggacattcacattatcgactttttccgcgattacggcaaatatataaacgtcaactatatgcttaacaaggatcttgtgcgccgtcagatggaaacgggcatatcctatgccgagttttcctatatgctcattcagggactcgacttcaaatggctgcacgagcacaagggcgtcgaccttcaggtggcgggctccgaccaatggggcaatatcaccaccggtatcgagcttataagaaagaccaccggcgacgaggtttatgcaatgaccatgccccttgtgaccgacgcaaacggcaacaagttcggcaagagcgagggcaatgccgtttggatcgacaaaaacaaaacaagctcctacgaactttaccagttcctgctcaattccgaggattcggtggttatcgattaccttaaaaagctgaccttcctcgacaaagaaaccatcgagcagattgaaaaggagcactttgccgctcccgaaaagcgcatggctcaaaagcgccttgcaaaggaaattcttgacgaccttcacggcgaaggcgcctttgaagaggccgaaaaaatcagcgagctcatgttcaagggcgacgtaaagcacattcccgtcagagatttgctctcggctctttctcaggttccccattttgaggccgaaaagggaaagcttatcgacattcttgtggaagccaaggttttcccctccaagcgagaggtcagagaaatggccaagaacaaggctctcaccgttaacggcgacgccgtggaaaaccccgacgaacttgacatcacctccgacaacctcatcgacggaaaataccttgtggtcagaagaggcaagaaaaaatattttgtcggtgaaataaaataataaaacaataaaacccgtcgaatcattttaactcggcgggtttaaaattcggaaaggattggtttttttgaaggctgacggaaaaaagcttttatccctcttttggacctttttcaaaatcggcgccttcaccttcggcggcggttatgccatgatccctctcattcagcgggaaatggtggataacaaagggtggataagcgaaaaggacattttggaaattgttgcgatttccgagtcgacgcccggacccattgcggtcaactcggctacctttgtgggataccaggtcgacggtgtcatgggctcatttctcgccactctcggagtggttctcccatcctttgtcatcattctcgccatctcctttgtgctcaagcagttcgagcagttaaaggccgtaaaatacgcattttggggcatccgcgcgggtgtgctcgccctcatcatcaagggctttatctccatgtataagcagtgcccgaaaaatgtactttcatacgtcatcgccgcccttgcctttgcggcctcggctgttttctcctttaatgtgctcataatcatcatttctgcggcggccatcggtcttgccgccacaatcatcgcgcagaaggagggcaagacattatgatttatctcaccctcttttggaccttctttaaaatcggactgttcaccttcggcggaggatatgccatgctgccccttattcagcagtatgttctcggctttaactggctcagcgaggaggagcttgtaaacttcgtggcggtgagcgagtccactcccggacccttcgccataaacattgccacctatgtgggcagctcgcaggccggcgtgctcggtgctctttgcaccaccttcggcgtggttctcccctcctttgtcatcattcttatcgtggccaagtgctatatggcctttaaggaaagccttgtggttcgcggaatgatgaacggccttaagcccgtggtcgtgggacttatcggctcggcagtcatctcctttgccgccgccgttttcttccctgcgggatttatgttctcaaatttcacaaccctgaaattctgggtttccgccgtactttttgccgccgctctcatcatggcgctcaaaaagattcaccccataatcattatcataatttcggccgccgtgggaattgccgcgggctatgcggggctgctgtcatagcggtccgaattttttaaaatcatatcccataaaccgaccgattctgattcgtgcccctttaagcacgcggctgacggtggagcggttaacattctgctcctttgcgatttgcggaatggttttgcggtcgaaataatacagcttaataaactgtctttggcgctcggtaagctcatgagaaattatttctctcagccttgccagcgccttttctttttgcccgtcgtcctctgccgacatttcgaaaaaagcacggtagctcaacgcctccacccgataatttttaagcgataaatttttcataatcttctccttcaaatgcattcttattcgtatggccgccccttcctccgtttacaaagaaataggaca

SEQ ID NO: 3690 - DNA, 32759 bp, Unknown
  16S sequences of unknown bacteria
ttatttgtccgattttttgtttttctaaaaatttcgtctttgcttttttagataaagccaaaatccagaattaaattcccaaataaaaaataaatattatttgcatattctaaaatataaattttatataaaattacgtatataattattttttagatttttatgccgtttatataattatacttataatacatcaaatcaatataaaattataattgtttttaaacaaatacagatatttttcagaagttatttttctcttcattctgcctattcgttttgccggaagttacttcggcaaacgggaacttaccgcggcatttaaacggaaaaaatatttttttgcccggcgtgttgtcctatgctatactataaggaagaacaaggtgggagggatacgtcggatgaaatgtccaaactgcggcggggattccaaggggccgttctgcgactattgcggcacggagctgaacaagaaggagccgaaggcgaaaaaaaggcaggatcaagtgaggcgcagatggatcgtcgtgaacatgatcgctgggtttgtcggtatcctgttctgcctggggctgatagtctggctattcctacctccgaccgacgcggtaacatataaaagcagcacggtcattgttcaaaacggtacgacgcagacggtcaaggcgcaggccgtgacgacggcgaccgcgaaaacgactgtgccgcccgggccgggctcgcgagaaaagcccatccggaagggagacacggccgttttcaacggaatggacacgctgtttgaccaataccggctggagctgacggtgacggacgtcaagcggggacaggaagcctgggcgctcgccgtggctggcaaccgcttcaacaaaaagccggaagccggcaaggaatacctgctggtcacgtacaaaatcaaggtattggacagcgccgacggcaaggcagtcagcctgaacaacgccctgttcaagttcgtcagtcaaaagggcgtgaagtacaacgacttcgtctcgctggcggggctgaagccggcgctgaccgacctgtacaagggcggcgaggcggaggggatcgtctacggcatggtggacgagggtgaccagccgctggtggtgtttctggaacggaacgacgggggcatctggttctccgtggaataatccctcttgcattccggcctgtccgggcatatattggtcatattataatgaaagaaagcgaagagcggaaacatctctctagccagatacagccggtatacctgacggtatgccggctgcttttatgatagagaagaatcctccatccctcatcttgtattttcacaatgtatatccattgcctcccctgcttattatagtctgggtaagactatttttcaatagtcttacccagacttttgtaagctgatagcaggaggtatgctgctatggattatatcgatagactgactgaactgagaatagaccgggatgtcaagcaaaccaaaattgccgaactgctcggatgcaagcagtccgctgtctccaaatacgaaacccgaaaagtgccctatcataccgaggacattgcaaagctctgccggttttacaacgtctcggcggattatgtgctggggctgccggagggaatgccgtaccccaagcgcacctgaaccaaagccggtatacctgacggtatgccggctgtttttatgggcgggcttcccggcggcaggcggtgggagactggccggtgcgggcgcggaagaagcggctgaaggcatagacgctggaaaagcccagacggtcggccacggcggacaccggctcgtccgtggcggtgagcaggcggcgggcccgctcctcccgcaggcggttccagtaagcgacgggggcttccccataaagttcgcggaaccggtgggccaggtggtacttgctgaccccgaacagggcggacagccgctccagggtgagggggccgccggactgctcgatatactgcctcaccgagtcgtacagggccttatcccggccgggcgcggcggggccggggcggcaggactcggccagcatatacagcatttccagcaggcgggcggacagcagcagggcgtcggccgggcggcgccgttcccacacgccgatgagatccagcaggcggctgtggaaggcggcgggctgttccaggcggacgaggctgggaatatcgaggcccagctctggcaggagatcccgccgcatcagcccccattccgccggggacagggcgtccctgtccttgaaattgacgtacacccggtggctgtccggggcgaattgcaggtcgaaatggacgtgcggctgggaaaagacgccggcggcgtcgatcaccgtcaggctgtgccgctggttggggcggaagaggatgatgtcccccgggccgcagacgaaggtctccccctccacggtataggaggcgcggccgctctcgcagtacaccagctcgtaatcaaaaatcacccggtcggccatatggcagggcggatcgatccaggaccgcatggccagatggacgcagggtgacagggcttccaggcgcatattgactcttcctttccggtatcccccgcaagaatcgttaaaaacaacgcaagcgccgccatggaaccggcgggcaaaatcgggtattctggacacacagcaacgcaatgaaaaggaggtcagcttatgttcaacggactcggcatgcatatgggcaatctaagccgtctctcccccgccagaacccggtcgatcagcgcggagaacccccgaggcgaaaagggacgggcggccatgggcatggagggcaccggcgcccactttgcccgcaacatcggggagggctggaaggtctccccctcggtggtcgtcccagccgggacgacctacacggtggccgacatcgaggggccgggggcgatccagagcttttggatcggcggctccctggggcggcacatcctcctgcgcttttactgggacgggcaggagaggccgtcggtggaagcgccgatcaccgactttttcgcctttttctggccggatcagaaccaggacagctccaccgggcggttccccaccctgcaatccctgccggtgctggtggcccccaaccggggatacaactgcttttgggaaatgccgttccgtcagcggtgccgcatcacggtggagaaccggagcgatcaggatgcgatcgtgtattaccaggtcaactacgccctgaccgaggtgccggaggacgcggcctatttccacgcccagtaccggcaggcccgcccggtggagggcggggtgtacaccctgctggacggcgtgcagggccggggacattacgtcggcacggccctgggggtgggcatcaacggccacggcggctggtggggcgagggagaaatcaagttctacctggacggggacggggcgtatcccaccatctgcggcaccggcaccgaagactatttcggcggggcgtacgactggatggcgggcggggcgtacaacacctattccgcgccatacatggggatgtaccacgtcatcgcgcccgacgggcgctacaactcgcagcagcggttttccctctaccgctggcacattccggatcccatccggttcgagagcgatttgaaggtcactatccaagacttaggctggcggggcgaccgcacctatctgccccgcaaggacgactttttcagcatggcctactggtatcagacgctgccgaccgcgtcctttcccgcgctgccgggcgggtacgatctggaggtgctttagcgtacgcttaggccgtagctggtgaggatctcctgggcccgggccacctcagcggcctcggggggctgggtgtcggtcagggtgtagggacaccccagggcctcccacttgtactcccccatcttatggaaggggagcagctccacccgctcaatacaggcgaaatcccggagcaggcggcccagctcgtgcagatggggctcggtcagggtatagcccggcaccaggacgtggcggatccacacgggcttccgggtggtctcgcagtgctggaggatatccagggtgttgtccatcccccggccggtaagagtgcggaacaacgggtcgttggcggccttcatgtccagcaggagcatgtccgccgcgtccaccgcctgccggcaggccagcagggaaacgccgccggaggtatccagagcggtatgcagcccgttttcccggcagccctccaggatggaggcagcgaaatccggctgcagcaggggctcgcctcccgagagggtgacgccgccccggcggatgaaattctgataccgcaggatgtcccgcaccacgtcgaccgaaccgatcgcctgcccgccctccgtgttccaggaatcagggttgtggcagaacaggcagcgcaggggacagccctgcaaaaacagcacatagcggatccccggcccgtccagagcgccgaagctctccaccgaatggatccgacccatgacgttggtcatacaatagcctcccaggcaagaaatgcccggcccccgtgcgagggccgggcttcctttttaaaaccgcgtgtggaacgatgacgttccacacctcctcaagcgctctttgccggattagaaccgcgtgtggaacgtccgattaatgacgtccagctgctgctcgcgggtcagcttgacgaagttgacggcgtagccggaaacccggatggtcagctggggatactgctcgggatgatccatggcgtcgaggagcagctcccggttgaggacgttgacgttgatgtgatgcccgctctcgttgaagtagccatccatcaggcccaccaggttatccgcctgctcctcctcgcttttgcccaaggcgccggggacgatggagaaggtgtagctgatgccgtcctcgctgtaatcgtagggcagcttggccaccgacatcatggaggccacgcagccgtggctgtcccggccgtgcatggggttggctccgggggcgaagggctcgcccgccttccggccgtcgggggtggaaccggttttcttgccgtacaccacgttggaggtgatggtcaggatggacagggtatgcaccgactcacggtaggtggggcatttgcgcagcttgcgcatgaaggtcttgaccacgtccacggcaatgtcgtccacccggggatcgttgttgccgaatttcgggaagtcgccctccacctcgaagtccacggccaggccgtcctcattgcggatggggcgcaccttggcgtacttaatggcggacaaggaatcgcagaccaccgagaggcccgccatgccgcaggccatggtgcgcagcacctcgttatcgtgcagggccatctggatcttctcgtagcagtatttgtcgtgcatatagtggatgacgttgagggtattgatatacagctgggccagccagtcgaggatggtgtcgaacttcttcatcacatcgtcgtagtccaggtatttgccccggcaggccagcagctcgggccccacctgcaccccgctcttttcgtcccggccgccgttgatggcgtacagcagggccttggccatgttgcagcgggcgccgaagaactgcatctgtttgccgatgcgcatggcggacacgcagcaggcgatgccgtagtcgtcgccgaacttcttgcgcatcagctcgtcgctctcgtactggatggagcaggtctcgatggacaccttcgcgcagtagcgcttgaaattctcaggcaggcgggggctccacagcacggtcatattcggctctggcgcggggcccaggttagtcagggtgtgcaggaagcggaaggacattttggtgaccatatgccgcccgtcggtgcagatgccgccgatggattccgtcacccaggtggggtcgccggaaaacagctcgtcataggcgggggtgcgcaggaagcgcaccatgcgcagcttcatgatgaaatgatcgacgatctcctggatctcgctttcggtatagcggccctcggccaaatccttttcggcgtagatatccaggaaggtggagacccggccgatggacatggcggcgccgttctgctccttgaccgcggcgaggtagccgaagtacagccattggacggcttccttggtatccttggcgggcacagaaatgtcgaacccgtaggaggcggccatgcgcttcagggcctccagggcccgcacctgctcggccagctcctcccgcaggcggatggcgcgggagtccatgacgctgaaatccgcgtcgtcccgggaatgctgcttctcctcgatgagatgatccacgccgtacagggccacgcggcgatagtcaccgatgatccggccccggccgtaggcgtcgggcaggccggtgatgacccccgacttcctggcggcccgcatctctttcgtatacacatcgaacacgccgtcgttgtgggtcttgcggtactcgaacaccttttcgatttccggatccagctcccggccataggcttccagggagccccgcaccatccgcatgccgccgaagggcataatggcacggcagaggggttcggcggtctgcaggccgactacctgctccttctcccggtcgatgtagccgggggcgtaggcgtcgatgccggagatggtgtgggtgtcgatgtcgtacacgccgccccgggcagtctcctccttcatcagggcggacacctcatcccacagggccttggtgcgcgcggtggggggcgcgaggaagctctcatccccgtcgtagggggtgtagttgcgggcgatgaagtcccgcacatcgatgtatttctgccaattgccggatttaaattcgctcatggggctacctatcctttcgcatcgcaagggaattcccgccgcggcggatccgcggcggcgtctctatgcttgtagtataccaaattcgaccgcgattctcaatggagggaatgaaaaataaagtatactagtatggtatacttttgtacatattgaaaggcgggcaaaaatgggaaaagcggggggaaatgcaggggggattcgagaaatccgcaccaaatcgggggaaacggaatagcatggaaggaaagccggagcgagagacaggggcggagcgctcgaaagggcggcgtgtcgtccggcgagagagaaaggatgagtgattcgcatgaacgaagccaacttgaacgcggcggacgtccgttttttcctgggggccaacacgccggtaggattcgtcgggtatctggacgatctgtactttccccacgacggctggcgggcctacattattaagagcggcccgggcacggggaaaaactccctcatgcgggcggtaatggccgccatgaccgaccgggggctggaggtggaggctatccactgttcctccgaccccggctccctggacggggtgctggtgcccgcgctgaaggccggcattatcgatggtaccgctccacatgccgcgggcacgcccacacaaaaatccgcgccatttcttgtcaaatatgaagatttccgcattttttcgtaaaaatacggcggggctggttgtaaaaatccggacggttgattatactggaaaaaaggccgtcttgtcccacggacgggggccattatacgaatggagggtttctctcatgcaaaaaggtaaattcggtgtgtgtctgtggttctatgccgtactggcgttcgtgctggcctttctgggccagacgctgctgtgcgggcttctgcttggcttcgtgattctggcggagaaaaacgaatggctgtccaagcaggtgatgcaggcgtttttcctgaccctggcgtcgtccctggtcggaagcgtgctggacattctgaacgtattccgttccatcccgtttgtaggcacggcggtttccgttgtcttcaacggtatcaccgggctggtctccctgattattctggtgttctgcatcatcgccatcaccaaggtggtcaaggagcaggacgcggggcttcccctggtgtctaagctggccaaccgggccttcggcttgcttgagcagaaggtatacacccaggcggcgcccgcccagcccgtcgcccctgcgcagcccctttatccccagcagcccgcgtacacgggcgcccaggcgcccggccagaacaacggccagcagccgtaactaaacatagctaaacaattggcatttccgcctcaagcagcgccccctcttagccttagacacgatgtctaggctaagaggggattttttatatatagccactatttcgtctttatattaccaatagatttgcttatattatttctttatattcaagattatataacaaaaatcacaatactttaaaataaaatcacgttgacaaaataaagattctatgttaatatttggttatataaagcagagagatgattaatcgctatcacaaacaaaacgcatggatactttgaataaaataagaaaggtcgataaaaatgaaaagaaaagcaaaagtcacaatttccagtttatcgcttatttttttagtgtcctccttgtttggcggaattgtacaagcggatgagaattactatgactcacaaaagagctctgttttggatgctatgcttaatagcattgattattataattcagcaaccgggaaatttgttacgactctcatcaatgaaaacgaagaaacaactgtggattatcaggtagatatcgacgctcaaactgcataccaatctgttcaagataccgtgacaaataaagaatcgtattattctgattatcaagagcttgtatataataatcgtatgcgctcatatgaaagaattgataccatgtttcctgttgacgaacgcttaacttccggtaaaaaaagcgtggcgacgggagggatcgaatttaacgcgaaagcgagggggactgaagaacgcattgtaaccaatccggatggaacaaaagaatatcgctatcgttctaacctgacaaatacatctcttgcaggaatgagcctcttctctcaagaattaacatttggtttactaggcaataaagagaattggtctctgcaaggtgaacgagagtttgcaggcagaacatgtttggaaattcaaggatacacggatacatattatgcagaaaaattgggattccagaccttcactcttttggttgacaaatttacgggaattcttttggatttaaaaggatataacagtcaaaacgaattggttcagtatcttgaaacaaaagaaatatccattgacgagccagcgatctctactttgaaattccaaaactgcatggataagtattccgattatgtcgaagacagtggtcgagattacaattgcaccggtgattttagtgtggaaaaggtggcacctagattagctaatccggacgtgggatattcagaaggctcttcccgtgaaatgtattactcccattggttgatcgataacgacacgatagccagcgctgtcaatgtcagcaggagcggcttcccgacatatttgactgtcaacaagaatctatataatggcgatgcaagacgtgaagtggcaagtaataaaaatagtgggtatgaatatcatagcaatcatacgatgcgcaatgtacacagtggatggaatgtttacatttcgttgagcgtatatttatatgataactcctttaccgatcctgctgctaattattatgcaggcaatgtaaatgcgtattatcgtattcatagtgtaaatcagaggacggctcccggtggatggaacacgcttcccgaagtatccagaaatactagttatgaagagcccaattatttttcttttcaatctgtatcggtatctccatctggtaatgcgagcggctataccggcgcggacggcatacgagtttacacgtatacgatacgttaacctgttgcatgaattttctagataatattgcataaactaaaataaactctatacagaaaggagtaaagctgtgaaaatacacagaagaataggcgcttgtatagctatggtcagtttgtccatatgttcaggacttcttgtaaacggagcctctctcacaaacgctgccgttccttcaaacccacgcgacgaaagaccggagcagacagaaaatatttcaagcaattggatagaacttatacaaaagctgccaaaaaacgaagacacaaaagcgaagctcttaaacggtatcatcaacagcgtagattattttcaaacagctaaaggggaatttcggactaacctattgggaatgggagaaaccactgtaaaatatgtaaccaatattgattctcaacgttcctatcaacggatatccggagattcgctggatttggagcaatattttaaagacgctgtatttacaacgtatgataaccgagcaaagaccgttcgaatcgtatcctctatgctacccgtcgacaatcgtctcctatcctatgaaccgaatacctcagtctacggaatagcggatccgcagcgttctttcattgacaatagaattcatagcggccaggacggggtcaaggaatatcgttatcgatacgacttaacaaatacaggtattgcctccacgagtcttttttctcaagagctcgcattcaatttgttggcagatttaaatagttgggagctagttgggggagacgttttcttaggccgaaattgttttatgcttcagggaatgccctcggcatatgccaatgacaaattacagattcaccaattcaccctatacgtggatgcacaaaccggaattattcttaaactgcaaggatatagtcagcagggtgagatgacacagtatcttattaccacccggattgccatcgatgcttcagatgtcgatagactgcttcaagaagccgatgaagcgaatacggcctatagcgactaccaatcggagtagtcctaaatcggcgccagcctctggcgccgattttttatgtcatagcctgtcctactaagctcagtctctaaccattcattaaaaatccgacagcccaaaacagggctgccggattttgtatacagaataaatattacgcttttccgcctttggagccgcccagggagacgccggagaggatgttgctctcgtaggtgaaggtcagggcttcccgctcgcgggcccgcttgaaggccagggacagcatctcatccagcagggcggtgaaagaggtgcccgccgcctcccacaggtagaaggccagggagccggggatggtgttgatttcgttgacccacaggccgccggtctccttatcgttgaggaagtccacccgggccacgccggagcagcccagggcctggaaggtggccacggccaggcgctgcacctcggcggtcatctcgtcggggatctccgccgggcagcggcgcttgaggctgctcatgccgcccttatccccgccggccttgcccttgccgccggagagatatttgtctcggtaactgaggatttcatcggcgccggccggctcctcgcaggcggaggggcgggcgctttcgtaatcgcccaggacggcgcagttgatttcccgcagatgttccaccgcccgttccaccaggatccggggggaaaaggaggcggccaggtccatggcgtcccggagggaagccctgtcctttgccttggaaatgcccacggaggatcccaggttcaccggcttgacgatgacgggataccccaccttttcctcgatttgggacaggatggcgtccggatctaaagcgtaagccttgccggtgaattccagcgcgtccagcacgggcaggcccgcctgccgcagcaccgccttcatggcgaatttgtccatccccagggcggagctggtcaggtcgctggcggcgtagggcacgcccagcatttcgagataccccatgagggtgccgtcctccacgttggtgccgtgcaccaccggcagggcggcctcgaagctgcccaccacgttgttgccgaacttcttcatgggatagcggatcagttccacgccggcctcgccgggcaccagcagcacccgcgtggcagcggccaggcaggccttcatatccttatagctgtcgatgttccccagcgcctcaccggtgtaaaaggcgttgtccttcccgatgtacagaggaatggggtcatatttctcccggtccagggcggcgaaggcctggaggcccgaaatgatggacacctcgtgctccacgctgtgcccgccgaacaggacggctatcttggttttcatctgtcaaccaactcctttaaaagttatccggcaaatcgttttccagcaggacgatccggggggcggcgggcagggcgttcagatgcgccagcccgtcttgcagggtggcggccacgtaaatccgctcctccggaaagccgccgcgcagcagcccctctttcaggggcggggcctgcttctcccccaccagcacggcgtagtcgcagcgggcggcggcgtattcccccagctcccggttgagggcctcctgcctctcccctagttctaccatgccgggggtgaccagcacccgctgggcgtcgaaaccggccagcacgtccagcgcgctgcggaagccggcggggttggaattgtacgcgtcgtcgatgaagccgttaggcagcagctggagccggtgctccacgggcctcagcatccggataggatagaccagcttgctcagcgggatacccagacgatgggccagggcgatgcagccggtcaggttctggatattgtgcccgcccagcagcttggtggtgaagcgctggctctccccgtcgggggcggtgacggtgaaggcgcagccccccgcgtccaccacaatatcggacgcgcggtaaccggcatccggcgcggtgccgtaggcgacgtggggaacgccgacgggatgggcacggatgtaatcgttgtcggtgttgagaaacacgcagccgtccgccgggatggcgtcggccagctcgaacttggtggcaatgatgttgtcgatggtcttgaaggtttccagatgctgctccccgatggaggtgaggatgccgtaccggggatgaaccaggtcgcagatttcccggatatcgccggggtttttggcccccatctccgcaataaacacctgatgggaggggcgcagcctctcccggatagtgcgcaccacccccatggtggtgttgtagctttcgggcgtcatgaggacgttgtattccacggccaggaggtcgtggagaaagttcttcgcgctggtcttgccatagctgccggtgatgcccaccacgatgaggttcgacatggcctggaggcgggcgcgggcgtccttgacgtagccgtcggcaatatgcttttccaacggatgattgatggtgttcgccagccatgtccaggcccagatgatgagagaaaacagggcggtgaagccgatggcccgcaggtaagcggagaagaaggcgagggtcagcacagcggccagcagaagagcctgggtggccagaagcctgcgcacccggttggtaaacaccaggggctttttggcctttttgggcagattcagcagcccggtgagcagcaggatcgccgccgccgcgccgtagccccagacgaccggcagatacatggcgggaatgagcagaaccggcaggatccggcggacggaaaccagcttcgtctcgttgtcccggcaccatttgcgataccgctcattccggtaggaattgagctggagcatgtgggtaaaatacagcgactgcaccccaaagttgaaggcgcaggcgacaagcatggcgattttcgcggcaagttccatggtatccagcctttcttagagcctatttgaggaaggaatcgagcacccggctgcactggggccagcggtcggcaaaggaaaagtggcccgcgccggccaggacaaccagacccgcgccggggatcttcttctccatcagctggccgtcagacaggggggtggcggtgtccttctccccccaaatcaggagggtgggggccgcgacgccgggaagcagaggggtcaagtcctcattcaccgcctggttcatcacctggcgcatgagaggcgaggcgctgcggtaatcggcgctgccccgcttggcacgggccttttccaccgcgtcgggaaacaggcggcgcacgccgggcaggcggaaaaaggccttggcggccttgaaggagtacaccttccagtaataggacggggggcgcttcggcttgatgcccgccgcgtccatcagaatgattttcggcacctcgaggggcggaccaggacggttcatcagcttgatgatcacccggccgccgaaggaatggcccatcagaacggcccgctcgatgcccagggcggcggcaaatttcagggtgaaatccacatagccgtccacgtcccaggggacgggcggctcctcactgccgccgaagccgggaaaatcgggggcaaccacccggcagtagccggacagatgatcggtgagcaggcggtaggtttccaccggggcggcccagccatggagaaacagaagggtcggcccttcgcccttatcgagatactgcacctgccgcccgtcgattgtgaggttcatgccggcccctccctaaaaaattcctgatgcctatccactataccatagtcgccgccgcagttcaatcatacggcgggaattctttacatatgccagtttccaatagtatggcccatcccaaaagggtttaataaaaaagcccggccgaaccaggctttataaaaaagcgccgccccctgcttattcggcaggaggcggcggttttccattattgcagggaattcacataggcgatgctcagggccgcgcattccagcggggttttgcccaggctgggctgatcctgctcaacgaccacccatttggcgccggccgcggcggccgcggcgatgatggccgggaaatcctgggcgccgtagcccaccgggcggaactcgaacacctcgtcctcccccggcgcgcctgcgtcgtccacgccgatgagctcatacatatgggccggctttttccccggcatgacaaaatccttcaggtgcaccaccggcgcccggccggcgtatttgttcagataggccacggggctctcccccgccacgttgacccagcaggtgtccagctccgtttgcagcagggcggcggggatgtcggcgtacatccggtcgagggcgtacgcgccgtccaccttggtgaactcaaaatcgtggttgtgatacagcagggtcatgcccttggcggcgcaggcctccccgatggcgcggatatccgcgagaacctgcgggtagccaggctgtcccgggcggcgcgcctcgtccagccacggcaccgcgatgtaccggcagcccagcgtcttgtagtcctcgaccaccttgtcgatatcggccagcagctcgtccagcggcacgtgggcggacatgcccttcagcccgatgtcgtccagcatggcgcggatctcttggggatcccggccgtgcaggccggcgaactccaccccttcatagcccaggtccttcaccttttgcagggtgccgcggaaatcggcggccagctcgtcgcgcaccgaaaacagctgcagggcgatcggcatattctgaatcatgcggttcaacctcccgatatggtataaaatggggagctttccctcccgataccccgattgtaccgctccgttttttaaaaaacaagagattgggcgggaaacccaaatatagttgcatatacatcgaaatatagatgattccgcctcacgcctcttgccggggaacaaacagctcacgaaacagctgccggccctcctccacggtgaagccgcccggcgtgcgttccaggtttttcagcccctcccagcgggcggcatagacctggacggcctcttccgtcatggtcaccggcgcgtcgatcagggcctccagcaggccgtaatacgcctcccggccgccgcaaagggtgaacagccgctgggcccgcgcgggcacgaaggcctcggcccggcgggagagagagggaagaaacacggcgcaggccatgccgtggggaataccgaaatcctcggtgaggatatagccgaaggggtgggggtaggccgtgcccatggcgttcagcaccaggccggcccacagagagccgtacagcagctcctcccgcagcgcctcgtccggcaacaggccgggattctccgccagccagcgcagcccgccgcttatcaggggcagggctttctcggcacaggcggccgccacgtcgccgcaggcggggttgcagtagccttccacggcatgggccaaggcgtccaggacggtggaaacggtgggcttccggggcagggaagcggtataccgcgggtcggcgaaggcgtaacgggcgtagcagctcgggtgggtgatgcttttcttgcggcccgcggttcccaggccgggcatatccgtatccagggtgagcaccgcggtggggcttacctcgctgccggtgccggcggtggtcccgaccaggacgaggggcaggggcgggcggcgcagggtgcccgcgaagaggcgggcggtatcctccacccggttggcggccagccaggcggcggctttggcggcgtccatcaccgacccgccgccgacgcccaccacgaactccgcccggcagatttccgccgcataggcggcctgctggcactgggacgccagggggttctgccccacgccggggaagatggtggcgtccaccccggcctgcttcagggtgtccagcacgtcgtcgagcgcgccgctttccttggcgccgcggcccccggtcatgaccaggcagcggcggcccagcccccgcagcagctcgccccccgcccggacgcagccggggccgctgagcacccgcaccggcatataaaaagtaaagtccatcgcagtagcctcccgttttaaagaaaatcctgttaatggccggtaaaacttgttttttggtccaaaatattatatcatagatcgtacgcgccggccacctcttttgcgggggccggcggcaaaggaggcggacgccacggcggctgcaacccgaaaaaacgccgccgggctgcgcctcggcgactgcatactgggcggcggcgtcctgttgctggccgtcgcgctgctgctggggctgcatctgctggcgaagccgggcggcgaagcggtggtgaccaccccggacggggagacggtactgtctctgaaccggccggggacgtacgcctttgccggaaaggacggcctgacggtgcagctggccgtcgaggagggccggatccgttttctgtccagcggctgcccggacaaggtctgcgtgcgcagcggctggctgtcccggacagggcagaccgccgcctgcctgcccgcgggcgtggtggtgcgggttcaggcggcggacgacgccggctccgccgtggacatggtggcgggatgaagggggcgaacgccgtgaaaaccgcttccgccgccaggagggcggcgcagctcggcctatggatggcgctggccatcgccatctcctccctggaggggtggctgcccacgctgccggtgccgggggccaagcccggcctgtccaatatcgcgacgatgtacgtcctgacctccatgggcctgcccgcggcgctggccgtgacggcgggcaaggcggtgttcgccctgttccggggtggcaccgccgccctgatgagcctggcgggcggggcgctgagcaccctgctgatggccctgtgcctgcggctgtttgcccggcacgtcagctatatcggcatcggagtggccggggcggtggcccacaacatggggcagctgggcatggccatgctgctgctcgacgattccctgctgtactattccccctggctgctgtttctggcggtggcggcagggacggtcacggggcttacgctcaacctggtgatgcccgctctgcggcgcagcatggccaggctggacggcggctccttaaaacagtgataacagacgggcggcgtccgcccggtatcgacgaaaggcgggattgtccttggcaaacctcatagaaacactccgcaaacgcacccgcggcggcgtacacgctccccaccggaagcatacggccgcatgcgaaaccatcgtcatgccgccgcccgcgcaggtgaccatcgccatgtcccagcatctgggcgcgccgtgcgagccggtggtgcaggtgggggaccatgtggaggtcgggcaggtaatcggggacagcgatcagtttgtgtccgcgccggtgcacgccagcgtgtcgggcaccgtgtcggccgtcaccaccctgctgctgcccggcgggcggaccaccaaggccctggtcatcgattccgacggcgagcagcgggtgcatgaaagcgtccggccgccggtggtggaatcccgggaggacttcctgaaggccgtgcgcgcctccgggctggtcggcctgggcggagcgggattccccacccacatcaagctcaacccgaaaaatctcgacgaggtggacaccctcatcatcaacgccgccgaatgcgagccgtacatcaccaccgattaccgggaatgcatggaaaactcctgggacatcgtgtcgggcgtgcagacggtgatggaattcctggagacccggcaggtgatcatcgccatcgagaagaacaagccggcggccatcgccgagctgtcccgcatcgcggccagcgtgtcccagccggaaaagcaggtgctggtcaaatccctgcccgcccggtacccccagggggcggaaaaggtgctcatcgcggcctgcaccgggcggcaggtgccgccgggcaagctgcccgccgacgtgggctgcgtggtgatgaacgtcacgtcggtggcgttcctggcccggtacctgaagaccggcatgccgctggtggaaaagcggctgaccgtggacggctcggctgtggcccatcccaagaatgtgcaggtggccatcggcacgccggtgggcgaggtcatcgccttctgcggcggcacccgcttcaaggtgcgcaagctgctgatgggcgggccgatgatggggctggccctgatggacgacaccatgccggtgctcaagcagaacaacgccatcctggccctgtccgaggaggacgttctccagacggaggcctccccctgcatccgctgcgggcggtgcgtcgacgcctgccccatgcatctggtgcccccctccatcgcggccgcctacaagaacggcgatccggcggccatggaaaagctggacgtgggcagctgcatggaatgtggctgctgctccttcgcctgcccggcccaccggcacatcgtccagaccatgcgcatggccaaggacgccgtgcggcgggcacatatggcggatcgtgcctgatcccccgattttcggctagaaaggacgggtttcctgtatggagaaatcccttatcgtatcctcttccccccatctgcacagcggcgcgtccacccgcaccatcatgctggacgttctcatcgccctgctgcccgccgctgtcgcctccgtctggctgttcggctggcgggcgctggctattgagctggtctgcgtcggggcctgcgtcgcctctgaaacgctcagccgctcggtgatgaagcggccgcagacggtgggcgacctctcctgtgtggtcaccggcctgctgctggctttcaacctgccggtgagccttcctttgtggcaggcggcgctgggcagcgtggcggccattgtggtggccaagcaaatgttcggcggcatcggacagaatttcgtcaaccccgccctggcggggcggatcgtgctgatggccagcttcccggcccagatgaacgactggaccatgcctgcgcagctgcaggcggcggacgcggtttcctccgccacccccctggccatgatggcgggcggcggggaaatggcctacaagcccttccagctgctgttcggcatccatcccgggtgcctgggagaaacctgcgcggcggccctgatcatcggcggaatttacctggtgatccgccgggtcatcacccccatcatcccgctgtgctacatagggacggttttcgtgctgacctggattctgggagaaaacccggtataccacattctttccggcggcctgatgctgggcgccatcttcatggcgaccgactacaccacttcccccatcaacaaggcgggcaaggtggtcttcgccgtgctctgcggcctgctgacggtgctcatccggctgtacggttcgctgaccgagggcgtgtctttcgccatcctcatcggcaacatcctggtccccctcatcgagagggccacccggccccgggctttcgggacgaaacggaggctactgcgtcatgaaaaataacgggaaggacatcctggtctccgcggcggccctgaccatcatcggcggggtggtgaccgccgccctggcgggcaccaatctgctgaccaaggacaccatcgcgcagcgcagcgcggaaatcgaaaacgccgcccggcgtcaggtcatccaggcggacagcttcgagaagggcaccctgaccgccgacgggaaggaagtcgtttattacaccgccctgcaaaacggcgaaaccgtgggctatgtcttcaccgccagcgtgaccgggaaaagcgccggcctggtggtcatgaccggcatcacggccgagggcaccatctccggcgtgaaggtgacggaggagaacgagacggccggatacgtggacaaggtgaccaagggcggcctgctggccgctttctccggcaaggacgctgccccccttacccttggcaaggacgtggacggcgtgtcccaggccaccaagaccagcaaggggatcaccgacggggtcaaccaggcgatcgcctattacgaggacgtcacgaagggaggcggcgcatcgtgaacaagtacggacaggcgttttccaagggcctgattaaggaaaacccggtgctgcgcctggtgctgggcacctgcccgacgctggcggtgacgacggcggcgatcaacgggctgggcatgggcgcggcggccaccttcgtgctggtctgctccaacatcgtcatttccctgctgcgccgggtgatcccggacaaggtgcggctgcccgcctacatcgtgattatcgcgggcttcaccaccatcgtgcagatgctggtcaaggcctatctgcccgatatcgacaaggcgctgggcatctatctgccgctgatcgtcgtcaactgcatcattctgggccgggccgaggccttcgccagcaaaaacagcgtgggcctgtccgccctggacgggctgggcatgggcgcgggcttcaccggggcgctgatcgtcatgggggccatccgggaattcttcggcaacggcacgattttcggctggccggaggcggggatcatcccccccatcaccgtgttcgtgctgccggccggcgggttctttgttttcgggatgctcatctggctggtcggcaagctgtcggcccggctggagggcggcaaagcggtgaccgatttgacggcgggcggctgcgccgcctgcccgcacgcttcggcctgcggccagctgggccagccggccgaggggaaggaggacggagctcatgaataacacgagcctgttcgccattctcatcgggggcctgctggtcaacaacttcgtgctgtcccagtttctcggcatctgccccttcctgggcgtgtccaagaagctgaactccgcggtgggcatgtccctggcggtcatcttcgtcatgctgatggccaccgccgccacctggcccatctacaacctgctgctggtgccccgggatctcgggtatctgcagaccattgtgttcatcctcatcatcgcggcgctggtgcagctggtggaaatcgcgctcaaacgcttcctgccgccgctgtacaattctctgggcatctatctgccattgatcaccaccaattgcgccgtgctgggcgtgaccatcctgaacatcgacaaggggtacgatttcggccagtccctggtcaacgcgctgggggccgggctgggcttcctgctggccatggtgatgttcgccggggtgcgggagcggctggaaagcgccgagattcccgccgggctcaagggcctgcccatcacgctggtagccgcctccctggtgtcgatgtccttcctggggttccaggggctattcggcctgtaaagcagaaaggggcttgcaatcatgaatccaatcgtattggcggttcttattgtcgcgggtctggccctggccgccgggctgattctggcggtggccagcgtggtcatggcggtcccccgggatgaaaaggcggaggccctgcgggccgtgctgccgggggccaactgcggcgcctgcgggtattccggctgcgacggctacgccaaggccatggcccacgagggggccaaggtggggctgtgctcccccggcggcgcggccgtggccgaagccaccgccaatctgctgggcgtcgaggggacgctggaggccaaaaccgccctggtgcactgcggaggctgcgaggaatttgcggcccgcaagctgcgctacagcgggctgccctcctgcgcggcggcggcccagttctacggcggggatctggcctgctcttacggctgcctgggctacggcgactgccgggcggtatgcgaatacggcgccatcacggtggagaacgggctggcccgcatcgacaaggacaaatgcgcggcctgcggcctgtgcgtcaaggcctgccccaagcgcatcatttccatcgtgccggcgcaggcgaaggcggcggtgcgctgctccagccacgacaagggggcgctggtgcgcaaggtctgcacggccgggtgcattgggtgcatgaaatgcgtcaaggcctgccccagcggcgccgtcaaggtggagaattttctcgccgccatcgacccggaaatctgcaccggctgcggcgcctgcgccgccgtatgcccctcccagtgcatctccgtcttcggcctaaacgaggggaaggccgccgagacgcagggggtttgaccggcaaaaagagcggattttatgagccggaataatttctgccgcaaaagcaaaaataatggttgacaaacggatacgggatcctatataatatagtgcgtcccctgtaagggggtgtcttcgacacctggctaaaagggaagtttttctcggatggaacagggacaagctatggcggtatagctcagttggctagagcatgcggttcatacccgcagtgtcgttggttcaaatccgactaccgctaccatcgctcctccaaccggaggagcaacagcggcccgatggtcaagcggttaagacaccgccctttcacggcggtaacacgggttcgattcccgttcgggtcaccattgtatgggcgtatagctcagctggttagagcgcctgcttcacacgcaggaggtcagcggttcgagtccgtttacgcccaccaaataaaagcagttcactcgtcagagtgggctgcttttattttatgtacgaagacggactcatgccgctgcctcctcgaaaggccgtcaggcctttcagtggcagctcgcaacgcgagatgccgaggtcacaagcggttcgagtccgtttacgcccaccaattaagaacggttcacacgtcagtgtgggccgctcttaatttatgtgtgataacggaacccatgccgttgcctcctcgaaaggccgtcaggcctttcagtggcagctcgcaacgcgagatgccgaggtcacaagcggttcgagctgcgcagcagagagagcttgaatggctaggaacgacaaaaaagccgggcaggaataaacctgcatcggcttgacaaaacggccatagtggcatagaatagacatacagggtggcactaccgaaaggcggttgtcccctcagttcgtcagaagtaagaccgacgcttggggaagcagggcggtcttacttcttttttatggccgtgaacatcaggccaataatgccgattaccaccaggcagaactgaaacagctctggatatgtaaccataagcatcccctcctttcacaggagggaaaaagaaaaatctccctcccagggaatgggaggagacaaccgccttgaaaccgcacgcggcatttctgccgctggtagtgccacaggttgattataccatggacaggttgcttgtcaatagtatcctgggccaataaggcgctctgccgccttctcaacttgaatgcgtaatttattttatagacacgcttgacatttgggctgcaaaagtgaggtgagcaatttgcccacgaaaaagaagatgggccgtcctaccgataatcctaaagagacttccattcatgtaaggcttgatgccgaatgcgtggaagtccttgaaaagtattgcgaacaggaaaatatcggcagagcagaagccacccggcagggaattatctgcctaaaggacaagctcatcaaaaaatgaaggaagtggcgctcccctctcaaagcaaacaccacttccccaggcggcttgcctatagcaagacgctgccaacacatgccaaaaggcggttgacgtaaatagtatatcatgcgtcacgctccctttcaagcattgttggaaaacatacttgacttttgatattcataaatggtatacttatgaatatcaaaaggaggtgaacatttgtcaagccctaaaatggggcgtcccactgacaatcccaaagacaagacgctttttgttcgcctggacagcgaaagcagcgacacattagacgcctattgcgagcaagagcaggtaacaaaagcagaagcagcacgacgcgggattaagaagttgaaggatgacctcaaaaaatgaaggaagtggcgctctctcgtcaaagcaaacaccacttccccagccaacacatgccaaaaggcggttgacgtaaatagtataccatgcgtcacgctccctttcaagcattgttggaaaacaattgagaaaggaatgtcactatgcaaaactgcgtgtccaaatttatcgaaagccgcatagaggaaatttcacaggccctgcgtaaaggcaacggccgctatgcgctggcggcagaatccagcaaattgctatacgacagtctcgaacctattgtacaaaatgagggcgacatctccataagcgcgggggactgtctgaatttccgcgagtatttcgagcaggagtttgaagctaccgccattatgcaaaaggagctgtaccggcagggctatctggattgtgtcaagctgctggtaacgctggggctgctggcggggaaaacctgaccggcgaagcacaggattcctcgataaacgatgaatgcaccgcgcctacctaagaataccaaaagccgcccatgaatgtcatgggcggctttccgtttatcagtcgatttccaccgacactttggcatcctggcgggtggcggcggcgcgcatgacggtgcgcatcgccttggcgatgcggccctgcttgccgatgacccggcccatatcatcgggcgccacgtgcagatggaacacgatggtgccatcctcggacggctcatcctgctccaccgcgacggcatcaggattctccaccagccctttggcaatcgtgagcaacagttccttcatcccggtttccgcctttccgcgtgcttatttctccgcgctcacttttttcagcagcgccttcaccgtatcggtgggctgggcgccgttggcgatccatttctccgccttctcggtgtcgatcttgatgaccgccggctcctccagggggttgtaatagccgatttcctcgatgaaacggccgtcgcggggatagcgggaatccgccaccacaacgcggtagaagggagctttcttcgcgcccatgcggcgcagacgaattttaacagccatgattcagtacctccaaaattgttgatatttgtctattcttccactcatgccgggcgggttcgtcccggcgggagtcgaatgctaaaagaagcggcggccgccgcccatgccgccgggaaggcccatgccccgggggaaaccccggccctttttccccatgcccttgacctgcttcatcagctggcgcatggagtcgtattgcttgaccaggcggttgacgtcctccaccttcaggccgcagccggcggcgatccgccgcttgcgggaggggttgagaatatccggcttggtgcgctcctcccgggtcatggacaggatgatggcctccacccgggaaaactgccgctcgtcgatgtccacgtccttgagctgattgcccacgccgggcagcatgctgaggatgcttttgagattgcccatcttctgaatctgccgcagctgatccagcatgtcgttcaggtcgaacttgtcttcctgcatcttccgggccattttttcggcttccttctggtcgaactgcatctccgccttctcgatgagggacatcacgtcccccatgccgagaatccgggaggccatccgctcgggatggaacacctccagctcgtccagcttttcgcccacaccggcaaatttgatgggcttgccggtgaccgcgcgcaccgacagggccgcgccgccccgggtgtcgccgtccagcttggtcagcatgacgccgtcgatgcccagcgcctcgttgaaggaggcggccacgttgaccgcgtcctgcccggtcatggcgtccaccaccagcaggatttcctgcggggacaccgccgccttgacgtttttcagctcgttcatcagctgctcgtcgatgtgcagccggccggcggtatccagaatcacatagtcgttgccgtaatcccgggcgtgagccaccgcctttttggcgatgtccaccgggtttgccgtgcccatctcaaacaccgggacgccggccttctcccccaccacctgcagctgggtgatggcggcggggcggtagacgtcgcaggccaccagcagcggccggtgcccctgctttttgagcatcaggcccagcttgccggaatgggtggtcttgccggagccctgtaagccgcacatcatgacgatgcagggcggccggttggcggtggccagccgggcggcctctccgcccatgagggcggtcagctcctcgttgacgattttgatgaccatctgcgcgggggtcaggctttccagcacctgggagccgatggcccgctgggtgacgctgttggtaaagtccttggccaccttatagttcacgtccgcttccagcagggccaggcgcacctcgcgcatggcctccttgacgtccgcttcattcagtttgcccttattgcgcagccgcttgaacgcggcggacagcttatcggaaaggccctcaaaggccatggtggtcacctctcaatacaaaatgttgaatctgtgattattattacgctctggaaagatgatcggacagggtcagaatccgtttggcccgctcgtcaatctcccgggaatagccatagcggtcgttgtattcctgaatgtcctgggcggcggcgcggatggcctcgaagccgtcccgcatctcgcggaaccgcttggccaatcccaggcgctcctccatctcgagcagctgggcctcggcccgcttgatggaatcccgcacgccctggcgggtgatgccctcgttctccgcgatttcggacagggaaaggtcgtcgttgtagtacagctccaccacatcccgctgcttttcggtcagcatatcgccgtaaaaatcaaacagcagggatatctccaggtttttcgccatactgcccggctcctttcccacccattgagtgtaaagtaaataactttacagattatacaacaagacacggattttgtcaagagggcgcggggaaaaaatgggatgaaaaatccgccgccgaaaaacggcggcggaggagacttgttcagccggcgggggccgggcgcttgcggttcagccaggcgatggtgtcccggatggtctggtacaaatcccggggctgataccccagctcccgggtggccttgtcgtgggagaagcggtcgttgctcgccagggtatacagggaatacttggtgtagaggggccgctcgcggcggcgcttggccacccactccagcatgggcgcggccgcccgggccatccacatgggcagcaccggcagcttccggccgccctgcaccttcttggcgatgcgcagcacgtccttgacctcgtagtgccggttggacaggatgtagcattccccggcccggcccttgtccacggcggccaggcagccggccgccacgtcccgcacgtccacgaaatcgtagccgccccgcacgcaggcgggcagcttgccccgcacgtagtctaccaccagctgcaccagatggttgccggaggcgtcgtaggggccgaggatgccggaggggtgcaccaccacggcgttcaggccggcggccgcggcgtccagcacgatctgggtggcctccgccttggtcttggcatagccgcccaccacctcgtcgggcgaaaaatgatggacctcccgcagcacctgcagcccgtccttctccgggatggcgtgcaccgagctgacgtacaccagccggctcacccgatgctccaggcacagcgcggtgatgttgcgggtgccccccacgttgacggcgtacatggctggcgagaccttatcggcaatgtcgacgatgccggcggtgtggatcaccaccacgtcccgcccgtcggtatcggcgaacagcggctccagagtggccttgtcccggacatcccccttgaaataccggacggcgccggcatccgccaccttctcggcggggagcaccagcccccgcaccgtggcgcccgcccggcgcagcatacggacgatggtgccgcccaaatgcccgttggcgccggtaacgatatagattctatccatggcgaaaagctcctttgtttacaattgcagcgttgattttcttatccgtttatatcatactataaagtatacccgcaaacaatcgacagaatccggacgcttgtcagttcttcaacatatccgacaagacttgttgaaaaaggaagtgtgttcatgaaaacgttaccgtccgatcaccgcacccgcgtgaccaagatgctgatccgccgggcgtttaccgatttgctgcgcagcaagcccatccagagcatcaccatccgggagctttgcgagcgggccggcatcaaccggggcaccttttactgccactataccgatatctacgatctgcttcaccaaatggaagaggagatgctggaggacttcaacaaggcgctggagcccctgctgtctgcggggggcgagtcgttccatcccgtggacatcagcaccgagattttccagtgcctcaaggacaactccgacatctgcgcggtcacgctgggcccctacggcgacaaggagttcctggccaagctcatcaatctggggcgggaccggtgcttcggctcctacgcccagtatttcaaggacgccacccccaagcagatcgcctatttctacgcgttcgtcagctccggctgcatgggcctgctgcagcagtggctggacgacgggatgaccaccccggcgggcgaaatcgcccagatggcggaaaacatcatgctctacggcatgggcttcttgggaaaaatgggatgaaaaaggctccggcttgcgtcatgcagccggagcctctgcttttgtcaatccgcttcttcgcccaggcaggcgccgtcctcgtggccggtgatccgcacgttcaggcaggagcccagcggccgggcggtgcgcacccgcacgggcagatagttgggggcgtacccctcggccaagccgtcctcccggcgggtttccagcagcacggcggcggtggagcccacctgcgccgcggcataggcgtcccgcaggcggtcgcccagggccgtcatccggcggctgcgttccgccttgacggcggcggacagctggcccggggccttggcggccggcgtaccggggcggcgggaataggcgaaaacgtgcaggcgggagaagccgacggcctccacgaaggccagggactgggcgaactcctcctcgtcctcgccggggaaccccaccatcacgtcggtggtcagggcgcagccggggaacgcctcccgcagccggccggcgatccgccggtatgcggcggtgtcgtagtggcggttcatccgccggagggtggcgtcgcagccgctttgcagcgccagatggaactgggggcacagccgaggctgcgcggccaggcggcgcaccacctcctccgacagggcgtccggctcgagagagcccaggcgcacccgctcgatcccctccacggagcaggcggtctccaccgcgtcggcgatggacaggccccattcctggccataggcggtcaggttgatgcccaccagcaccacctcccggaagccccgcgccgccagggcgcgcagctcatgggcgacatcctccggcggcttggagcggacgcgtccccgggcatacgggatgatgcagtaggaacaaaagcggttgcacccgtcctggatcttgacgaacgcgcgggtgcggccctggaagtcgtcgatctccagcggctccagccgcgcgtcgtgctccccgatgtccacaatccgccggccgttttggaggaaggcggcgagatggcggggcagggcgcggcgggacgcgttgcccagcacgatgtccgcctcggcgaagccctccgcctcctcggggaaggcctggggcatgcagccggtgagcgccagcacggcgtgggggttgtcccgccggcagcggcgcagcagctgccgcagcttccggtcgctttcgccggtcacggtgcaggagttgatgaccagcccgtcggcggacagggccgcctcgtcgccggggacaaactcccccgtctcgaagccctcggcctccagaaggcggcgcatggcctgggtttcgtattggttcaccttgcagcccaaggtgtgaaagacaattttcataagaatgaacagccctttccgtgcaatccgtctatgtcatgcggtttgcatgttcctcacactttcaccattataatcgaaatatgccgcaatttcaatcaacagtttgttccctttcccggttgttttccgtgtgctttgcggatataatgaacaatgggttacaggtgctactccccattacgcgggtcttatccccgcctccggaagcgtaaaccttcaacaacatgaacaggagaggggtctttcagatgtataaagcgaccgtgcattttgaaaccgtggtggaagccaaggcttttgtcaccgccagcaacgaggtggactttaaagtagagttggtgtccggcccgtatatcatcgacgccaaatctatcatgggcctgttcagcctggatttatccaagcccatcgagctgcaggcctactgcaaggacgacggcaccttcgccgcgtacaaggaaagaatcaaggaattcctcctcgaagaataaaacccgccgccggcagccgccggcggcgtttttttgcccataagcgagataaacggcggtttttccgcatatgctgtaccgaacaggcgggaacccgtgaaggggactcccgcatttggcagaaagggcggagaaacacatgaaacacaacaagcgggcgcagcggctgctggcggcgctgtgctgcacagccctgctggcgggctggggcgggctggaggccttcgccaaggaggcaccggcgctgatgaccgacgagagcgacggcgccacggcggcgcagctcctccaggaaaccgacgacgaatgggtgaccaccgccacccagcccgccgacgccggctccctgtcggtggcgggcaagggcgcggtgctcatggagctgtccagcggacagatcctgttcgagcagaccccccatgagaaggtggccatcgcctcggtgaccaaaatcatgaccctgctgctggtgatggaagcgctggacgcggggcagatctccctggacgacaaggtatcctgctccgccaccgcggcctccatgggcggcagccagatctggcttaaggagggggaggtcatgaccgtccacgagctgaccaaggcggcggcggtggtctcggccaacgacgcctgcgcggccctggcggagcatatctgcggctccattgacgcctttgtgaccaaaatgaacgaacgggcggcccagctgggcatggcggacacgaaattcctcgattgcagcggcctgagcgacgacgcctattcctccgcccacgacgtggccgtcatgtcccgggagctgatgaagcacaagaaaatcaccgagtacaccaccatctggatggataccctgcgggacggcaagtcccagctggtcaacaccaacaagctggtgcgccactacaagggggccaccgggctgaaaaccggcaccacccagaaggcgggccactgcctgtccgccacggcacagcgggacggcatgggcctggtggcggtcattctgggctgctccaccaccgacgagcggttcggcggcgcgcgcaaaatgctggactacgggttcgccagctacggcatccacacgcctcaaattgaccagaaccagctgcagccggtcaaggtgctgcggggggtggaacctcaggtggacatcacggtggagacgcccgcccccgtcctggtcaaaaaggggcaggaaaaagccatcgtcaccaccatcgagctggccgaggacctggaagcgccggttc

SEQ ID NO: 3691 - DNA, 10723 bp, Unknown
  16S sequences of unknown bacteria
cttcgcggctatcggctcggtatccgtggcaaacgtcttttgcgggagcgagcgccagaacgatttcaattttatctgtcaggccgcaccgacaccaattccatcaagtcgtcccctgcccgtcgtctgcggctgcaccgtattgcgcaaacctatgtcacgatgctgaatgcaggcgcggtgatctaccgagatgaaaagccgcctgtatttgtgccgggtgacagcagtccttgccgcattgaagcacccgctttttatgattcccgcgagatgaaagaacgggaccttgaaatggtaaaggtccacggctcccgcatggtaggctcgctgctgacccaatcccgcacctttgctgtgttcaacggtatggatgctgttccaacctttgacacacaaatcgaacagcggggaaaaatcatgctacaaaacatccgctatacgcgaaccagcgtaagccacacgcctgatggcattctgctgtccgatcagtggacggtgatgactaccctgctggaagatgcaaagacctacaagaaagagcacttcctttttggcgagggctacgaacatttctactttctcaccaacgactaccacggcgagacgctgctgtggctgctttgtcacccggagattatcggacaactaaacgccatgctgctgcaagaacttcagccgccttgtcgtaatgctttcatcgagaacgatgctcgcacagatgcaggcgcgccaattctattctgctatctgccagatctgccgcgtctgttccgattcctgtctgccttggaactgctgcaaatgaagggtgccatcctctgctttgatttccaggcagacgcgctgcggtctctctgcggtgacagggtcgaggtgcagaccatcgactttgctgagttcgagaggaggtttctgacttcaccatgaaacgtccctcaaaaagattacagattctgttggcagtcgcgctgctgctctatgcctgcggctatgtaacgccgtttatcggcaactatgctgtttggcagaaaaacggcggtatgctgggcggcacttccccgccgtttccctctttgacgccgctggcttgcctcaaaggtattttgtggtttccgtacagcctttactgtatggcaggctgcgcagcagcagtcaccgcgattttcctgtatcgaaagctgttcagtcaagatgccttaacggactccgagcgcaacttcgatttctctgcaaaaggtacttacggcacatccggctggatgcagccgcgagaagttcccgctgtgctggatatggtttccgatttgtctcagcacacaggcactgtgttggggatgctgaatggaaaatatctctgcatcccggggaaaacacgcatgaacggcaatctcgccgtctacggtgccagcggctcgatgaaaacccgctcgttctgcatgaatcgtatcctgcaaagcgccgctcgcggcgagtcgctgattatctgtgaccccaaatccgaactctacgaaaaatccagcgaatatatgcgggatttggggtacactgtgagggtgttcaaccttgtcagccccgagaactccgactcgtggaactgcctgaaagaaattgaggggcaggaactgatggcgcagcttttcgtggatgtcatcattaaaaacaccaacggcaccgggaaaagtgaccgtttctgggactcaggagagatgaatctgctgaaagcactggtcttgtacgttgacctcacttacccgccggaacagcggaacataggcgaggtgtacaaccttatcacgcaatgcagtgaaagccagttggacagcctgtttgatgttctgcctctgacccaccctgccaaagcgccgtacagcctgtaccagcgggcttcggattcggtgcgcagtggtgttatcagcgggctgggcagccggttgcaggtgttccaatcggagcttatcaagaaaatcactgcctatgacgaaatcagccttgaactgccgggacaacagccttgtgcgtattacctcgtcaccagcgatcaggacagtacctttgattttctggcatcgctgtttctgtcctttgcctttatcaaactcgtacgctatgccgatgccaattgccccggtgggcggcttcctgtgccggtccatgtgctgggcgaggagctgaccgcctgcggtacgatttccgaactatcacggcgcatcagcgtcatccgctcccgcaacatctctatgtcctgcgtattccagaatcttgccggactgcaaaaccgttacccacagaaccagtggcaagagattttgggcaactgcgatgtgcagctttttctcggctgcacggatcagctgacctccgagtatgtttcccagcgcaccggcattgccagcgtggcggtttccagtacctccaaggcgctaagtaccctgcgcgtctccgactacacaccgcagtaccgcgaaagcagcggtgtcggtaagcggccggtgctgacaccggatgaagtgctgcgcctgccggtagatgaagcgctcgtgattctgcgcggacacaaagttctgaaagtctacaaaatggactactccctgcatccggcttacaagcagctgcgggaatgcaaggcatctgcccatatcccggaatggcggaaagccttaccggaaacacccgaagctcccccggcagaaacatctaaagcatcgcccaaggtgccgcctaaacgccgcggtcgtcccgctaaatcaaaaacggtggttgccaccgacaaagaatccatcataacaaaacctgaaaacgaaaaggagattcctcatggaaatgaacaatgacattttcacccccaatctgccgattcccgaacctgtgagttttgaggatgcgcccattcctatccctgtcgaagaagaaaagcctgccgagactcccccgccccgccgcagacgcaaagcagatgccccagtgctgaccattgaaagcggcgatgaaattgaaaccgaggacacccgcgaagccgccgcatggcacgagatccacaacgcctaccgcacacggcgcatcctcttcgcaccgttgggcggtatcgagcagaccgacagcggcaagacgattgccgttgtggactacaacggcttccgcatcgtcattcctctcaaagaaatgatggtcgccccgagcgctgccaacagtaccgacagcatggccgtccgccagatgaagctgctgggcaatatgctgggcgcggaaatcgactttgtcatcctgggtattgactccaagagccgcagtgtggttgccagccgccgcgaagccatgatgcgcaaacgccagcttttctatttcagcccagatgccaacggtgagtaccgcgtccgggaggggcgcgtggtgcaggctcgcgttattgccgttgccgacaaatccatccgtgtggagattttcggcgtggagtgttccatcatggcgcggaatctggcatgggactggatcggtgatgcccatgaccgctttgctgtgggcgaccagattcttgtccgcgtgaccgaagtgaacaaaacctcacaggaagaaatgtctgtccacgctgatgtcaaaagcatcaccgagaataccagccgcgaagccttgaagcgttgccgtgtgcagagcaaatacgccggccgcgtcaccgatgtacataaaggcatcgtctatgtgcggctttccaacggggtgaatgccgtggctcactcctgctatgaccgccgcacacccggcaaaaaggacgacgtcagctttgtggtaacaaagctggacgaggaacgtagcatcgccgtgggtattatcacccgcattatccgtcagaatctgtaaccgatgaaccgtgagcagtcccggcggctgcccatcttttacatgaaaggattcgtaaaatggctgtttttcgcgtagagcgcattaaggattataccgttatgagcaatcatcatcttcgcaataaaaatttgtcactgaaagcaaagggcctgctgtcgcagatgctttccctgccggacgactgggattataccctcaaagggcttgccgccatcaacaaggagagcgttgacgctatccgtacagccatttgggaactggaggacacagggtatgtggtgcgtacccgcgtccgggatgaacgcggctgtctgcgaggctgcgattactatgtctatgagtacccgcaagcgtcctcgtccggctccgatggcagcgctgaatccgtgccgcctatgctggaaccccttgcatcggattctgctgtacaggaaaatcccatacaattaaataaagaaatacaaaataaagagaaacaaaatacggatctgatcttatccgagagcgagaccgtgcggacaaaagtccgcgacaacattgagctggacctgctttgccgcaatcagccggagagcgcccccgtgatgcaggaaatctacgagttggtcgtggagacaatccagcttcgcagccctgtactgcggcttggaaacaacctgttcccgatggccttggtgcgggaacggctgttacagctgacaagcgagcatatccgttttgtccttgatggcctgcgtaatctgcacacagacgttaaaaatctcaaaaagtaccttctgacgatgctgttcaatgcgcctgtcacgctgaacggcaggacgatgctggatgtacgcaaatctgtcggtggcggatcccgtccgatgctggcgtaacgccgcgaagatatgaacaaattgtaaaatttgaaaaagtggccgaaattttttaattttttcgtgtgagatgacagtaataagggcaaataggttttttcggcctattttcaacaaattggaggtgaaattctatgaaacaagctcgtatccattgtccctactgcggctctcttgccatgctgcgcccggcaagcgcgattcatggtctgtccgacatttccgcaggaacgtacctgtacgtctgccgccgctggcctgcctgtgatgcctatgtcacagcagaccgccgcacgaaacagccgctcggcacccttgccaacggagatttgcggcataaacgcattcttgcccaccatgcactgcacagtgtacaggcacagcttggcatgaaccgagaccagagttactgctggctgcaaacgcagatgggactgcccggagatcaggtacatattgccaagtgcggcgactaccgctgtgagcaaatcatccgcatctgcgagaatgcgactgcgaggtgacggttatgaaatgcgtgaaaaggctcacagctgaccaacagcgtttggcagaagaaaatctgagcatcgtagagcgcgtcctgcggttcgacatcaatgtcaatccctgcgttgctggtcttggctatgaggacttgtatcaagagggctgtgtctggctctgcaatgcagcactgaccttcgacccagcgcgcggtagctttgcatcctatgcccggcaggtcgtacagaatggtcttgtcagttactgccgcaaccttacgggaaaacaatcccgcatgatttctctggcagagatggagccaactgcacttgccgcattagaagtacaacatagcgctcccttcgatattgagtgcgagactcccctgctgcttgccgccgcagaatctcaatacagtggcgtgacccgcaagggcgtccatgcgctggcgttgcaagtctccggcataccgcttaccgcagttgctactcgcatgagcgccccgcccaaccacgtttcggcgtggatcagccgtgctgtccacaaattgcgaaacgatgaatcttttctctcatctctacacgaaaattaaaatttggaggttcccttatgaaaatgctttacactgccaatggccgttatatccgctgctgcaccgaagaaggcacccgcccggtcatcatcgtctgcgaaaaagagtacgaggtcgatgtgcaagagtttatgctctggtccatcctcaactggcgcatcctgcgggaagaggaaatcagcagcttctacgagaagatggcgagcagttccaatgtcaccatccaccgcagctggcaggactgtgtgcagcgcctgctagttcgcgggctcattgtggttggcaccggggataccgagtatgatgcgctatatgatttgctctcctgccgctttatcatccccatcggtgcggcatggccgctgcgggtgctgtcgttcctcaaactgacgtttttggagggcatctcttggaaaatgactcgccgcctgttccatgtggatgcccgcagttcctgcgagaaaaaggtcattcgccttgcccggcagactcccctctcctgcgcagagatcatcaagtgcattgagatggacatccgccgcttaaaagacggctacgatgtgctggataagctgtacggtgacaacgacctgaactgcgataacttcgctcaggctgttcgggagtaccgttgcagccgcgaggtcatcacagcggtggcaaacctttatctgcggcagcagattatgcttgatacttactgatacgataattaccaaaatgaaagcggaagattcccgctgttttaaatgagaatcttccgctttttattcatgttattgctgtgggactttttccatcagatcatctatactgcaatgcaggacacgtgccaagcgcagcaaggtttccccttgcgccttgttaatgtctttctggcgttgctcatattgctggatggtgcgcacggggatttctgcctgtcgtgccagttccgactggctcatttcggccagtgtgcgcaggctctttaggtttgtttccggctttgctgcgcggtacagttcgttcatcttatcagcaaactggcgaacgtccatttcatggtagggcgtatacagcattcgcaccttggaaatcggcacagcctgctcaatttcagagaagcgcagcccggtatcccactggtaatatgcgatagcccagcccgtccagtattcgagactgcggtcatacgcataggatgccttgcggacgggttctggctcccccgcctgttccagtaccctgcgggcaagttccacaccggaagtgcctgccaaaatagtgctatcaccgagttcaaagcgatgggaaatctcgctcattaaaaaccagttccatactgtttccagcggatactgtaaatcattgaccatgtagtccagcatacgcgcaagacatttttgtgcagcggtaagataatttttatcgtaagcgtggatcactgggcttcatctcctcgtcaaggatggttgtaatgtaaagatcgcccctttggcggcggttccgctctacatcaaagtattggcggcgggcggcctggtcacggaacgctttcttcttataccattctttggcgtctgctgtatcatagcccataaatttcagctgctcaaaggcttttcggcttttcagtacaaattgctgacccagtttgccaaggcgcatagcgctacacaactggcgatacgagattgcaccgttgataaagtcagaggcaaaggaaaagtagctgtcatcggcacgatagccgataatgacatctgccgttttgtagtccagatgaaaattctgtaagagataatccttagcttccgccgccagcggtgtggacgcatcaaactcacggttttcaagcagaatcgtcagccagtgcagcattgtatattccggggcattcaaatcgagaatcgtcaaaccgtcacattcgatttgatactcatttgcataaccgttgtggtcaatacttacgccccactctttcgccatgttcgggttttcggtgcagtagaagccaacgccatagtcattgtagggctttccatagccatattggggcttttcaataatgtgatccgagccgtgataaatcgtctttttcatcagaccacctcctcattgcaattatactcctgcgggagtataattgcaagcgcgttgttatcatcgtgcaggagcccatacaaaatccaccgttgacatccacaagatatagtattataataatcttatagatgatttttatgctatataagcatacgttgttatttttgtaatcggtgccggtagtagatggcattgcgctgaattgggcgcggtgtcttccctgccggcactttttatatagatatttcctgccattggcagaaaggagtgaaccaagaatcaatccgcatcccttatggccgccgaacggtggccgcaccttgggctgcatcaagtgttcagaatggacacctgatgcagccctttttgtttttgtgaaaggacggtaatcgacaatgaaatctgacaatgccatctggaacggtacaagtattttcgtgggcatcattgtagccatcgccgcgtttgtgcgcggcgcgctgctgctgccgcttctgcttgttgcctgctccatctgggaactgtatgtgctgcaccatctgcgcagcagcctaccggcagtccccaagaagaaagcaaaggcaccccgccgcaccaagtttgtggtgccggacattgaggacgaaccgctcagcgacattctgctgcttcatgtgaaccaacgcgtcaccgctgcgcttcgcacggcggacagcaacatcacatgggaatgggccaccaaagatccgcttgctatcgtcaaagagggagggcgctgcctgattcgtgttcacggattggacggctttgagagtgccgaggtcgttttggacaagcaggctcacttgcggtgcgagttgatcaacaccgtgccgctgcgcccaaatcccacggcagacacgcctgaaaaaccgcgtattcccgctgagactcccccactgcccgacccgcgcatttggtatgaaactgagggacgcgcaacgctggagggcatagtggccgacctcagttcccgcgggcatcactcgatgaccgtgcaggaggacggtcacatccagcttgcggatggcagcacatcggtactcccggaactgcacggtttcccacctgtgggctgctgggaaaagttgaaacaggtctttgcaggagatgggctggccgccgaggaaacttccggcaagctggttctctcgtggtaaagggaggtttcgcgtatgaaatccggtgtatccttacagcagatgctgaccgaagtgaaacggcagagcgagtccaaggaggactacctcattgcccccaatcgcctgcggatggaatcctacggcaaagaaatgtttttgcacctgtcggacgacagcggcactgaactaatcgagcccatgaccatcaccggcatcgcccatcggcagatcggcactcatctgcgcatccccgccgcctactatgaccgtatgcgggaggaacgccccgacctgctggcctacaacgccaacacatggttcaagcaagaaaacagccagcgtatgctgcgcaccttggacggctccgcccgtgcgtacctgagcaatcgctaccgccgcatcgacaatatcgacattgccggagtgacgcttccgattctcggcgggctgcctgacatccgctttgaaagctgccaaatcaccgaaagccgtatgtacatcaaggccgtgaacccccgcttgcaggcggaggtatcccccggcgacattgtgcaggccggggtcatcatcagcaacagcgaggtcgggcttggctctgtcagcatccagccgctgatctatcggctggtgtgcagcaacggcatggtcgtgaatgaagccgcagctcgtcgcaaccacgtaggccgtgttaccgacagcgaggaaaatttcagcgtctactctcaagcaaccttggacgccgaggacaaagcctttgtcatgaaaattcaggacaccgtgcgcgccgccgtggaagaagcgcggttttcgcaggtcgtcggcaaaatgcgggaggcaaaagccgcgcagatggacactcatgatgtgccggccgtcgtcaaacttgccagcaaggagttccacattactgacagcgaaagtaccggcgtattgcagcggctgatcgagtccaacgatctgacgctgtacggtttatccaacgccgtgacccgtcacagtcaggacgtggagagttatgaccgcgccagtgaactggaaagcatcggttatagtattttgaccatgccgcctcggcagtggtcgagaatcaacagggcagccgcctaacactgccccacacacaggaggattttttatgtctatgatgaacgctaatgccgcagccaccaccgccatgaccgccaacgaaccgctggactttgaactgcccgaaatgggcgattccgatttcagcaatgaggaactcgctgaggacatggacggcctgacgatgtcttttccccgcatcaagattcccgctggcggcgtgttgcagtttgagattcccaacggcgacccgcagcatccggattacagccccacgctcactggcgtgattttgttcagccatgcaagctgtgcttactggccggagggcgacgagtacagcgatgatgtaccgccgctttgctcctcggtggatggcaagcagggctacggcgagcccggtggtgtttgcgaaacttgtgcgttgagccagtttggcagcgccagcaacggccgcggcaaagcctgcaagaatatgcgggtgctgtacctgttgcgcagcggggagtttatgccgctggcaatcaatctctcgcccaccagcatcagcccgttcc

SEQ ID NO: 3692 - DNA, 11998 bp, Unknown
  16S sequences of unknown bacteria
gaaaagccactgactcacaccctgacccacaagcggaaatatcccgaaacgattagaaatccccggagagcaggcgaaaccaactctccggggattttcgtttgtgattctatggctgctgccggtaaacagttactttcttaccctgctttctgcactcctcaatgacaaaccgggtgccatgggactgcccatcccagaaggcgatcacctgatccgcatagcggatgatttccagattccgccgcaaaagtataagataacttttcctcttctgcctccaccgctcttacctctttgatcccttacggttatatgagaaagtaacgactgaaaaagcagagatcttcatgatctctgctttctgctgctcttgttcttttacaatgacagaggccaggtattgttccacatcctccaaaggtacaccggaatcgggataatagttgaaacttatcacctgggtaccatcgaaaacagagcagtagacaacctctcggttttcctgcgtcaaatgacagtgataatatctcccagacattccggatatctctaaatctccagaatctatcaaattctgcctttccatatattctgcatccagcaaggaccaatcatagtcgtttatatccattggcaggttgacataagagtggatcttgaattccaccacggttttcccgtctgcttccaggttccagtttttctcctgactaacttcccagctcaacggaacagttatttgtacatccatcagatgtccattgtttgtgatccaacagatcacagtatgcatctcatcactactcgactcatccgccagtgaagctgaacttcccctgtccgcgctgcacccgcccagcagcaggcacatggtcagaaatcctgccaacagccgttttcccataccattccctcctgttctgtactcataaaatcttttctgaaacgaggtgatcccttatgcctgaaaaacaagtggccttttctgccgccctctgcggcgctctcacagccctggccgaaaactacggcacgatctgctccatctgctgcgccctgatcctgctggatctgctcaccggcctttccaaagcaaagatccagggcaaactcaacagcgataccggctacaagggcttctggcgcaaggctgcccttctcgctgccctggccttcggcatctgcctggatctgctggtggagtatgccgctgccgccggtctgggggcggagttccccgccctgatcgggcggctgctcgccttctacatcgccgtcaacgagtgcatctccatcaccgaaaatctctcggcctgcggtgtccggctgcccggctttctcgccgcagccctcggaagcgccagggacaagctcgaccagcgctgactcctgtccccattataccagtgccggaatccgctgtaaatcctgcccctgcggggagcagttctctggcgatccttgcagtccgttataaaattgtgagactttggcgttctttcgttcttttactgtcagtatgatccagcctttttgtgaaggcaacggaaaaacgcagcgagttttctttgctcaatggatacaccatcctggatacgattttgacttgatcagcattgaccttcatgaatttaggatcgcagcgatttttgccgcacagggtgttatggatcaattggttcatttgttcgaggaaacaattataccgttagataacatggaaataactttttaatcagattctctattccggatagcctatgccgttctgaatttttgcataaaggaaaaggcaggtcatgatgacctgccttgatccagttattgatacaattcttccagatccgcatttcttccctgacgctccaggatctcccggaaggtgagcttttcctgatgcgtcgtctggaagtacgaacgcaggaattccaccgcgtatttcacatgggctgccgcgccatatttcagcgcggcttcatccacatcaaatgcctcattgtgattggcagctccggttcctttttccggattatggacacccagcaggccgaatacgcccggccactgcttgagatactggctgaagctctcggaacccatctggggctccgcagtcaggatatgatctgccccgaattcctctgccagaatacgctttgcaaacgcggagcactcgatgtcattgacagtggcaagtccaggaagggtgtaccggtcataccgcaccttgcagtggtaggcctccgctgtgcagtcgatcacatgacggaactccttatagaaggtcatgcccacgccttcgctgtcaaagcagcgcatgctgccggagaaggtcagggtctgggggattacattgccctgctttcccgcatgaagcgatcccacagaataggtacaggtcttgaagggatcgatgcttgtcagacggagtgcctccagccgctgatagatggcaaagaaacagtcaatggggttgttggcctgatccggacgggaaccatgtccgccctgtccctccagagtcacttcaaaacccatggagccagccagtgtatcagtgtcattgatgatgatggaaccagtgggggcaggtacattggcatggagtccgaaacaggagtccacatggatgccctgctgttccatataggcaaacagatactttacattgccgccgctctcctcgccgcgctcaaagcagagcagaacatcgccttccagctcgtcctggcagtccagcagagcccgggctgctcccagcagcatggcagtatgggcatcgtgtccgcaggcgtgcatcacaccctcatttttgctccagcaggcacgggttccgttgaggttctccttctccagtaccggcagggcatcacagtccgcccgcagcagcacagttttcccattgggattctttccatggatccatcccaggatgccgccattctccacgatggtatgctcgattcccatggctgtcagttctgcgtcgatcttccggatggtttcatactctttgccggaaagctctgggttctcatggaaccaccggcgcagtccggtcatataatcctcgtattttgcagtcagattcagtgcgttcatcacagtgcctcccattgtattacagaccggtccagccgattacacccatgaagtacagggtggcataggaatagaccagcagagtcagtaccagcggcatgacccacttcacgtacttgtcataggggatcttggcgatttccagtccacccagcagcatacccagcacaggcgagatcacattggtgatggaatcgccgtacttgaatgccgatacaccgatctgccggttgatgttcagggcatcgcacatcggagaaatgatcggacagagaattgccacctttgccgaagcagatggaatgatcaggttgatcagggttactaccagtgcaatgccgatggcagccattcccgggccgagtttctgcaggggcaggcagagagcccatacaatagtgtgcaggatattgccattgcccataaccaagctcatggcattggcgcagccgatgataaaggatacaaaggccataccggcacagcccttggcaaacaggttgcagatctcgtccagactgaagcggcggatcagacctacaataaacgcagtgatgatcataactgcagggagaacttcctgtccataacccatctcggtggtgaggatcacaatgacgatgggattgaggaagtatacaatggtaaccagaacatcacggctctggagatccacttttttaaccgaagctcccgcaagatcggcagagtccagttcattctgccagccggaaagtcccagcgccgaccgggacggatcggcggcaaccttcttggcatagctccagatgtagaagattacaataccgtaaaccgggatattcagaagaagccgcatgccgaagcccgaataaagcggcacttccatcaccatctgagccagcatgacattggtgggagaagatgttccgcccagtacaatggcgacaatcacaacactgaagcccacaatgggatcgacccgcagttttctggcaatcatcaggctgatgggaaccatggcgattacatagtcaccgccggagaaggtgccaaacagcaggaacaccagagtcagcagcgggatcaggacatccagtcccttatcctgcaggcggtagatcgaataatccaccaggttatcaatggacttggcagccagaaccacaccggtcagaccacctgccgcaaacagggttgcaatgatggtgccggagttgacaataccatccttgatatacagcatcgcctgccaggggctcaccggggtctggtgccccaggaagtggaactcactgccgatcagctgaccggtctgggggtctgttgcaaactgtcccgcagggatcacataggtcattgcgctcataaagaagatcagacagaacacgatcaccatcaggtgcggcatcttgaatgacttctttgccgattctttcatttccaattctcctctctttcagtaccgtcagcaggagcagcaagattttattcacacctgctgtaccgctgaatccatggtacaatacccggacgaggattggaatttcccggtcagagcataacatttccatttcataaatgaatttccaatttctttccgcagctaaaacaaacatttccaaatcttaaaaaactgatgcaaacctgtttacttttaagggaaaatatcgcatcataacttatagaacatgctccaaatcccggattccgccgcttggagtgtaaacatagattcagaaccgatacaggtgatcagaatggaaatccagaacaatcccatttttcagtttgaaatcgatggtaccctccagggagttgcctcactcaaagagctttctgtgggcgaaatctttcacattgaggaggaggatatcgccattgtctggctctataacggcaccggtgccctggggttcgatgcctggggcgggatctacatgcttggaaatgattttctctacgcccctggtgaccatgagctggatcttgcccaggtttcggagggaacccgggtcttcctgctgatgatccgcaagccggtactggcccggatcgcagaacaggtgctggtgagtgccgacagtctacactcctttcaggagatcctctccggcctcggaaaggacggcattctgttccactggccgcacagtgcccagctcatcagctgtatggagatcctcattgccgatttcggcagtcccttacgcctgggcgaaattctgctcctggatctgatccggctgctggaacgaatcctgtccattgaggagaaggaattcgctcctgcgcatagtgccacccataccaatgcagtcatgtatatcgtcaaatttatccgggaaaactttgctactgccacactgaatgatattgcggagtccctgcattacagtccggcatacctctcccagatcctcaaggaaaaccttggcatgaattttaatcagctgctggatctccggcgctcggtggtaggacgaaagctgctgctggaaacgaaaaagtcgctggaggatacagcgctggagctcggattccagagctattcgggattctataagttctgggtaaagcagcagggcctctcgcccaaggaataccgggaacggtactccaaagagaatgtaaagattgataagaagatccgcagaatccgataaccgcaaaaaagcctgctgtttcaagccagggacagcaggctttttgacaaaaatgaatcagtcagactatttttcttttggagagggacagtgaaacctccccaccgaataaccgcagacgattggatattccaagcgatgtcagaaattgaatctgctgacgagcttcaaaaactctgcctgcatttcatccagcagttaactgcggactacaaagaaggtctaataaggaattttgttcctccaagagccaacaagcatgcgtttttcttccgatacaagacttttcgagcaaacgcattttttagtttattgacttacattctgcgtattggaacctggcactttattatagcggctctgtttcacttctgtacctccaatcaaaagaaaaggtctgttgcttgtttataagcaacagaccttttgatcagatttgcatggagttccggatcacgcattacccccgcaggttatttctctccggatcaggactggatttctatatgccgtacaggtatatctcagatctgacgggctgcggcaaatccctcgtgaatcgcatcataaatctgacgcaccttcttgctatccccaacatggaatacttccagatcggtttcctgctccaagcgatcagccagttcattctggggcagataaccagctgctactaccacacagtctgcctcctgaacagattcatttccccaccggtcagtcaatcggatctgtccaggctgtacctcaatcagacgcttcccggtgagaatctggatcggcgactgagcaatctcaattccgtatgcctggcttgcggaacccggggatgccaagaatgcgtctgccatctccacgatggtgacctccttgccttcccggagcagttccagagctgtttccgcaccggtaatcccgccgccgatgaccacagcccgggtgccttctgccttccggttgcccagcagatagtcactggcatagagaacctgctcactgtcaccacccggcacctggagccggcgggttttgccgccattggccagaatgacagcatcaaacccgccatgcgccagtgtatcgaaatcggcatttccctttacaagggtgatattcggatctgccagaatatgttcttcataataccggattaaccgacggatgttggctttgttgtccgggcggcttgcctcaaccattgcgccgccaaagccccgtttttcaaacagagttacctgatgtccacgcttggaagcagtcagagccgcctcacatccggcagggcctgctcccacaattgctacacgcttcttttcagccgcttctgtgatcggttcacactcatatttgtaaagagtgggatttacagtacagtgaatgggagtatgccccagcattcctttatcgatacagccaatcatgcagttgatgcatggtttgatatctcctgcctttccgcaccgggcttttctggcccaggcagggtctgccagctgggaacggcccagggctacaaagtcaccattgccttcagccagcattgcttcagcctcttcaggcgtaaagatattgtgtccgataaagaccggaatgtgcactgcttccttgatcatacgggtatgaactgcgttgaaggcattgggcagcaggaattcccgggctgcggtggcatgagtgcctcccatcatattcagatgggatactccttcccgctccagggccttggctacttcaatggtctcttcaattcgaatgccctccggttcccagtcctctgtactgagcttgacacctaccgggaaatccggaccgcattttttgtggatctcccggacaatctccagcagcaaacgcatccggttttccagcgagccaccatacatatcggtccgtttattgtcatggggagagagaaaattggtgggaatacatcccgccgcgccatgaatttcaacaatctcaaaaccagccttcttgcagcggagcgccgcatcgccaaatcggctcaccagatcatggatctcctcaatagtgagagcccggggcaaacgggctcccatctgataccagggttcataagtaatgggagacgcaccgattacttcctacaaacgaagcatcccggccaggatgggcaatctgcatacccggaacagctccatgcatcttgatggcctcagccagcaaagtcagtccggcaataaactcgtccttgtctgcccgcagaccgcaggaagtcatcggtaccgggacacagttgtccataaaaatcagtccggctccaccttccgcagcttccgcataggccttgatctgacggtcagtaacagtgccgtccggatttcccagataagttcccatggaattgcggacaatccggttcttgagagtcaccgatccaatttttcccttggtaaacagatgaggataataaggattggtcatgtttacaatctcctttcagaacttttgatttttctgaaaccatgatataataatgacaaactctgtacaagcaacagctgctgttcctgcgttgcttatgcaacagttcccgtaaaattgtcgcaggaggtgatgtgttatgagtgaggacctgcgagtaatcaaaacgcgttccaatatccgcagagaattcctgtctctgctggaacagtatgagttccgtgccatcactgtatccatgatcattgagcggtgtcagatcaaccgttccaccttctatcgaaattatgaggataaatacgcactggctgatgccattgtccaggatcttctggaggagttcagccggaatatggaaactgcctttatccgggaatccaaaccgaaggctggcgctttcaattttatgctggaatatttttcgcagcaccggaaagaactgacgctgctttaccagcgtgtcctgcctgtcaatctatttgaccagatgctgacctgctacagtgaggcactgctgaaagaaatcactcagattttcccgaacgctgttcggcaacagaaactgtcccggtacttttcgcggattatcgcttccaatattcttacttccatccggtggtggcatctggaaagtcctgagacttccaggcaggagatggaggaaattatccgcctgactgccgaagaaggaatattgcccagcctccggaaccgattcaaatgaaatttgctgaataaggcttcctttgaaacaggctgtgaatcgcagaaatacagttgcctgtaacaaggccttgatctcacttgatcgaaataatcctcagatctgaaaaccggcttctattcctctcaaaacatccggatataagctggttaaagcagaaaattagttaaagcaaaatgtccatgttccggtaacaaataagaaaagagccgctttgcagcagctcttttccgatatttgaaagactggattcagacaatcctatcagttgtgcagcagcatccggtcagagagtgcattctctcctccggcctgagcaaacagcttcaggagctgatccacagtgagcttctttttctcctcgccctgaatatccaggataatccgtccctcgtccatcatgatcagacggttgccatggcggatggcatcattcatgttatgggtgatcatcagggttgtgagctggctctggttcaccacctgatctgtaatatccagcaccttggctgctgttttggggtccagcgcggcggtatgctcatccagcagcaggagcttcggcttctgcatcgtcgccataatcagtgtgatcgcctggcgctgaccgccggagagcagcccgatcttatcatccaggcggcgttccagccccagacccagcatttccagcgccttggtgaactcctggttttcccctttggggaggccccagcgcagtccccggtgctttccccgccgggcagccagtgccaggttctctgacaccgacatcttggcagcagtgccctgcatggggtcctggaacacccggcccagcaatccggcacgcttgtgttccggcaggcgggtcacatccaccgaatcgatgcggatctcgccggaatccaccccgatggtaccggcgatgctgttgagcagagtggactttccagcgccatttccgccgataacagtgacatagtccccctccttcagcgtcagggacacccccttgagcacatgattctcgttgggggtaccgggattgaacgtcttgtgaagattggtaatctgcagcatatcagtcatagatagtccctcccccattacttgctctgtacggcacagccagctgaaacacgccggggccggaacagagtgattgccttcccctggatatttgggatagacagcgctgccgctacggtaatggctgtaaacagccgcaggtctgtgggctgcattcccagctcaatgacaaaggctatgataatccggtagatcactgcgcccagtgccatagagaagaaacgccgcaggaagccgccccggtcaaacagcacctcaccgatgatgaccgatgccaggccgatcacaatggcaccctggcccattgtaatatcggcatagcgctggttctgagcgatcagtgctcctgaaaatgccaccagaccattgctgagcatcaggcccatcagcttcatggtatcggtattgatcccctgggcccgtgccattttctcattgtcgccggtggcacggatggcacagcccagctcggtgccgaagaaccagtagaggaagaggatcactgcggcggtcaggccggcccctaccagcatcacagcccattgaccggtgatccccagtgccgagatgcctgtgaagacggtatcactcttgagcagggtgatattcgcctttcccatgatccggatattgatggaatacagggcaatcatgctgagaatgcccgagagcagcccgggaatcttcagcttggtatgcaggactccagtaacccatcccgctgccataccgcctgcaatggcagcggcagtagccaggacagggtccactccgttatagatcagccttgccgcaatggcagctcccattgtaatgcttccctccactgtgaggtcggcatagtccagaatccggtaggtgagaaatacacccagtgtcataattgcccaaagcagtcccaatgaaactgcgcctagtactatattcagcattgcttgcctcttttctgactgttattccgcaaattccagcagatgcgccggaatttcgattccgatctcctctgccatggatttgctgattgtgtaactgtaatcgctctgcgactgaatgggcatgactgccggatcagcaccttccaggacttccactgccatctcgccggtctgccggccaagattgtagtagtccagtcccagcgaggccagtcctccctctgccacacagttgccctctccccagaataccgggatcttggctgtctgcgccgcagatcctaccagtgccgccgaagctgccagggtattgtccgtgggaatatacagggcatcgcatttacccaggatagactgtacagcctgctgcacatcattgctgccggtgacagtctgctccacatagcccacattcatctcctccaggacagccttgacctcctggatctggagcgccgagttgtcctcgctgctggtgtagagcaggcccacggtctgcacatcgggcagaaactcccggatcagctccatctgctcccggatggggttcatatcgttggtaccggtgacattggtgcccggcgcctcattggactggaccaggccggcatccaccgggtcggtcaccgcagtaatcagcacgggaatctcactggtctgggaggcgatgctctgggcagcgccggtgccgattgccagtaccaggtcacagtcatcgcctacaaaccgctggctgatagtgagcagtgcggaggaatcaccctgagcattctgatagtcgatctcaatggtctccccgtccacatagccatggtctgccagggcgtccacaaatccctcccgggccgaatccagtgcggcatgttccgctggctggataatgccgatccggagtttctgctccccggaatccgatgggttcgatgcacaggcagtcattgatactgccagcagcattgctgtcattgccaggccaaactttttcataacatttccctctttctttcccagaggaacaaaaaatcccgtcctctgaataaaatttcagaggacgggagaaattcccgtgttac

SEQ ID NO: 3693 - DNA, 32759 bp, Unknown
  16S sequences of unknown bacteria
tttcaatctgccctgccttgtttccgttatctgatttaacagtgatttccactgtatccgacttgtttgaaacagcctgatcaacgagtttatcggctaccttatctgatacttttgcagttatcttgaaaaggtcctcaccctgttcattcttaactgtttcagttttagtatccttaattatagttgatgtagtaccgtcaggcgttgtctttatatcaactgacggtatactgatgtagtttctgactgtaactgttttctctgtgatattgcctgccttgtcatatgccttaatcacctgacttccgtttgcaggtcttaatataaggcggttgttttcatcagggctcacaggctcattgttcaaaagaacaccatgcaggttagcttcttctattgtaactgtcacatttccgtaatatgtcccgttatcttcaattcctgatataaccggcggagttttgtctattattattttggatgtatttacatagctgcggttgaacctgccgtcaagcagcatggcatatattatatgttctccttcatccttgagttcaaaggcttcgtcatacggagtccatacagccttgtcaagaacgctttcttcaacaagagaagaacttacaatgtaactggatataacaggggctccgctgttgtctgaagctgcaatcctaactgtctggtcatcgttgaaatactggttatattcactgtttaaagtcattccattgtcaaacccaagccactttatttctccaatggcaatctcacctgtcggaggctcaatatccctccactgcgccgtcagagtaacagtcatagcagtgtcatttactgcgagctctccacatgtggtgtctgctgtaacatctgtatcaccgcatttccagcctttaaactcatagccgtttcttacgggagcagatatgctgtcgagtaccttgtctgtccatttcacattgactttgttatcaactgcgctgccgccggctgtattgaatttaacggtatatccgcttttttcctgccatacagccgtaagtgatgttactcctgccggaacagcttcacctggagcatatgtatttgtaccattgctccagcctgcaaggctgtatcctgtttcaggagcggtaattccctctgctgcaggagctgtaaagacttccccgctcttaacggcaaggtttatactatttgtactgccactcaaactgcctccgttaaggtctaaggctaccgcttttatatcgtctgctgtattcttgatttcaagcacagggtggaaaccgcaaatcttgtctgcaccaccgcttccaatataatcccagtggtctgcggaagcatttttgcctctgactgaacgatatcctgtttcactgtaggtatcctgcccccatgagcttatttcattgcttaaatttttgatataggtttcccctttgctatggatgacatcccattcatttgtcacaggatatcctcccgaataatcatttatagtgtttccgttatagctttcacctacagaaggcaccctcagcatatattccacgctgcctgcagtatatgttttaccgaaaataatacctgcaccattaagggtgtcccagctgactgtatgcgcaatattatactctgcaataaatagtctatgggcatatctatgtccatattctgtatcactggttgccatatcagctttatctcttgatgaatgagcaacaccggctgatgcagacttcagcacatacgctgttatctctcccgcatatgtaaacggtacatagtgcagtgtggtatcaggcaaatcatcattaatcgttcccggaatgccctcgtttgaaagatcaaaatagtatgtattgcctgcggtaagactgtttgtaccgcctgtagcagacactccctgaggcagcattgtaattatcatggcgcatataagcagtatgcttaaaaatctcctcttcattaaaattccctttctctttaaacacagctataacgtaaattcaaaatgcattgcaaccgcttcaaacagcttatgcattatcttctctgaaattttccttatatcaagccccctgataaatccgataatttctctctgctcctgctccggcaccttatacgcgctgaggctgattaaaaggaagctttctatctttttttcaagagttatatgctcatcacacggatatgccatgtatgagcacattattccggctgttcctatctccagtgaataaaaatcctgacaggtaagctctggctgatacgcgccgaaaatttcatgcagctcttttgctgtttctctgaatatatacgcagaagcctcgcgatgggtatatgcctcaatgtaaatttctcttaaattttcattaagctctgtcagagtaagctgtatcgcagtttcgacagcgtatatatatgcaggagcaagcccggcttccgttacggctctcgccgcggcaaactggcttccgaacataaactccacaagctcggtaagcacaccgtccttggcgcgaaatatattctggaagctgctgtttgatactcccgcctttgttacaatctctgacactgtggtttttttgtagccctgctccagaaaaagtctgatacatacagccagtatgcgttttttggcaggcaggcttgcttttgtaattgccataataaggttgttctcccctcttgcattaatttgtttggcatatatgccaaattatatcagacaaatatataaagtacaatattaaatatcgtttttaactgaaaaaagactccgccgtaagttcgaacgaagtctttaactgctgtattgaatatgtaatttcaattcttcaaactgttttctgattttgcacaaagcaagtgtcacaacaaccattttgagcaaaatcagacttccccaaaaaagaaaaaggcaggcaaggtattctcaaataaaagcatcctgcctgcatattatcttacgcacatcttgcgtattatcttacgtactatcttgcatactttcttcctctattataccccatttccgcataaattcaatatttctaatcggttttgtctgtacgcctgacgctgcctccgccttctttaaaatagctgtcaatccccgcaatcagctcctttgcatctgtatattcctctgagtccgcagggtcgtcactgagttcctgcgcatctgagtctgcggctttatctacggctataacgctgccgtcttcttcgtatacgatactgtatatatacctctgtccgtcaagccggcagtcaagggttgtaacagttctgttttcatctcccgctcctgtaatgcgctttgccggcagcgccatattgcacgctataagcagcgcatacacgaggataattcctgcaaatacagccagcagaattttgaatatccttttgcttcgctttgtctttgccgcaaactgctcatttaaaacggcaagctgcgcggcaatctcgtccatatccgccttttcctctattttctctcccagcagactgctgacaggcacttcaaacagctccgctatccttgtcagcatctgcgcatctggaaccgaaagcccctgctcccattttgaaaccgtctgacgaacaacattaagctgctgcgccattacctcctgcgacatccctctttgttttctcaaagcttttaaattttcaccaagcatatttatctttctccgttatatgtgttttcgcagtacagttctaccgcttatcgatctgttcatattcaatgtcgacacttccgccgcggtctttaaaccagtcctcaatatgcgcgatggctacatttgcatcatcgcaggtttcaacatcggtatggtttgccacaaaagcgtcaccgcctccctcgtgaatacggtactggtcatcatagtttattccgtagacatatgtttcaccgtcaaggctgcatgttaatgttgcagaactcatcaccctgttattatccacaatcacaccgaaaacaatatgaagcagtatataccctgcaataagtgcggctgcggctatcagcacaattctgactatctttctggtcctgccccgccttgccgcaagctgctgatttaaaacggcaagctgaaccgcaatctcatttacattaacattctcctctatgctctctcccagcagactgctgacaggcacctcaaacagctccgctatatttgtcagcatctgtgcatcgggaaccgaaagcccctgctcccattttgaaactgtctgccgcaccacattaagctgctgtgccattacctcctgggacattcccttttgttttctcaaagcttttaaattttcaccaagcatttatctattacctccttctgtgactaaaaattatcacagatacagtaaacttagcaagcaacgcaaattaacataagtgttatttcccgaatttcattatgatttattcaacattaacatcagacctgcttaaatctatccttacttcagtacctttaccctcagacgagcttatctgtatatcatgtccgagagccgtaagaatacgcctgcacagatacagccctatacctgtggcttttttgtctgtccttccgttaagtcccgtaaatcccttatcaaacacccttggaatatccgctgcatcaattcctataccgctatctctgatacacagaacaccttctttttcaaaagttatcgctatgaagccctgtcttgtatatttgagtgagtttgatatgatctgctctatcacaaacatcagccatttttcgtctgtaagcacagtgtactgcacaggctcgtattcaagacggatttttttccgtataaactgggaggcatatttttttacggcctgctttattatgctgtcaagactgcactctcttatgacatagtcctcagctcccgcatcaagcttgagatacataagcaccatttcaacatactgctcagtcttctgaagctcgtctctgagctctcttgcagtatcggtgtcattatccgaaagcaccagcctcattgccgcaataggcgtttttatctgatgcgcccacattgtatagtaatctataaggcttgagtactgccctgtcagccttgaagctgtttctttttttgatgcgttcagtatccttattatctcgcagtaatcgctttcaataagatttgaggaagccggcatattgcttatactgcagctcacctcgtctgcaaactgctgcaaagccctgtgtttcgccctgaatttaaggaaatcggctgtaaccgccaccgccgaaattacaaggcacagcagaaacgcatatccgacggcctctgccggcagaccgtaaacgtatgtcatactgccgaataccgcagtaaacagcagaaacatcagcagcgtctttatatttaatctgatatagcttaaaatcataatcccacctctgctattccacgatatatcctatgccctttttggtggttataaagcctgtaagacctgcactgtcaagcttttttctgagccttgcgatatttacggtcagagtgttctcatctacaaagcagtctgtttcccagagcttttccattaaggtttcccttgaaacaatgctgcctctgttttccataagagtaagcaggattttgtagtcgtttcgggtaagctccacaggctccccattatatacaaggctggcatcagacatattgagaagcgctcccctgtgctctataacctgtgtctgacctccgaaatcataggtgcgccttaatacggcctgcacctttgcaacaagcacgttcatatcaaatggctttgctatgaaatcatctccgcccatactcatagccattataatgttcatattatccgccgccgatgacagaaatatcacaggaacctttgacactctcctgatttcctcacaccagtggtatccgttaaaaaacggcagcgaaatatcaagcagcaccatatggggatcatactctgcaaattcccccattatatttctgaaatccgatgcgcatctggcctcaaatccccagtttgtcatatgctcttttatcttgcctgcaataatactgtcatcttctataatatatattctgtacatgtgctttcactgcatcctttctaatttgccgtatttattaatattttagtaagtggtaaaccaatcgtgatatgtaatttttttgccgccgggacctggcggcataattatgctcttaatctatttgatgcaataaactactgtgtaattgtgcttccccagaaaacaatttttgtgatttcagcattttcgttataccaaatgaatcctacggctgctccactatcaatcagcctataggcacctttttcagtcagcttcctgcagtgtgactcaatatttacgctttttcctgtttcatccacattataagtccaagaataaaactctgtattatctgccagtttttctgatagctcatattccttgaattccggatcatcgccatcataatttgcaggcgcagtaacaattttatccccgtctttaccgataattgcaaggtacgaactaaacccactgacaacgttatcagtatcgtaagcaagattctgaggcgcacctccggcaatgagcttatcctttttgtcaaaaaattctttcacatctccgtcgatatccagaagaagtctcgacttctcgaggcgaagaacctttattgacatatcaccatcaggtttaagcttaatttctccactttcagaatcgtatgtatacttatcatacaagtcagaatccccaaccggatttccttcgtcgctataaaaagcaaagtgcccatcatcgccaaaactaattgtctcatcacatgcacaatcatagtgaagccactcatgttcagtcagaaactcaggctttttttcagatttcccacatcctgcaagcataatgcctgccactacaattattattgctgcaatcattacttgtcgatttacaatagaaaattttcttttcatatcagcatctcccatggtatttctcaaattctaatatttcatgataactttgttttaatgttccatatcttatagactgtctggttcatgaatctccacaccatcttctaatgcagcctcgattcatgcttttggggcatccagtgtattttttatcgcaccctccacgatcccgctacaagtaatacaaccaggcaaatccggataagaaaccacaaatccaccttcatttttatcttccacaatttttatatgataggacattgccatataatcatttagtgtcttcatcattctctacctcacaatctacaacttcccagtaaccattcttgacttcttcataagtcaaaccattatacagtccacccggagatcctaatctgtactcataccactggtacgagtaattctatttccaaaataaaaacactagatcattaacactattatacgttctatccttcttttctagcaagtaagaaaacaaaacagttcattttttcttatcattttcttctgccctttatattatactacaaaacccaaaggtctagagcattacaaacaattcttcaaaaacattttatgttttttagggttccagggtaagtgataaaccaatcgtggtatgtaattttttatgcttgtaatcgatttgattatctgcctgcattcctcaggaatactatcagaccatggcatcaaatcatcaatatactttgctggagcatcatccaaatgatcaaggatgctttcaagcaggtatttaaaaattccataaaataaagggcatcgaatacatcgacaccctttatctgtaagtctttaatattttattactttgagagctgtttcattgttgcagtaacatcttctaaagtgcttatttctttttttacaacttttgcaaggtcttttttctgtacgtcaagttctttttccagcgcttttatctgagcgtctacatttggtttttcaacatcatatacagctttaagatcctgaatcacctgccataagtcagcatttgatttaagatatcctgttccccatgagttttcggcatcatctccaagtacctgatccacatagaaatcataagtctgtttatcaaagttgtacgcataccagttcaaatcgattttgtacagatattcatcaagagcagtagctacatcacccttcttaagcgcatttatcgcttcctccagcacttctacatttgtctgcttatagcagtgtacaaactgaaattcttcatcccagtttattgtaaacagattgtttgtaatttctttaaacagataatttgcttctttgttaaattcctctgcattatcaccatccactgattcgcttttttctttaaacagcgcagcggcttcatttgcattatcaaacgccttaatcagttcatctgcattatcaataacatctgaattgactgaagctttcatttcattaaataatgcggaataatcaaaagttcttgaagtttgtttatcaaacaggatagtcatgccgccatacagcttatgcgcatattcaaaaacttccttactgaagctgtttccttcttcggtatcgttatttgaatgatatgttcccgaatgatccgaaccgtataaacccgaatcaactacaggaatgcctgcgttgacatagctgaatgcttctgtccatgtccatgccggactgtttgttttaaactcgcccttaaaaggacttccttctatcttctcaccaatcggtttaacccattctgccagttcataaggtatagtaatttctacgccttcagcctcgccgtctgtaacaccgctgtctatatttatagccatataggcattatcaatccagtcaggatgatttctcatttcaaccactgcacctgttgcccagtcatatcttgagttatcaacaccccattcttctgcgccatgacctatgaacttgattgttttggcaggttcatatccgctttctaccagcgcctttgcaattcccagcatacagcctacgcctgaagtattgtcggcgaaagctctgaaataagcatcatagtgtgcaaaaatatagattacttcatttgttttgcccggaatctcaccatatacgttatatgaagtctggtcatgtttaacctctccgtcagcattcagtacagcttttattgaaccgccattgtctttaatcgcttttttcagcggtttggcatctgctactgtaatagtgaaagccggtgcatccgatggtccgcaataatcctgaactcccagagtatcttccgaatatgtgcagtatccgtctacattaacagctataacagcctttgcgccctttacctttgcctgatatgacggccagtttatccaccattcgtctgcctgatttatatcaataagtacaatttttccgtttacatccaaatcttcatagtcttcagcagttcccttgcctgcatatacaatctccacttcctcatttttggctttatatgtggattggaacatagccatttctattttgttttcattgccattgttctcatatctaagatcagcatttttaaatgtaaatgaatcaaccgtaataggttctttatttacattttcaagacctatagccttcatctcatcttcaatatactctgctgcttctttctctgctgcagaacctgccgtcctgaaacctaaatcttcgtttgtctgaaatgaaataagtttctgcataacatcatatgaataatctgcatcaacactttcataaaaagcattcaaatcagaatccccatctgacttgccgcaacctgtaaaggcaaacatggcaatcagcattgctgctgctaatactagtgataattttttcattgttttcctccttatataatatatctcagccattatatcatattttttcagaatagtatctatttttatgaattttttgtattttttatattatataaaaaacagcagctttgtcacaaattgatatgctgctgttttttactgtatattacctgctatttctcaaagcagattttgcctactgctcccggatatttaccggttataacgtcctgctcctgagaagccgcttctctgaagcccggaagtttgtttctgatttctgctgccggaaagctgtcgcttcctatgaataagatctcataattgtgctggaatgtaagctgcacgaaatccataatctcatcgtcattaaagtccttttcgaccctcattataattctgacaggcttaagtcccgcatcggttgccttgttgatgccctctacaacgttttcgagagtatcgtcctcaagattttttttaaatctggcgtatctgaatgtatcaacctttacggccaccttgtcaagacccgcctctttaagttcgcctgctgtaagcttaagaagctgtccgtttgttgtaagcattacctgctcaatgccttcaatagatttaatctgctcaacctctttgataatattaaatctttcgataggctcctcacctgtaatgtctatcatattgtatcccaaggccgcagcctctttggctttagccactgcctcgtccattttcattttgcggtttaattcaagtttaaaacaattaatcatatatgctacctctctgttaattctcttttaattttacttgaaaaatccgctccagtcaattatgcttatatatatcattacaatattgaggagaaaagctttgaaattatttatcatcggagatacacacggtcatctggacaaggtaagaaaaatataccctcatctcaagggcgtagatatgataatacatacaggagacatgcagcgcgatgcctatgaactggaagcggaattcaatatacctgtaatctcggttcccggcaactgcgacggcagccacagtgcaaacgattttgccatagccgaaacagaatacggcaatatccttgtcacccacggacatatgcagaatgtggactattactacgacaggcttttgtatctgtgcgaggaaaaaaactgtgttgccgcagtattcggtcatactcatgtacctgtatatgaggaatatgacggcatatatctgctcaatcccggcagcctgacaagaccaagagacggctcttccggctcctacggcattataaccaccacagagtcaacctttgccggctccataatatattacaagtcttccctgtttgaaaaggacaaagtaaagggaggatatatcaaggatctgctcaattacagtgaccgtttttaattttaataacagccaaataaaacagagaatacagattatctccgtattctctgtttatttgtatattcagtttgtctgcacacattatttatatgcatagtacatgtatcttgccagctcaccgcgtgagaatatatggtcatctccgccgaatttatgatcaccgttatccttgatgatgcctttttcctgcgcccatgcaacagccttggcatagaatacatcacttctgaaatcagtaaaagttgtctttgtctttgctgtcggcgatcctatgctcttccatatgtaatacagaccctcgcctctcgtctgagttccctcgccgctgaactgtccatagtctatcaggcctgttttctttgcccagaatacagcagtgtaatacggagcagcacctttcaaatcaacaaaccagttctgaattcctttgagtcctgtcctaggtgaaccgttggcacgatggatagcatagaaaagctctcccttggtaacacgtacatcaggtgcaaactctttcttgttaagcggtgttattatcttattctttacagcccattttactgccgctttgtctgctgatgaaacgtccgaatatgtaaattcgcttgcagactcttttactttgattttaacagtcttttttgaatacagtttaatggtataaccgcccttgactttcttcatataatcggtatcaagaggtatgtatgattttctgcctgaactgtctgtacatatcagatatgcgttttccattgccgtaatgctgttaaagcttgtcttgcctgtacttgtggtatattttacaatcggagtgcttctttttgcaaatatctgcacaccgacattgtcatcaattccgacgcctatataattccattttgagttcaaaaggttcttgcggtgtccgtcactgttcatccatgcgaatattgatgactgtcctgtaactgcaacgcccttgctgcaattatacaggttctcacctgcattgctctttccaaatgatgacggtattgcagtgttaaacttgcttccgtcaggtctgtaatgaggcttaagctcatatttcacacattccttgccgcgagtatcgcaggctttctgaagctgtcctatcattgtgagaagacttttgccctgcttgaatctttctctgttggtttcacgcagaactctccattcctctttgttgacggatattaccttaggcatattcgttgcaagcatcggaaccttttcactgtaaagaacctctctgtatttaccgttcaggctcagctgcagatatccctggatttttccctctttgtccgcagttgcatcttccttgtagaagccctctttccattcgcatttgctgccgtttttaatcgccgcctttgctgcgctcagaagctgcgctttggtaaggctgttgcttactttgagctttttcatagccttggccgcaagtgaccagtcctcgtcaagctgcggtgatgataaatcctcctgcttaggaagcttaggtatgcgggcttctaatggagccgcatcttcatcgggtatcagtgtaccgtctatagccacataaaacagtatctttccgtctttttccgtggttgccgcttcaaaacgatctctgtatatttctatctccttgtctttcatatcatcaggaagaagttcatatacaaaaaacattaagtcgccgtcagatgtcgtctgtgatgcctcatagctgccaagcgccgcttttattgagctttcgatagccgacatatcgctgcctgcccacgaaaccgctgtactgccggcagtcatggtaagcaccatcacaactgttaaaactattgctgtaattcttcgtttcatttcctttacctcttctaaagggaatcgccctttttatctcggttgtttcattgaattttgaatcgtttccagtatatcacaaatgtacatgcctgtctatcaggctgtctatatattactacattttaatacttttcccctcgcccagcaggaacagataccgttcctttacaggcttttgcgttatcttttcgagagcctccgcatatataccaagctgctgcctgtatcggctctttaaaagctcctcacttttgagcgtactgtttttgtagtccacaagcacaagctgtccgttttcttcaaagaagcagtcgatgacaccctgtaccataatctctgtgccgtctttatccatgagaatggtaaagggctgctcacgcctcaagacatccgcctttgcagcgcgccttcctatatcgcttcgtataaacgagagtatgccctcgcggtttaccgcctgcttttcctgatccgtaagtatgtttttctctgcaagctcttcaataatgctgtccaggttttcttcaacaaaatcaatatgctccataaccttatgggttgcgcttcctctcatggctgccgacagacctgtgtcctccgccgcaaaggcagggattttaaggcttatttcgttatagcgcgtttctcctgccgcttctttattaagctctgtaacagaatatttgtatctggtctttacttctttcatattgccgtactcaaaggaaagcttctgacgtatttcatcactgcattcggttctgcctgcttctatcagttcccttatctgagctttgccaagttccgaggctgccgcatttgcggacagattctgcatatttacgattttaatatctatgccgcttccctctttgtatgccgcaggggccgcaaggtcaagcgggcatactgcggtttcgggactttctgtcatatacttatattcgtttccctcaaattctctgacactgcctatcattatgagcctgtccattgcgcgggtaagctcaacataaagaattcgtttttcctcttcaaagctctcatttctgatacatttttcaattatattctgtatcagtgtttttcttttccagtgctctgccggatttatatatgtaattcctattcccagctgcttgtgaagcgcaaggtctgcctctttgtttctgaaattgaaccttgaacccattcccgctcctattacgacaggaaactccagtcccttgctcttatgtatggtcattatgcgaaccacatcatcattttctcccacagttttaatctgacctatttcaatctttctcgcctttactgcctctatatatttgagaaatccgtaaacatcatatataccgccctcggaggcttccattgccctgtctgcaagggctctcaggttagcctgcctctgacttcctcccggaagcgctcccgcatatgtgtaatatcccgtttcccatatgagcttccacacaagctcgctcagaggaatatcccttgcaagctgcttccagcctgctattgtctgctctgctcctgcgcattttgcctttagcgcagggtcgctgccgcagcagacataatttctgaaagcttcataatatgaaacgtctttacattcaagacgtatatccgcaagctcatctattgtaaagccgaacactggagaatgcagcaccccgataagcggtatgtcctgcctgctgttgtctataagggagagcatatcctccacaagtgaaatctctattgtatcaaaatatccgtcggagtcttctacatacaccggaatattttcgttttccagtatctgcgcaaataccgaagcattaattctggtgcttcgcataaggattacgatatctcttcttgttatctcacgctcgtagcctttcttggcatcataaatcttctgccccagtgtttttttgattatgtcggcagcaacaagagcctctgtttcggcttttttcataccggctatttcttcgtcgagctcaatatcagggtctgtctttctgtccagaattacaagctttggattaacatccagttctccctcgtaggctatgcccttgtgaagcgccgcctcaggtccgtaatcctccattatgctttcaaatacggtgtttaccgccgcaagcactttgcccttgcttctgaaattctggttcaaatctattttgaggctgttttcgctatgtgaatactcggcgtattttttcataaacagctccggctcagcaagtctgaatttgtatatgctctgcttgacatcacctaccataaacagattgttttctctttttatcctgcttataagggtatcctgcacgtcgttgctgtcctgatactcgtcgatgaatatgtattcaaatttatctctgtattccgccgcagcttcctcatgccctaatatttcaagggcgtaatgctctatatcgttaaaatctataagggatttttcagccttgagggccttaaatctgctgctgaattctgtcacaagctcttttaatatgcaggcgtatctgtaggtcttgtttatgtcctcaatatattccgaaagctcacatatatagtatctgtttctgatatactcaagctgttttttgactccgtctttaagatatacggcctgctcctttaccggctcataggcttccttttcagctttgagcgcggccattctcggaatttcaatgcctgaaacagccgatttcatctgactgtagttcataccggatatatcagttgccctgatctccgcaagagctgtttcaaatttatccgaaagggaataaactcccgcatcgctaaggagctctgcaatctgcccgaatgtcttttctgcaaagtcaatgacccccgctgtatcctcttttacaaagtcgaaaaggccgctttcttcaaattcctcttcgctcacagacaggttctctgtcatctgctcaagccactcaaaaggctctgcgatgctctgtatcattctgtaggtttcaagaattatatccttggcctttctttcgtttctgtcgctggcatagcatgttatgaaatcaatgaaatccttatttttctccgcaaatttatcggaaaacagttcgtcaacagcctgcgctttgagcagtgtgctctgcgcctcgtcgcatattctgaaatccggctccacatctgtcagataaaaatatctccttataacatcgagggcgaagctgtgaaatgtggatatgctggcgcgacccacaaggtcaagctgtcttttgaggtacactatatcctctctgctgccggcctcgtctattgccttagtcagcgccgtcactattttttctttcatttcagaggctgccgccttggtgaaagtaactatgagaaatctgtctacaggtattctgtcctcaagtataaggcgcttgattcgctctattaaaaccgtcgtcttgccggagcctgccgccgctgctaccagcagattgtttcctctgttttcgattgcctgcttttgtgctttattccattccataatcatgcctgcctttcttataataattatactgaaaagcagtctctaaaacaatcttatcttttaatactccctgttttttgttatactataaagtgttacaattatatgtaaatatgcttttgtttggagtgataattatgaaacctacaatgttaatgatccttgacggatacggaataaacaaagatactgagggcaatgccatcgcgcaggctcacaagccaaacctcgatgagatttttgcctcttaccccaatacaacacttaaagcctgcggtcttgacgtgggacttcccgcaggtcagatgggaaactcggaggttggtcatctgaatataggggcggggcgcattgtctatcaggaccttaccaagataaccaaggccattgatgacggaagcttctttgaaaacccggagcttaacagagcaatggaccactgcacagacaatggctctgcgcttcaccttttcggtcttttatcagacggcggcgttcacagccatataaatcatcttaaggctcttatccgtatggcaaaggacaagggactttcaaatgtgtttgtccactgcttccttgacggaagagacgtgccgccaagatgcgcggctaaatatataacagagcttgaggatttcatgcgggataccggtatcggcaggattgccacaatctcaggcagatactacgctatggacagagataagcgctgggacagagtcaaagccgcttatgatgccatgactgtatccgagggctttcattgcgaaactgctctcaaggctcttgaggcagcatatgacagagacgaaaacgacgaatttgtaaaaccgtcggtaattaacggcgcagagcctgtcagtaacaacgatgcagttattatgttcaatttcaggcctgacagggcaagggaaataacaagggcttttgtcgctgatgattttgacggctttgaaagagctgcaagacctgctaacctctgctatgtgtgtatgactcagtatgacgcttcaatgcctgcggtaacaatagctttccctcctcagagccttgtaaacactctgggagaatatattgcagataaaggtcttaagcagcttagaatagcggaaacagaaaaatacgctcatgttactttcttctttaacggaggcgttgaggctccaaacagaaatgaggacagaatattaataccgtcaccaaaggttgcaacatatgatatgcagcctgaaatgagcgcatacgaggtcacagacaaggttatagagcagattaaggcagatacctatgaccttatcatattaaactttgcaaactgcgatatggtcggtcacacaggcgttatggaagctgcggttaaagcggttgaagcggttgacaaatgcgtgggcaggataaaggatgccgtacttgaaaatggcggtcagatactgcttacggcagaccacggcaatgcagatcagatgacagatgaggcgggcaacatcgttacggcccattctcttaacgacgtacctcttgtgcatatagcaaagaagccttgcagtcttaaggacggcggcagactttcggatattgcccctacgcttcttgaccttatgaatatggatataccttgtgaaatgacaggcagaagccttgcggtaaaaggagaataatatatgaaatttatttcagaatacaaaagcaagctgagaacacccgaggaggccgtatcaatagttaaaagcggcgactgggttgaatacaccacaggcaacggctttcccgccctgcttgacgcagctcttgccaaaagaaaagatgagcttaaggacgtaaaaatacgaggcaatctgctgtttggacctatacaggtagtggaatgcgaccctcacagagagcatttcatatacaacagctggcactgctcggcatatgagagaaagctctgcgacaagggcctgtgcaacttcattcccatgatatttcgaaatgtggttgaatactacaggcattttcttgatataaatgtggctatggtttcggttgcgcctatggataatcacgggtatttcaacctgtcaacctcgataggcattgcaaagggaatactcgaaaaggccgatgtggttatcgttgaaatcaatgaaaacctgcctaaaatatatggcggtcacgatgacagcatacatatatcagaagttgatatgattgttgagggtgagcatggtcctctgatacaggtgcctctgcttacgccaaaggaaacagatataaagattgcggaatacatacttcctcatattacagacggcgctatgctgcagcttggcataggcggtatgccgggaataatcggcgagatgatagctgactccgaccttaaagatttaggtatgcacacagagctatgttcagacgcctattacaagatatatgaggcgggcaagcttacaaacagatattccaccctgaacaagggcaagggaatttcgggaatattcttcggaacagaaaagctctatgaatgggtaaatgaaaatccgggaattatggctttcccgcttgaatatgtaaacgctcccgaggtaatgggaaagctcaacaagcttatctccataaacagctgcctttcagcggatttatacggacaggtatgcgccgaaagctccggcacaagacagatttcgggaacaggcggccagcttgatttccttacaggcgcggctatgtcaaaaggcggcaaggcatttctctgtatggcttcaactcataaggacaaggacggcaatataaagtcgagcataatgcctacatttaacggtgatattgtcacatctccgagaagccagtcctactatatggttacagaatacggagccgtaaatctggcaggcagaaccacatgggaaagagctgaaatgctgatttcacttgctcaccctgatttcagagatgacctgataaaggctgccgaggatcagaaaatatggatacgctcaaacaaacgataaaacgattgaaaccggtagaaatctgccggttttgagtttatgcaaccaacagttgcggaatttccaacacctgttgatagcaatttacaggttccggtgctacactgtttttatcatatgctatggaggaagaaacaacatgctgttatcagaaaaaatattaatgctgagaaaaaagcaggggtggtcgcaggaggagcttgccgaaaagctgggagtgtcaagacagtccgtatcaaaatgggaaagcgcttccgcatcacctgatatatcaaagctggttgaaattgcagatatatttgaagtatctacagattatcttttaaaggataccgatactcctgctcctgtttcagacagcactaaaacattatcattaaaagaggtgcaggggtttgttgatgataaaagcacggcgggaaacaaaactgcgctgggagtgctgctgtgcatacttgcacctgtgctgcttattgcatcaagctgctcgtttatgccaaaggccgctatgcccgtcgctctgattatactgtttgcgcttgtatgcgcggcggtgatacagtttatactcacctcacagtatctgaagaaatataaattccttgatgaagcaggtttcactcttgagcctgccgctcaaaaatatatacaaatcgaaaaacactcttatgaaaaaacagccacaagaggacttattgcaggagttctgctttgtataacaagtccggttccgctgattatatcttcattctttgatgccggtgatgatgtgtatatactgcttacttcactgcttcttgtatttgttgctgtcggagtatatatactcatatattcgggcagtaaaacgagcgcctttaatcagctgcttcgtgaagaggatttttctccaaagcaggcggaggaaaataaaaaagcagggaaaatagcgggtatatactggcctgccgtaactactttgtaccttgcggcaagctttctcacaaacagatgggattttacgtggataatatggcctgtggcggctctcatatttgctgccgtaagctctgctctgaaaaagaaatagaatgacgacaaagggagaactgcattcaaactgcgcgttctcccttgattattcttaatatactctaccagaatacccttataacttttgacacgggtctgtttaattttctttttgtaacccctaaaatcggccagctgtcatatacatatccgttaccggcataaatagccacatgatataccgggttcccgtagaacagaagatctccctttttcttattgctgaagcttacggttttacccaatcttgaatcttttgcaagccattttgaggtatactcatattttgccagcgcatggtccacaatattggtatgcggatttatgcctgccgagtaaaggcactggtatataagtccgctgcagtcggcatatgtacccggttttcccgaacatccgatacgatattttgtccctgccgatgcatactcttttgcagtattaagcattgcattgatatagtcggatttcttacttccgccgtcgattttaacaggtataacataaacccctaggttatcccatgatttttttgaatatcccatagcttcccatgttttgagattaacattacctgtgactttaataccgtattttctctggaagttctttacggcataatacgtttcattggtatactttgcctgtgagactccgagcatttttctgttaacatatataactttaagccctatgtttttacggcttatattgtatgaacccgacggcagttctatattctgttttatactgtaatatccgctccccctgctgtatactctttttttgacagtcacattatagatttgaacgttttcggggttttcactgtcggtatgagtgataacacatttaccgtgttttattcccttgattttaccatttgacgttaccgtcgcaatttcgggattatcggatttccatatcccgtctgcaatatctgtttcagccttaacggttcttcctatgtgcatttcaatatgcacaggaagtctttcttcaggctctgtatcaccggttcctcctgtttcactgtcttctgtaatatttatattctctgaattctgcggtccatcttctgcgccgtatactgccgcaaatgataatgaaaacatacatattgctacaaaaaccgcaagtataacaacttttaccctcttcattactgtcatctctttctaaaaatactgcatatacataagtgtttctgtctcaaataaatacaaatattcaatttcagctatcagccttatttaagtttttcctccacaaactcaaatatatcctgcggagtatcaaggctgatgcccgtgtacccgtccttagtcacaatatgccttgccattttgccgtcacgcagatccgcaaggtcgttggccattatatagtccatattgtttttgctgcaaagcttctgggctaccgaataaagctcttccttaggcacgttttcaagcagtttgcagcctattagaagtgtatcaggataccattctttgagtcttgctatgattttcggagtaagtcccagctttacggtaaggtttttctgatagcttgaaatcttgctggaatcatcaagtctgcacttagggttttccataaccttaaggaaatcctccgcgcttttggcgctgtctttgattgcaaacagctccgccgccatatcttcaagcaggaatgaaaactcacttgtgaaatcgcccactgcggcagcgtgtatcagcgcatcgtagtgtgtgtctttgctgcatgcctctatcgcctcaagcatatcagctgtggtttcaacaggtattatttcaagatttgagctctgctccatattcaggagtttctctgtgtttatgcttctattgagcacaagtgtcacagaatatcctgcctccagaaatctcatgcccagatttgtcgacaggcttcctgtagacatattggttattttcattacctcatctatatattcgttggtaggtcctccggttataagtatgtttttcataatagttacctttcgtatttgttatatatttttgttacaagctccctgacctcttccctgagagcttcgggaagcagtatctccactttttcaccaaactgtacagcccagtatttcatggcctgcgggtttgccgtcacatcgaccagcagcgtgtctttggactctcttgtaatctgtatgtcacttcccagccagtctatgacgtcgttgatgccggactccgacactctgagcctgacaagctgtgatttgcccgaaaacatatatacatgctctgccatatgcttcggcagattcagtccgttctgaaactcgtccacctctctgacaggctttgccgacatatcggtaatctccacgtctgaaattttttcgacgcgaaaatgagtgctgttgctgtatttgtccatattgccgataagataatatctgccgtttgcaaccacaatctgatacggatttacaagatgcttctccctgctggtttttttgagagttttggtttcgtcatacctgttatagaagaattttaccttgcggttatcatctatagcctgactcagcacctctatggtataaaagagctggcctgcggtatgctccattttttcaatgttgcttacgtggcgcacctgttttttgaagtaaatgttggactggcctgcaagtctgtccacaaggtcttttgcctgctttgccggaatatatcttgaggcaagcaccgaatctataagtagcctcagctcgctgtcctcaaaatctctttcggccagataatatccgccgcctgtttctatatcatatccaagctcctgcaaatcgcttatgtttcttgccactgcctttcgctcacatgcaacatcatagtcctttttcataatgtcaatgatatcctgctgcttgagcctgtgtctgtcatctgaatacttcttcagtatttcgagtatgtacattatatagagtttctttgcctgaccgctgctcatatttatgcctcttcgcttctgcgctgtatatagtctgcgtatgcaacgctgaggtcattgtagcttctggagaatgccgcagcagttgatttctgcttggtggttgcatccttgtattcgctgttggcaggcttttcgcctgcggccttgcggcgcaggaagtcctgaactgcaatgcctctgtcagtataaaggttgtagagcgcaagcatctcgtcaaacatgcagaaaagctccataagatcatagtcgttctgatctacttctattgcctctgtatcaatctgcagcgccaggttcttaagtctcttgtattctctgatattgccctcatagtccttttttttgaatatattctttgggctagcttcaacatacacctttaaatcaagatccttctggctttcaaatatatccgtaaaaaaatattctattgtatttaataaattcatctttcacttctccttataaagtaatatatgcagattttacacctttatcgggctgtttacaagtcctgctgcaatatacgctcatatcttttgaggtcaccgtccgaaaaggcagtcagaacgacctccatatcgtactctttgagaaattctctgatagtgtctattgcgatatgggcagcctcctctttgggatatccgtacacgcctgtcgatattgcaggaaaagctattgatttaagattatgctcctctgcaagtttaaggctgtttctgtaggcgtctgccagaagctgaggctcgccctgctctcctccgtaccatacggggcctaccgtatgtatcacatactttgcagggagattatagccctttgttattttggcctgtcccgtttcacagccgttcagtgtcctgcactctgccagaagctgcgggcctgccgctctgtgtattgctccgtcaactcctcctcctccaagaagcgtattgttagctgcatttacgattgcatctgtctgaagcttcgtaatgtctgcttttactgcttttatacccataaacactcgtcctttcctttgaggcggcaatcatcgccacctcttcatagtaacgcgccattttagtatcttttttgaaatccgcccacagaaatgaaagtaaaattcctgctgttaaaataaatataaccggtaataaagtaatcatatatctgtacctcctgaaaagttattatccttaactccatatacagaatactacattatatgtacttttttcggtgcattattttaattccagcagatttcttataacctctcccgccatcagcattcccgcaaccggcggtgtgaatgatatgcttgcaggtgttctgtcacctgtctttacaggctcctcccgcgagtagacacattttagactttgtatgcctctttttttgagttcctttctcataaccttggcaagaggacatatttttgtatcatatatatccgctatctgcatcatttccgggtgaagcttgttgcctgtacccatagaggatataacgggtatgttatttctgctgcatattgatattatttcaagcttggccgtaacggtatcaaccgcatctataacatagtcatactgcgtgaagtcaaattctcccgctgtctcaggcaggaagaatttttctatggcactgacactgcactccgggtttatgtcaagaattctctctttcataacggaaaccttgcttttgcccactgtgctgtgcagcgctattatctgcctgttgaggtttgttatgtcaaccttgtccttgtctataatatctatggtgcctacgccagctcttgcaagagcctcaaccgcaaagcctccgactccgcctgttccaaataccgccactcggcaggctttgagcttttctctattttcttttcctatgagtttttctgttctctgatgctgattcatagttcctgtttttttatctgtcctatcactttatatattacatcgctgctgtagccttttgaggaaagtcttctggctattttggccgtcattttttcatcgggacaggctccgtctgttattctctccgcctgctccattgctctttcgatttcaaaatcatcaaggctgactccgtattcctcctcataaaagcacatagcgtcctctatcgtattgctgtcaacttccttgtcgtaaagctcgtattttataagcctgatgcccttgccctttgaaaagccgtagttgagatacgctatggtatactgaaaatcatcgagatagtgaagtgctttaagttcttctacggtctgcctgatttcctctgcctcaaagcctttctgggcaagatgagccctcatctctccgcaggtacggcttctgtgctccagatatcttactgccgcttctttaatattcatagcatgctcccgcagatgcgactacgcacgatttacccatagccgctcttaagtcgcatatggcgtctatgcctgtacagtgaacaggcataaccgtttcgatattttcgtttaatacctcggttacgactctctgcctgtcctcatctgatgcgctgtaaagatgcatacctgctgcaaggcatctgattttttcatcaggaaatatctcctttgcgtacctcagcacaggaatgatgcccttgtgactgcatcctgaaaatatgtaaagtccgttgctttggccgctttcatctctgtctctgattatgagaaactgctcgtgatccatattgtcgggcacaaattcaccgcctgctgttttttcataaaacagctctgtgggaagacaccccgctctgtcgggaattgtacctgatataactatatcatcgcttacttttagcacgcccttggtgaatatcatacggggcagaagctcctcgtattctctgtctgtccatctgatgcctgtagtttcaggttctggctttcctttttcaaagccgtatgtttttttgaaagcgtttttgtgtatgaacaccggcgctttgtcattaagtctgcaaaatgccggagcgccgcctgtatggtcgtaatgaccgtggcttatgacgcacatatcggccgctgcaaggtctacccccattagagaggcgtttgccgcaaacatatccgatgctcccgtatcaaagagtatgtttttatctcctgtttctatatatacagaaagaccgtgctccgcactgcagggcggtctgtctgttttgttttctgcaagaaaatatatttttatcatttcgtcacctgttttttgagggccgcagtgcagccctctttaattacatgttctgtgtgagcagctttacctgcttgtcaatatctccttttttgaataccgatgagcctgccacaactatatctgtgcctgccgcaagtatttcatcaatattgtcagctcccgctcctccgtctatctctattacaaaatcgagatttctctcttttcttatattgtcaagagctctgattttatcaagagccgatggtatgaatttctgtcctccaaatcccggatttacagacattacaagcaccatatcgacatcggagagcacttcctctatcatacatacaggtgttgcagggttgattgaaactcccgccttgactccgtgcgatctgatattctgtattgtccggtgcaggtgaatgcacgcctcctgatgaactgttatgtactcggtattttcggttacaaaatcagctatgtacatatccggattttctatcatcagatgtacgtcgaatggaataccggttttgcccagcaggcttttcattaccggcgccccgaatgtaatattgggtacaaaatgtccgtccattacatcaacgtgtatcagatgcgctcccgctttttctatttcttttacctgctctgccagccttgaaaagtctgccgacagtattgacggtgcaagctttgccatttcagttctccttaatatttattctttttgtttcgtatttcttcaatctgtgttttgtaggactcataccgcatagggtgtattcttccctcttcaagagcttttttgaccatacagtctggttccttgaggtgtctgcagtcatcataaaagcaacttcctttgtatactgccatttcaggataatgcatatccagtgtgtcctcatctgcctccattatatcaaaggaggtaaagcccggagtgtcatatatcataaagtcgccaactctgaatatttcaacgtgtctggtggtatgtctgccgcgcttcgtcttgtgagaaatctcccccatctgcgcatttgcctgcggaagtatggcatttaatatgcttgatttacctactcctgacggtcccgcaaaggcggcttttttgccggaaagctttgatttaagctcatctatgccggctcctgtttctgcgcttgccataacaacaggatagagtccctcatagatttctctgatgctttcaatatcctttggctttgctatgtcgattttgttgacgcatattacaatatccgttcccttggcatctgccattacgagaaatttatctatgacagggaagttgggcttcgggtgcgccgccgccataaccacaataaatgtatctatattggcaattggaggccttatgaatacgtttttgcggggcagtatttcctctatgactcccttgcccggctctgccgtaaggcttatctcaacgtcatctcccacagcgggggttattcctctgtttttgaatatgcctctcgccttgcattcgatgacttcatcaccgcagcttacataatagaagcctgcgatgcctttaactattattcctctcatatacggctattatacctcttcatcagcaggctcatcaggctcaggctgctgaggctccggccccttgcttaccttgatacttacagatgttccctctgtaagtgaagtgccgctgttgtactgctgctctattacctgtcccgacggataatcctcgctgtagccataggtaacgctgcctactttaagtcccgcagcttctatctccgccttggccgcatcaagtgatttgcctaaaagtcccggcattgcaacctctttgacgcttctgccctttgatattactacagatacagcctgtgagctctcggcctgcgtacctgcttccgggctctgtcttattacggttccctcaggtgaatcgctttcttcctctgtaacgcttccaagtgagaagccctttgcttcaagggttgctcttgcctgatccacagtctgtccgattacgctcggtactgtttcaactcctgcgcccttgcttatgtttactctgatagtcttgccttttttgactttcatgccggactttggtgactgggaaactattttaccctcatcatattcgtcactgaacacttcattgcccatttctatttcaagtcctagttctgtaagttcttcttctgcctgttcataggtcatatcagtaaggttaggcaccttgacttcattcttgtctccgccgccaaatacaaatattgcggcaactataaggattacggccgctgccgccgccccgattataatcgggagctttttgtttgagcctttggagctgctgtgcttttcgtgttttttctccggctgcttttcaggctgcttctcgcgcctttcttcttttctttcaggcgctattgcagactctcccacaactcttgataccatctctatgttgtcaagctctctgataagctcgtctacgcttgcaaatctgttgacctgaaccttgtctgtcgcttttagaattatgttttcaagtcttggcggtatgcccgaaacatagtatgacggcggtgtcatagggtcgttcatatgcataagcgctattgcaacaggtgaatctccgtcaaacggcactctgcctgtcagcatctcgtacataactattcccagtgaatatatatcggatttggcatcgacatatccgcctcttgcctgctccggtgagaaataatggacagagcccataaccatatcgtcgctggtggtgtttttcataattgtggattctgaaatcgccttggctattccgaagtctgcaattttggcaacgccgtcctttgtcataagtatgttgtgaggcttgatatctctgtgtattatattgtttttgtgcgcaaatgaaagtcccgccgcaatctgccttgtgatattgataacctttttgtaaggcatcggagcttcctgatctatcatatcggcaagggtttctccctccacaagctccattacgatatagtgtatattgccttcctttccgacatcatatatgtttacgatgttggggtgtgaaaggcttgccgcagcctgtgattctcttctgaagttatccagcacctttacgtctttggtgtactcaggctttaatatcttgattgcaacataacggttgagaagtctgcatcttgccttatagacaatagccattcccccgtcacctattttttctattaattcatatctacctgcaagtaattttacgctcattggttcctcctaaattctcaggcagataactgtaatattatctgctccgcccgatttgtttgcttcatcgaccagcactcccgccatttctgacattgtgtaccggctgctgcttaaaatctctgttatcagaggttcttccacttctccaaacagtccgtctgtgcacagaagaataatatcgttttctctgatttcaacctgtttaaaatcaggtgaaaccgcttcctctgcgccaagcgctcttgtaatcatatggcgctgctcgtgacttactgcttcttctgctgatataattcccgcttttacaagggcattgacatatgtatggtcctctgtaatctgtgtaagagcgccgtttctgcatatgtacgctctgctgtcgcccacatgagctatgtaggcatagccgcctctgatacagcataccaccactgtcgtagccataccgctgttttcatttctacggtctgattttttgtatatttcatcgttgacctttgaaagacattctgtgaaatacgcttttatctgcaatgcagtcgcctcctctgccagagggtttgcgtgaacaaactgtgtgatttcataaactgcagtacgcgaggctatttcgccgccggagtttcctccgactccgtctgccaccacataaatattatgttcgggaataataaagcaggcatcttcgttatgacttctcacctgccctttgtgagtcttaaatcctatctgcaacatattctctccatcagttaattgttagtaactgtttttattctcctcattttgcatataaagaaaccgtctgtaccgtcaacattagggaacagctgtattctttcaagttcctcgaattcctttgatctgttaagaaaatcgtttacaattctgtcattttcgtagtgattgatagtacaggtgctgtaaagcagtattccgcccggcttgacatagtttgccgaagcttcaagtatggctctctgctttatcggcaggggtttcatttcgctgtccatattcttgtatttgatttcaggctttcggcgtatcactccaagcccggagcaaggcgcatccacaagcactctgtctgccttgcctatcatggacgagtcaactctggtcgcatcccatgttctggtctgaactattttgactcccagtcttttggcttccttatctattatatcaagcttgcgcttgtatatgtccgatgctattataaggcctttgttgtccattctctccgcaatggcaaaggtcttgcctcccggcgccgcacagacgtccataatcagatcgcctttctggggatccagcttttcgcttgtaagcattgaagcctcgtcctgcaccgagaaatatccgtgtttgtaaattacattgtttaaaagcccgctgcctttgacatgtatggcatttttgcaaagctttccctcgctggtctcaaagcccttttcgttgagcctcctgataaggtcaggcttcatagtcttgagccagttcattctgattgtaacatcaggtgtttcgttgcccgccgcaagaagctcttccacaaaatctatatcatatctttcaagccacagtctgattatccacggcgcataggaatatttaattgaaagatatctgatttcatcctctgttctgtccggcagcttaattgtatatttttctttggtataggttctgagcacgccgtttatgaagccctgtctgcccttgcagaatttcttggcaaggtttacgctctcgtttaccgccgcatattcgggcaccttgtccatatacccaagctggtatatacccattcgaagcaccaccaaatcgctggttttaacctttgccgcacctgtgggaaccagcttgtctattatgtagtcaaggagcagcttgttttcaagcactccgtagaccagctcccttacaaacgccggtgacggcggattgcatacgatgatgtgatggttaagcgaaagatttgaaaaggatttcttggtttcgatatccatcagtgtgtagtacgccgtttttctgttgatatccatcagtcacgcccccttatcagtaacagtcttatcagctgcatcagcgccgccgcaagggctgcaagatatgtcatagctgccgctgaaagtacttttttagcagagcgcttttcttccggatacacgatgcccagcgactcaagctgaaccagcgcccgcctgcttgcattaagttctacaggaagtgtaactgcatgaaacgcaaccaccgctgcaaacagcacaattcctatggtaaatatgaggttcccctcataaatcctgcctgtctgttcgataataattccgacgattattgccggccatgccagctttgaggatatattgacaacaggtattatcgcgcctctgactttaataggcacatagccttgcgcatgctgcagcgcgtgtcccacctcgtgagccgcaactgcaaccgaagctatggagt

SEQ ID NO: 3694 - DNA, 2344 bp, Unknown
  16S sequences of unknown bacteria
tggaagccccatcaaataagctgctaaccacagcatttgaagcgagtcttgagtctgtcgcggcaacgctgcaggctaagcgtagacagcaaggtaacagggatagctagtgagcgccgaaatccaaaaagaaccagaaggctgacatcgtggtctggatggaaggcaacatatgtacttatcgctatggtgagattttacatacctctgcggcgttggtgggaactattcatgttacacagggaatatatatcaactggagagaacctgcattttctttctgaagtgtgtaaacaggaagtatgcctgacaatcaaaagaaggatggcaaaggaaatgcaggtagtcggaggcccgagtagtaccgatgatggcaggaacaaaataaataccggagggaagtcgagagagagagctgttcctcacagctttggcctgcgaaactatatcaaagaggaaacattagctatacacagagatagaggaactaatggaaacgaaattggcgagaatatcacaattatcaaaagaaaatccagacatggtatttcacatctttgggacatctgataaatcaggaaatgctgaaaagctgccatacccagatggatggaacaaaggccgtaggaattgatggaatcaccaaagaagaatacggaagaaatctggaagagaatctgaacgctcttgtagaacgattaaagaggaaatcctataagccgaaaccggcaagactggtagaaataccgaaggataacggaaagctgcgtccgctcagcatctactgttatgaagataagctggtgcaggaagcactgcgcagaatactggaagcagtgtttgaaccgatattttacgatgaaatgatggggttccggccgaacaggggatgccataaagcaatccgcaaactaaatatcatgttggaaagaaaaccaacaaactatgtactggatgcggacattaaaggattcttccagcatctcgagcatgaatggattatgcgttttatagaatcaaagatcaaagacccgaatatcctccgccttgtcagaagaatgttgaaagcagggattatgaacaactatgagtttgaagaaacagaagaaggaagcggacagggttctgtctgttcacctgtaatctcctgcgtttacatgcattatgtcctggtctggtggttcaaagaagtgattacatcgaaattgaaaggttatgcaggtatggtagtttatgcggatgattttgtagtaacattccaatatgaatcagatgcagaatggttctatgaacacttgaaacatagaatggaatactttggattaagccttgaggaagaaaagagtcgtctgatagagtttgggcgctatgcgaaagcaagatgccagaaactcggaaagaaaccagagacctttacttttctgggttttacacactactgttcccagagcaggaatggcagattcagggtaaagaggaaaaccagtaagaagaaatttgcaaagaaatgcagagagataaatctgctgttagcgagaatgaggacacacagtctgaaggagattataacaaaactcaatcagatactgactggttattaccattactacggaatcactgacaattcaaagagtataacggcattccgatataatgttatgaaaagcctgttttactgtctgaaccggagaagccagaagaaaagctataactggataagttttctcaatatgacgaataacagctatccgctggtaagacctcggatctatgtcagcgtatacgaatgataacgtgaacaattcgtttcgcaaagaaccggatgcggaaaagccgcacgtccggattctgtgaggggcgcacgaccgtaaggggtgcgtctactcgacccaatgacccagaactgtctgcaacaatggcatatcctgcggggttgtcaagttttttgtgtaagttttgaaaaaatattttggggagggaaacctccccattcttatgctgagatactttctggagttaattcattaaagcgttctttaaaagttcttccatctcatcgttcaattctcgtgcttcttgataagcagcaatcaggcgctcatatgcttcgctgagcaggccagcctctccatcctgatcagctgcgtccagcatcctgaaacgatggtctatattttcccatttttcatgaagggacattctcagaatcctccattctcgtatttgcgaatccgttcctggattttttcatccatatccagctgatttcggacaagtgcccagttgctttgcaaattccggctcatctgaccacgcattccgctaagagctgatcagtctttcc

SEQ ID NO: 3695 - DNA, 2819 bp, Unknown
  16S sequences of unknown bacteria
gttaaacgaacccagctgctggccgctgaggacatggaagtgcagatgatgcaccgtctgccccgcgagctggccgcagttcgtcacaacacggaagccatcggcaaagcccatctcctgggcaagcttcgcgatgacggcataaatgtgcccgatgagcgccgcattctcctccgtgacctccgctgcggaagccaggtgctgcttcgggatcaccaggaaatgcgtctttgccaggggggcaatgtcgtaaaacgcgtagcacaattcatcctcgtagacctttttcgagggaatctccccggcaataatcttacaaaacaggcaatcgttcatactgttcgctccttttctttcgtcttccgcttactgcaggtgcactgcgacaaaatcgtccacacaggccagggcgtcgtcgagcttcaaagcgtccttgccgccgcccatggcggaatcgggcttgccgccgccggagccgccgcagatcgcacagacctgcttgaccagctgccccgccttgatgccgcctgccacggcgttcttaccgcagacagccaggatggagatcttctcatcattcacaccggccaggaccgcgacgatcttcgggtccttatcccgcagcatatcgccgaatttccgcagatcgggcacgctcatgccgttgcggaccgccgtcaccacatgcaggccgccgacgttcttcgccccgaccataaactggccgatctcgcctgcgatggcgcggtccttcatcgtctcgatctgatcgcgcagctgcttgatctcgatgaccgccgcttctgccttgtgcagcagctccttggggttggagatcttcaaaatctccgacgcccggcggatggtgttttcaaagctatgcagctgacccaggacggctttgccggtgatggcttcgatccggcgcacaccggaggccacagagccctcggagacaatgcggaacatgccgaccttcgccgtattatccacatgggtgccgccgcagaattccagcgacgcatcgcccattttgacgacccggacaatatcgccgtacttttcgccgaacagcgccgtcgcgcccagcttctttgcctcgtcgacgggcaactccatcgtctcgacgtccaggccgtcgaggatcagctccacgacccggtcgttaatccgctccagctcctccggcgtgaccgcggcgaagtgggtaaagtcaaagcgcagccggtccggctcgaccagggagcccgcctggtggcagtggtcgcccaggacgctctccagcgccgcctgcagcaggtgggtcgccgagtggccgcggcagatggcctggcggcgcttttcgtcgatggccgcaacgacagtgtcgtcgaccttgatctccccggcacgcatcacgccgtggtgcagatatttgccgcccttatccttctggacatccgtcacttcaaagacgctgctgcctaggctgatcgtgccatggtccgccgtctggccgcccatttccgcgtaaaacggcgtctgatccaaaacgagaatgcccgtctcgccgccggcgatggcgccggtgatctcctcgcctacgcagatgcccaggaccttggcctccgatgctttctccgtgtagccggtgaattccgtcggcgtgttgtccaggccgaaatcaattccggcccaggccaggtcgcctagggccttccgggcctgccgtgcccgctccttctgctcctgcatcagcttggcaaaggcatcctgatcgacggtcatgcccgcgtcctgggccatctcgatggtcaggtcgatggggaagccgtaggtatcatagagcttgaatgcgtcagcaccggagaacacctgctcgccgcgctgcttgtgctcttcgagcatctggctgtagacgcccatgccgccgtcgatggtcttggcaaaggtctcttcctctagccggacccagcgggtgatatagtccgcccgctcccgcaggtaggtatagtggctctcgttctcccggatgactgtctccaccaggcgataaaggaacgggtcattcacgcccagcagcttaccgtggcgggcagcccggcgcagcaggcggcgcagaacatagccgcgtccctcgttcgtcggcgtcacaccgtcggcgatcataaagacagaggcgcggatatggtcggtaatgacacggagggagacatccatcttatggctgatgccatagctggcgccggtgatctccgtgacctttttcgtgatgttcataacggtatcgacatcgaacagggagtcgacatcctgacagacgaccgccagacgctccaggcccatgcccgtgtcgatgttcttctgggagagctcggtgtaattgccgtggccatcgttatcaaactgggaaaatacgttgttccagacctccatataacggtcgcagtcgcagccgacggtgcagtccggcttgccgcagccatacttctcgcctcggtcgtaatagacctcgctgcaggggccgcaggggcctgcgccgtgctcccagaagttatcctccttgccaaagcggaagatccgctctgcggggatgcccatgtccttgttccagatctcaaaggcttcgtcgtcatccagataaatggagggatagagccgctgcgggtccagcccgcagacatccgtcaggaattcccagcaccaggcgatggcttccttcttgaaataatcgccgaaggagaagttgcccagcatctcaaaatacgtgccgtggcgggccgtcttgccgatattttcgatgtcccccgtccggatgcacttctggcaggtgcagatcc

SEQ ID NO: 3696 - DNA, 10914 bp, Unknown
  16S sequences of unknown bacteria
gactaaatgtggaaggagaaattcgttataccacagggcagttacaagctccgacatctaaggccttagccgaaggtcggagtagttgacgaaaaactgaaaaaacagccgaaaacaaaatattaaaagttatacgacagtgcttgaagctgtgcttttcgggctgtatttaaggtttacggcattgtatttaaataattttagtgatagaattagtaacataaataataaggccaatatatccggaggaaatatgaaacagtacgatattaaagatatttcacttgcaccgtcagggcatcagaagattgaatgggtaagaaacaatatgcctctgctcagaggacttgaagatgagttttccaaaacaaaaccgtttgagaatgtcagaatctctctgtccgtacatcttgaggcaaagacagcttatctgtgtctggtgctggcggcaggcggagcggagatgtccgtaacaggcagtaatgcgctgtctacacaagatgatgttgccgcagctcttgccgacagaggtctcagagtctatgctcaccacggagcctcagagcagcagtatatggatgatatagagatgtgtcttgagatcaaaccccacattatcattgatgacggcggtgatcttgtgggtatgatacacgaaaaaagacctgatcttggtgaagctgtatggggaggctgtgaagaaaccacgacgggagttatcagacttaaagccatggagagagagggagtgcttaaatttcctatggttgcagtaaacgatgccgacagcaagcatctgtttgacaacaggtacgggacagggcagtctgtatgggacagcattatgcgaaataccaacctcataatcgccgccaagactgtagtggttgcaggttacggctggtgctcacgaggaatagcgatgagagcaaaggctctcggagctaaggttatcgttacggaaatcaatcctgtcaaggctattgaggccagaatggacggctttgatgttatgaaaatggagcaggcggcgcctctcggagatatattcgtatcggctacaggctgctgcaagaccataacggtagagcatatgctcacaatgaaagagggcgcaatccttaccaatgcaggtcacttcaactgtgaaattgatatggcggctcttgaagaggctgcagtcagcaaaaaagaaaccagaaaaaatataatgggctatgagcttgcaaacggcagatgggtaaatgtcatcgcagagggcagacttgtcaacattgcggcggcagacggacaccccgcggaggttatggatatgagctttgcggtgcaggctctttcggcaatgtatattaaggacaactacagacagctcgaaaacaaagtaatagatgtttccgaggagatagacgatatagtttcaagaagaaagcttgcagcgtggggagttgagatagatgagcttaccgatgagcagaaatcctatcttaacagctggcaggtttaaaaggaggtatttatgtacacagcggatgaactcaaaagagtaaaggcggccattgaggtcaatgtcagaaaagcaatggatgaatacgaagcagaaaacgactgcgcaggaatgtatcaggaccctattatagtttatcacgatgccaaggatccggctttcgatacatttttcagaatgggaatatgcaggcaccctgcggagatttacaggccgggaaacacactggtactgtttttccttccatacagagaagatatagttgagagcaacaaaggcggcacagctacttctgatcagtggcttacagcatacaaaaaaggcacagggctgattatgagaataaacagagctatcagaaacaccctcgaaagcaggggcagactggtatcctgtctgaatactcctattgactggaacgaaaagaaggctgcggaggaatggtcattcaagcttgcatcatatcttgcaggcatgggagagttttcaacagcaggctcgtttgtgacagccaagggctttggcggcagattttccggtatcataaccgatgaggtgctttatgaggaaaagcctcagacgcgtactccggaagaatatgaggctatgatagcagacatcaaaaaagcaacgttttatgaaggcgcaccgtcagaggagtgcattgcagtctgtccttgcagagcaatttcaaaggacggaattgacagatttaaatgtcagcagcactgcaggacactgaatgaatatgtaccgtcggcagatgcatgcggtaagtgtttcttcacggcgaaataaattaagtgttttgatttatggtaacaaattaaatgtattaatcatatgctatactaaacattttaaaaaagcaggtgattaaatgtcaaataattgcggcctattaggcggagaaggtgtagatactagcttactgttcttcttcctcttattagtgattattttctgtaattgctacgggaattagatatctgtacctataagtttaggaggactctttttttaagggtcctttttagtgtgaataaagaatatataaatattttctttacctctgaattctgatataatcggggcatacggaggtgaaaaatgaaaaggatattaaatatattattatgctcagtattgtgcatggcgctgctttcgggacaggcctttgctgcaggcgctgtgaaagctccggggcagataacggtaaaggttacagcggacaaaaatgttactgtaagctggagcaagacatcaggagttaaaggctacaaggtgtatcgcgcatacagcggctctaagctgtacagctgcattaagacaataagctctaaatctactgtaaaatatacagacaagaccgtaaaacctggcaggaagtattcatataaggtcagagcctacaaggtcgtaaacggcaggaatacatacagtaaatttacaaagattaaaacggtatatgtaaagcctgaaagctggaataccggcagacttgaaaaggacattgtctcataccttgagggcaaaggctacaatgttgtacttacggactacagtgataaatggtgcagagaccattccctatattatgcatcagtcgtagaaccggcatgggactataaggaggtgcttaaggaagttaaaggagatgctctgaggtatgcatcatctctggaaaacagctatggcaaaaccgatgcgggtttatactacgatgtcagcacaaacaaaaaactgaaagataatgttttttcgataggacttaaattctggaagaataacggttatgtcaaagtctttgttacagatgaaagtaaaatagatgaggacagcctgcttctgacagaggaggaaattcagcaatacagaatgaaagtgctggagcttgtaaatgccgaaagagcaaagcttgaggaagagcctcttgtgctcgatgagaagctttgcaatatggcgcaggctaaggccagggagatggcagagcttaactatttcagccacatatcacctacctacggtgacattatcagtatactgagaatttttgatattacctacagaaaagcaggagaaaacataggcaagtgctatgaaacagccgaagatgtaatggcaggctggatgaactcacagggacaccgcgataatatacagacacccggatataccagaatcggtatcggagtctatgcggacaaagaaacaggaactaaatactgggtacaggaatttatagagtagattaaaatcggcattttcagtgcgaaaaaagactggaaatgccggtttttgactatattctgatatccgcctcaaataattttacggttataattactattgaaaatcaaggggaacaaaagggggataaccgtatgatgaggaaaaaacggctacgtaagcgtcttgcttttggtatgcttatcgctatgctgactgctatgcttccggcagcagtatgggcagaggtcggaagtgatatgccggaagatgccgcagggcagcagagtcagaagcagatagtgcagacaggggaaagccgaggaagtcttgaagatgacggggtggaagtaagcaagactattattgctgcaggcagtgaaaatgtatttgatataaacctgcaggtaaagacaactcaggatgtcagtgagatttatgatactcccgatgctgcggttgtcatggtaatggacatatcaaatactatgaacgaaaaatttccgcagggcagcagcaccagcagatacgatgcggcaatagcatctgccgaggacttcatagagcagtttcagcacagatccgaaaattccggagcagagaggaaaataggctatgtggcgttcaatacagacgcccacagaatttcagagatgacagagtgcaaaaccgcagcgcaggcagcctcacttaaaaatgcaataaaacagaggacgtgggaaataatagatagtgatgaatacaaagacagccacagcagatttaccaatatagaagcaggaattaaaatgggcgctgatattctcggagatgtttcggcagagaataaatatatgatatttttaagcgacggctttcctacaacatatataagcggtggatacaacggatacgatccttactgcaccgagggtgatataggagccgacggcgtgttttacgacagtgtggcagaaaaatactgccaatacggaacaagctacagcaataaggcggcagtcagagctagagacgccgcagcgtcagcaaagagtgccggaattaaaatatttgcaataggaatagatgtcggaggacagacgatacaggaatatatagataaggtgaacaacaaattctcggtagttgacagggaaagtgaaaattatgaacttggctctgcgacttcttcggatgcctttaaaaactggctcagaaacagtatagggtcaggctactattatgacagcagtaataccgaggggcttcaaagcgcctatgatgcgatttttgaggaaatcagaagcgagcttgaaaaaaaggtaataggcaaatgggtcgcggaagatccgatgccgggaggcgctgacggatatatccgctttatatctttctttgacagcagaggaaagctttcgagaagcaggcttgcaggcgagtggcggcagggcgcagagaacacagcagtctatgcggacggaaaaataagctgggatcttaaaaaatccggatatatattagaaaaagaaaacgacaaatccgtatatacctacagcttaaaataccgcgtaagacttgctaatgaaaaggataatttcacaaaagaaaaaccgtatgaaaccaacggcaccacaacacttaaatatgtgatttccgtaaacggtcagaccggagatgacaggacgatggagttccctgtgcctgaggtaaaaggctatctgggaaagcttgattttgacaaggttgactcggttaacagactgcctgtaaacggcgcggagtttaaattaaagcacgcagatgatttatgcgcaggcggtgacagcgcgacctgcagccttgaagctgtgacaatgcaggatactgctgctgcttcggacagtaacggcagggtgaaatttgatgtaatcgcttctggacatatatacagaatatatgaaacaaaagctgggccgggatatacacctgtggcagcagaagggcttgaaatcggaaccgttatagtttcctacggacagacgaaattcataccaaaggatgcaaaggatcctgtagataaatttattatggaaaacactgcggaaaccggcagccttgtattggaaaaacaggtggagacagacgaggagcaggggctgtataacccgggaaatcagaagacctacgactttaccatcaaaggaccggtaagagctttcggagaatacgaggcagtaagaagctgcggtgataatcaggacggaatcgccgaaaaagtaatatttgataatgacaatacggcgcgaataactctcaaagacagagagagaataaagatttcaggaataccggttacagcggcaggagaggtctatacggtaattgaaacaaatgctgcgagcacagcaagactcataatgctgactccggaatttaaaaacggagaaagcagtaccgtaaacacatctgtaaatgcgcaggtagagaaaaattcggaaacaaagcttatctgcattaaccgctttacaaagccgggcgaagcagagtgcatacccgatattgtgataaacaagagggttgagggagaggaaatctcggcgggaagcgctgacagctttaagttcacaatgaaagccttaggctacagcctgcctgacggcgggcttgcagaggaggctcttacccccgaaaccatgccgacactgggagaatttactgtaagcagcagcgaaatcggtgataacaaaagagttacaaaggacacatataaatatactcaggcgggaacctactactacaaaataacggaaacagcagcaggcagaggctacagcccggcaacctccggctactatatcaaggatacggttacagcaggagataaagaggacggatacagcctgcactacaaccgcagcatatacagaacagacgcattgcagagcgcaaacagcggcatcagcaatctggatgaagtattcggctccggagcagagcttaacacagagggagcggagtacggcaatgatggagtgctccagtttataaatatattcacagcgccgagaagtctgacggtgcaaaagaccgtaggaggcaatgcctacagcactgactgtgactttgagttcacagtttactttgacagctttgaaccgggaacggtaatcaaaggaacacttatcaaaagaaatggtgagacggagaatattgaaaaaacagtgacagctgcagcggagggagataaagaaaagccgggcggaagcataagctttacactcaaggcttatgaggcagtgacatttgacgctctgccgcgagacacgaaatactcaattaaggaaaaaccggtcgcaggttacagtacagaagcctcccgcaacggacagaaaacagaaatcagagataatgaggttacaggcgaaatcacagccggaagcggtgaaacagtagtatttaaaaacagtcgctccgaatatgtttatacaggatgcagccttaatataacgaagaaggttacaggcatagacaacagcgacaaaagcagggagcttatgaaaaactactatgcagttgtaaactgcggtgacaaagatattatactcaccggctttaaatggaacggcagctgctggcagagcagcacctatacagtcacaagctatgtgaatatggactacgatgtgaaagagccggtaccgcctcaggctgagggctatacctttaaggaaaccgtaatagcaggcggtgataacggcgtaggaggaggcgctgcaaaacccggagaaacagattttgtgacagtcataaacgactatgagcagataaaggatattccgccggaggaacctgaagaccctcaggaaccggataatcctgcaatcccaaacaagccggataaaccggactctgaaaaaccggataaacctgtctatgactcaaaggtcgttaaaacaggagatgaaagcggtattgcagtcagggctggaatattcggagtctcggctctgcttcttgcaggagcggcagtatttaccgcaaggagaaaaccacgcagaaaagatatgtaagacaaacaaaaaagggcgttaagcccttttttctatactcctgcaaagctttgcaagcagcagctctgtttcatataccttgtcctcattacagagcagcagcagattgtcatcagccataagaaccgtagcgccgtcgggaacaatttcatcacccctgcggtttaccgctataacaaggcagcctttaggcgtgccgagtttttcaagcctgctgccgtccattgcagagccgaactgcacgcagctttcaatcataattttgttgtgtcctctgcttttctttgaagcgccgcccagcagactgtcaagaagctgctcatatacaggctgtgatttcataatgtcagaaaccgtatacgatacaagacatatcagagtcagtgacagcagatgcgacagacttcccgtcatctccgatatgagaattatacctgtaacaggtgactttacaatcgcagagaaatatcctgccatacccaggattatgaaattatcaagatacatatcatagcccagggccttggcaaaaatggcccctgtaattgaacccagcaccagcagaggcaggaatataccgcccggagttcccgagccgaagcttatcatcgaaaaaacatacttcaccgcaagcagcagtaaaagcgcggaaattgtaaagctgttttccgaaagactgtccacaagactgcttccgcctcccagcacataaggatatgtatagcagagtaccgcagtgcagacaattggaacaagtaccttaatccatgtgaacttaagaagcgaataggctttctgtatatacctgatgccgatgttgtaaagcgcgccgcatattccgagaacaattcccagaatgagaataagccagtagtgctttagcggcagaatatattcgggatttatcgaaaatacaggtgaaaatccgaagatgtatgccgacacaaaatccgagcatatggcagctgacattgaagccagcagcacctcgacagaaaggtttttgtgtatctcttcaagcgaaaaaacaacacccgcaagaggcgcattgaatgcggcggcaaggcctgctccgcttcccgccgttataaggaggcgttcctctgttctcagcctgcctgtaagacgtgaaaagcctttgcctgccatagcgcctatctgaacgctggggccctctctgccgacagaaaaccctatgcctatcgcggcgaccccgcctgcaatctttgcggcgataactctccaccagcaggtctgaagctgtccggcaagctctgcctttacctgagggataccgcttccgcaggcgtttttttcaaacctgatgcaaagataaataatgatgcctgcaaagataaaaggcaggagtgttaaaagggaaatatcctgattaatgaatatatttctcagagcctcagccctctctataaagagcctgaaaaacgataccgctatacctgccagaaatcctacggcaacaccctccagcactataatatatttaaaactttttattctttttaaaaccgactctgtttccatacgctatctacctcttttttaatctattgtaatatgttatcataatatcatcgctatgacaaaatattttaatttcgaggtgaacaatatgaagaaaatcgaaatgtatgtaaatacacctgccaaaggtaagctgccggagcagtttaacgatgaaaactacaaaaaagtgcaggaataccacaaaagccttgcggtatatgagccgacgccacttgtcagtcttgatgctctggcagaggagctgggagtaaaggcagtgtatctcaaggacgaatccaaacgcttcggacttaacgcattcaaggctcttggcgcgtcatatgctgtaggcaatatcctcaaaaatatggaccctgacaaaacgcctgtatttgttacggcaaccgacggcaatcacggcagagcggtagcgtgggcagcagcgcaggcaggctacaaatcagtcgtatttatgccaaagggcacagcgcagtgcagagtggatgcaattcatcaggtgtcagatgcggaggttacggtaacagatcttaactatgatgacgcagtcagatttgcgactgcatatgcaaaggagcataacggctatctggtgcaggacacaggctttgagggctatgaggaaatcccgtgggatattacgctgggctatacccatatggcggcagaggctgcagaccagcttggcggcataacaccgactcacgtattcctgcaggcaggcgtaggctctatggccggtggcgttctgggatatctgacagacagatacggaagcggcagcttcaaaacctcaattatggaggcctatgatgcagcctgcatatttgactccgtaaaacagggagggcttgttgcttcaggcggaaatccggaaaccataatggcgggactaaactgcggagaggccaatatattcactttccctgtattaaaggactttgcggagtttttcttcaagctgcctgattgtgttacagaggaaggcatgaggaaactttcagaagccggagtggttgcaggcgaatgcggagctgtaggcacaggacttctgatgaacctttgcggcaaagaggaatttgcagagatgaggaaacagatgggacttgatgagaattccgttgtgcttctgttcagcacagagggcaacacagatcccgacagctatgagaggattgtaaagggccaggcagcggacagctgtggagttagatagaagctggagtaagtaaattacctgaataaggtacattgcttaggagatttaacgtgatatatcttagtatatattatcttagactattaaaacaactgaattaaggtgtttgacaggcaattcacttttaaggtggactgcctgtttttattgtctttaaaggctggagcaggaggggaagatgccttggggattaaatgactgtgagaaaggatgtaaaaaagataataaatgaagtgcgttttcgcctaaaatgtaaaaataaagcattataagttaaaaaatagaaaatatatattgacatactatgttcgcactggtaatatatagctacagcggtacagttaaattattgcataaatacatttatcaaggaattagagagaacaggataa

SEQ ID NO: 3697 - DNA, 2484 bp, Unknown
  16S sequences of unknown bacteria
acgcgatacactacaaagttaaagaaaaccatcagtatgtaaccaaagccgcctagcatggagcgaaacaacactgaagcatttggcgccgatacttgcagccggcaagctgactttaaaccgcaaatctaccgataacgaacagcctgtctccctaagaaaagccgcaatcaaaaaggcggcgagcgaaaccgcggcaggttcgagtcctgtcacactaccgttgattcactattggcattctcaaaaaattttcctgcaaaaacttgacacgaaccaatttttttatacatttgactaatcagaggttatatgttataatttcggtatggaaaagcttaattttattattgcaaaaaatttatcggagctgcggcgaaaaaacaagcttacccagcttgaggtcgccgaaaagctcaattattccgacaaagcggtttctaaatgggaacagggtgaatctctgccgggcatagaggtgctctataagcttgccaagctttacggcgtgagtatggattatattgtaggtgaaaaagaggtaaaaccggcgcgtgcggcattcggcggactgacccaaaaaagaaaacgcataataacgcttctatctgttctgggcgtgtggctttttgcaaccgtgttttacatatttttcaatatcttcgcgcatgccaatttgtggacgctgttctgttgggcggtgcccgcgtcctttgtggtttccatagtgtttgacgcggtttggcacaagcgcagattcctttttcttattatttccgcatttatatggtcgctgctgctttgcttctgcctgcaattcgtaaattataatatatggctgatattaggcataggcataccgctgcagctggcagtgctgctcagcgcatggcttgtgaaggcgtcacccaaggaggcggaagatgataaagctcggtaacgactgggacaatattcttgcggacgaatggtcgaagccctattacaggcagctgcacgattttcttaaatcggaatattcaaaaactcggatataccccgatatgtatgatatcttcaacgcgctcaggtatacatcctttgagaatacccatgccgttataatagggcaagacccataccacggcccgggtcaggcgcacgggctttgcttttcggttaaaaagggagttccgctgccgccctcactcgttaatatatataaggaaataaccgatgatttgggtgttgcaatgccgcagcacggcgagcttacgggctgggcaaggcagggagtgctgctgctcaatacggtgctgacggttcgcgcggggcagcccaacagccataaggataagggctgggaaatatttaccgacagggtaatttcggagcttgaccgcaaggaaacaccggtcgtttttctgctttggggcgccaatgccgagaagaaggcgcgcgtgataaccaatcctatacataaaaagctgattaccgtccatccgagtccgctttcggcttaccgcggctttttcggctgccgccatttttcaaaggcgaatataatactttcggaaagcgggcaggagccgatcaaatgggatgagctttaattttcggtatctttaccgaaaacggtacagtataaaacggggctgtcgcaagagcgaaagaatcgcgagcggcagcccataatgtttgtaaactgttaaaacgtcgaaaacttttttagtttttctgcaaaaacatacagagggaaaggcagttcatcgtcgatacagcgctccacaccgtccaacttctcataatgagaattatcccgtctgaaaatgacagattcgtgtttgtttttttgatttcgccttccttgatgagccgctgtttctctactcggatacgctccagcagagtctctgcaggcttgtcagacgggccttggggtagggctgaagctacagaaagcactgaaaagcgggcagtatcagagctgcatatttacaacggtttgtgaaaggtatcagcatttgcaaaaaagatgagagagaaaataacggaggatgcacagaaccgcatatcagccatattttagccgcaaggctgtcttcccgaccgttagcacggagcgaaacaacactaaagcatttggcgccgatacttgcagccggtagcctgactttaaaccgcaaatctaccgataacgagcagcctgtctccctaagaaaagccgcagcgagagcgagcaaggcttttctcaggaagacagaagggctgccgagtcccaatgctatcggcacgttacaaaaaaacgggaaagtcacatctttacaaaaagttatcaaactttagtgtgacaggactcgaacccattctgcaagcctgttatggtacaatagataggtaacaaaaaaaagaagaaaattcatctcaaatatggtatgatgttaataactacaaaaacaaagtaccataagaggtgaattttctatgacaagtataacatcaaaa

SEQ ID NO: 3698 - DNA, 15001 bp, Unknown
  16S sequences of unknown bacteria
ttggaaagtgtcaatccaaataccgcactttctcggtcaaatatattgtatcagggaggtgagactatggcaacaaaatcggatctgtatgcgggcttaacgaacgcataccgtacgcggtactacatcgtgtttcaggagatcggtctttgcgacgacgaggaaatgggcacgttcctgttcagcgtcgacgggtattaccggcgcacgaagcagcgcgacgcggattatgagcgtaggttccggaaacgtaaagacgtggacgggcagcgcattccggtagggacgtacatcagagaatacgtcgattgatccaacaggcgtaaccgagcgcaatgagaatagaggcgaggaaaccgtgcggtacttgcaagtgtaagagcggccgctcaccgtaaaaggatcgcacgggacggaatgtccgaaagagtaagcgcccgttaccatatctacaatttcatattttatttaatcgcttggctaacggcaacacgggcagaaaacgctgcgctaacggcgatacgggcaaatttatcaaaaagcaggaggcttatatagtggcaaacagcaagtacaacaaacgccgttggtcggtgccttccaagagggcgaaaggatatgccgcagaccgtaaggcaaaagtgcatacctacggtccgaaagaaggcaaggaactgacggattttgaagcgggtatccggtcggggtatctgcaagcgcaaagcgatcacgccggaatgtacaagtacaagaaggcgctcgatgaaggcaagtccaagaaagaggcccgcgagatctcgcagaccaaaggcaggaaataataaaaattacggaggaatcaaaggaaaatggaaaacaagaacaacgaaaagcagctttatgtgcagaaggaaccgttcgaatataacggcaaaacttacaaccattactatatcaagggtgttgtgcgtggcagagaggtaaagatcgacctcgccccgcccaacaaggacaccgacatgggtggctacacggtgcttgacatcgtattcggcgacgcagacagggctgacctcatcattgagccgttcgagatcacggacgacaagaccaaacaggtcatccgcggcaatcgttactttgtccgcacggtggacgaggacggcagggtatatgaatgccccgtgaagccttcgcgcacgtcggacaggtctatgcttcagatgctgctcgcggaataacggcggcataggcacattcgggaacagggcttgcaaggaaaattgcaagcctcctattcctaaaccactgatttttttgggaggtaaaacatgaacaatgattataaaggcggttcgtggtcggaacgcttcagctggataattaccatcgttgcgatggtgcttgtggctatcctttccatcggtctcctctgcgcgctgtttattcagccgaaggacgataagcaggaagatacggaacaaacggctgtcaatgagcaggcgactgtcatggacggcgaaggcaacgccatggtgagcggcaagacgtacgccatgccgcagagaatggtctttgccgtgactgcggctgaggcagttactgcaagcgagggcatcacgctcacagcaacggtgtcgcccgaaacggcggacaatatctctacgcaaggaaggcattttgcgatgcggcgagcaaagtcgcaaacgaggatatgtcctctgtggacgaacggtttacgatagattttagcgaatccaatttcagggaacggatggcgcttgaacggcatcttgcaaataaagagaaacccgctccaaacgtgctgcctgggtatgtgccggaacttttggacgagttttcggcgcggatgtggagcgatgtgctgcgcgaatacggctggacggaaagcgatatgccgcgggcgatcgcggagcatcttgaagatcctgccttgcagaaagcggcaaaggaatttttgtcgcatgaaacggaaaaggaagacggcacgccgctctacgaagagaatgtgggcatgatgaactctgtcaaagagatcgactacgaagcggaagtcatcaagtccgtcaataccgagttcgaggtgtataaggcagacatattatcccgttcgcccgaagatattttctatgagaactacaaaatgcacgtcatgaccgaactcaaagaggtgatcgaagagggagtacaagacgggtattgggaggaggaacactacaaggcgctctatgaggagcgcggcagtattcttacggcactttacgatgatttcatcggcgatgagtatgcaagcgtcaacagttacggcgaaacggcagagtttatcaagaactattgcgagcagtatcatcagagtgccatgtatgcagacgcgccgctgtatctgaaaacggcgagatatgcgcgcgaacacggagaatcagagcaatatcaccgttcacatgagttgaacgcgacctgccgagaggagatggataaagccatttccgagaacttcgacgggatgcacttaaaagagggctttgagcgggaactcatggagcggtacgggcgtgagcgggtggagtatattctcgccacgaccgtaaaagagaatgcttgggacggtcgatacagccgtgaaaacagggaatgggcagaaagtattcccgtttccgaaagcgaaagtgaacgcatcgcttgctgcttgcattcgcatccggcggtgatcgacggcctgatccgccgtataaggcgcaatgaacatgaaaagcaaccgaaaaaggaggaagaagatttggcggagagcaaatatctcaaagaaacggcgcgaggctacaaggtcgtaagcatcgcgcaggataaaacgggcaggaatgtcgctgtcgtgcagcggaagaacgattttaccgtcgccgtcggctacgatacgacggacggaacgtgggcgcagggcgtgtatgatttcaaggacgaaaaggcggcgaacgagtaccgcgaaaaatattacggaaaggacgtcgaaccgcctgaaaaatggtatgaggtgttcgtatcgcgggacgcgctcatcaagacgtatgaaaaatcctcgctcatgcggatgccgtctacaaaccgcgaatacgcggactatacctatttcatctacaacaaccgcatcaaggaaagccgtcagcttgtggatatgcagtcggattcgagggagctttgctacaaaattcttctttcggaaggcgaagtcgtacaccttcgcaaccgcgacggcgacgaggcggaactttcggcagaggagttttccgaactggtcaattataccgcggacgaggactatgtgcgcgaggaaaagccgcgcgttgcggtgcatatcccgcaggcggcaatgatcaggagttacgaaaaggcatcgctcttccgcgcgccgaacggcacggactttgcggggtacagctactatcttcccaattcggtgctgcacgaaagtgccgatggaagcaacgcggcggaagcgcggcttgcggaggacttcacggtcaggatgcgcaagggcgaggaagaggttgagcttacggcaaaggagttttccgaacttgtcgggaagacgacggcggaggactacaagcgcgaaccgaccgccttggacgaataccgcgagcagcaggcggagaaggaacaatgggcagagatcgccgtgagcgaacaggcagtcattgccaactacgaaaagagtacgctctttaagatgccgaagggcaagtttgtgggaatggtgtactacattccgagcggcatggtgcgaagggacgaaaacggtatccgtctgcgcctgcccgaagatttcgaggtgcatttgaaagacaagagcgcggacgagaatatcgacctttcacccgcagagctggaaagcgagcttgcggggaaaacggacgaggactacgaaagcatctaccgccgaccgagtgaggaagcgaggaagaagtttgaacaggtggagaaaaatttgcgcgatagcctgcccgatgaaatgaagaataagcccaactgggtggtcgtgcgcacgcgcgagaacaaggaaacgggcaggctggacaaattcctcatcgacgtacatacgggcaagtttgccgagagcaatgagcccaaaacgtggacggacttcgacgcggcgtgcaagtacgcaaaagaacacggcggcgtagcgcttgcctatgcgctggacggcgcggacggcatcgcctgcatcgacctcgaccactgtatcggggaggacggcaagcgttccgcgctcgcggacgaagtgcttgcaaagtgcggcaagacgtattcggaacaatcggtcagcggcaggggcatccatgtattcggcaaaacgaagggaacagatattcgctcattctccaaagacggggatatggaatactaccaagacaggcacttcattacgatgacgggcgacggggcagggtattcccgccttgaaagttttgatacgcccgaaatgcagagcctgctcgaacgcaagttagagaggcggacggagtggaagaatgtggggaaaggcgaagcggggctttcgcagatggacgatcgcgaacttctcgaaaaggcgttttcggcaaagaacggcgatacggtcaggcggctgtatcacggcgaagacctcaggcacaaccattccaacagcgatatgtcgctcatgaactatctcgcgttttacagcggcgggaatgtggagcagatgacgcgcatcttcgcaacgagcggacttttccgacccgacaagcccgcaagctactacgaatacacggcgatcaaagcggcgaaagacacgccgcactatacgccgccgaaagcgagcagttccgcgccgaaatctgcaaacagcgggaacagcaaataaataagcggctgccattcggcagccgcaaggggaaggaaaaacagcagaattcagatttgcataattacgattatgcagataggcctcaatctttcagacagccgatgggaatgacaaacacaccgtctggacgcctgtatccgtattccgttcccgtgatgacgattttcaagtcgggaaggcgtaaagggcattgcttttccttctgattatattggtcaataagcctttcgatctcaagtaaatgctttgcgccttcttcgatttgctttgcgccgagtttgaattcgatgagcgcatatctcccatcgttcaggcggagaacgccgtctgcttccaaaccataacggtcacggtaatagcacatatcgccgtcaaaggcggacgagtagattttcagatcgcggatacacagcgattcaaacaggaaacccagcgtcttaaaatcggtattgaaatactgcggagataaacccatagcggcaacggcgatggacgggtcgatgagatttcgctttttggaagagcggatcgcggtcttggaacggatggcgggacaccaagcgtcgatgtcttcgatgatatagagcttttctaatgcttgaatataatcaaagaatgctgtttgcccaatatcgaagttgctttttacatcgccgaaaattgtattgctctcggcaagcgtgcagagattgcggctgtaggagcgcagtatctcctgcgcccagcgcggattgcgcttggtattgtcgatgttgctgatgtctacggaataggtttgtctgtataaatctttggcgacttccaattttgcgcggtcggtcttattcgacaggctatgcggccaaccgccgcggcagatggcaaaaatgagtccgtcgatagaaagttcggaaatacagccgtcaaagttttcgggatgatcaaaaagttccgaaagggaaacagagccgttggattcctcgctttcatagaggctcatgggatacattttgagtttgctgatgcgaagggtcccggtgtgcggggtatcgacttctttggaggaagagcctgtgaggatatacagcccgttttcgccgaggtcgtcaacggatttgcggatcgcgccccagagtttcggcgcgtcctgccattcgtcaaaaaggcgcggcttatcgccgatcaggagtttggaaggggcggcttctgcaacggcaagcaagttttcacgctgttcctcatcctgaaattcaacatagctctttgctttttgttttgcggatgtggttttgccgcagctcttcggcccgacgatcaaggttgcgccgaatgcttccagcttcaagtcaagttcgttgtcgatgattcgctttttatattccatactgcacctctgcctctattatagcagtaaagtgtagataagtaaagcgaaacgaagagatttgtggcattttgccgaagtgatttgtggtgttttaccgaagagatttgcggcaaaatgtcgaaatattttgtgaaaataaaatcaggaggagaacatgaaaaacaaagaaaaacctgaaattctgatcccgaaagggtattcgccggacgaaatgctcgatctggacggggatctgtgggatgaaaagcccatcggggtggaggaggtaaaaattcactttgagcgatgaactgaaaacttcggcgtatgacaaattgacgccgcagcggaagctgctcgtggacgccgtcctgaaaaacctcgaaaaaggcacggggctttgggaacagggctggtcgggcggaggagcgccggtatcggcgatcacgggtaagcagtataacggtgtaccacaatgtgacccaatattgctcggaggacacgacggcgctaaaaaaatacctgctcgaaggcagggatgaattttcaaaggtgagggggcttgtcaacacggtactcatcacgagcgataagacattgacgagctatctttccgaagtcaacagctatatgcagcagctctcggacgacggcatcctctccatgacgagcgagaacgacatcgacattgcgaacatggacgaaagcccgaacgccttgtttgtcatcgtgccggacgagcggttcacacgtcaccgatttgtaacgctgtttctcacgcagacctacaaggagttggtcgaaaaggcgaatacaaacctgcgcaagaagcagacggacacggcaattctgaaacggagagcctattttatccttgacgagttcggcaatcttcccaagatggaaaacatcgaaggtatgagagtaaaaaagcatatgttcgatgttacgcttacacgggcgttatgctttgagcttattgataaaatcgttataggcagagctgtttcaggtgagccgcaaagcataggaatatactacaaggttgacttaaacttggctcaatgaagtgcgggatgaagagctgtggtagttacagtccattttcaccaacagccaccgcgcgggaaaatttgaaaaatcgcaaggaaaagctttaaaaaagattcaacatgtctgaatttgataaacggataaaaagcgcccgaaaagggcgcttttctgcttaaaaaacagtttcaaatttttcttaaaagatattttcgaaactgaacgaataggacttgggaattttttcggccatttcgatgagcacttctattttcggcagagcgtcgtcgtattttccttcatagagatatcccagagcttcgttgagttgatagtcgatattttctatgctgacatgaggaatccagacgtgaagccccttttttttatctttccaaaatgtcctgattgccttcccgtcctcataggtagccgttttgttttccgttttgtcgtagagcgcttccagcgccgccgtaaacgtgtcgaaggttttccccaccgtgtagatgtcgtaagcggaaattccgacgatcagtgccagcgagatgaaaatactcgccagagtttttaccataatttttcctcccattgaagctcgaatacttcgtatttttttcctttcttttgcagataggctttcccgtttccgtctacggtcattacgagcacttgcttttcgctcttacagtccttttgtttaagaatatcgagaaaataggatttgctctttttcgtcagggcgagattttttttatcgaattttcctccgtctattaaaatgacggggagggaactctgcaagttttcgtaatccggcttgggcagagcggaaaaggagccgtttgcttcatagagcgcgtaatccacggcgtcgagagaaaaatagcctgcgccgcgcaggctttcgatgaggtcggacacgtcgagattattttttttgagctgcgtgtcgtctatgccctgtttattgaggacgatgctgggggaaccgctcaaaacggccttcatggacttaaagccgaggtctaaaaggcagacgatttgatgaaggaaatagattgtcaatatagagatgatgccatataagagggggatagaggtatcggacatggggatgcaggcgagctcggcgataaggagagtgataaccagctcgaagggctgcatttctccgatttgcctttttcccatcagccgcatgataacgagcagcgttataaaaacgatgattgttctgatgaaaattaaacccatataggcagtatttccgaaaaatttgcttttatgtattttagcccgttcaaacgcttgcaaaaaaacggataagggattataatataccaaagattaagagtagccttaggcgcgtaaagtgtcatcgaacgggacgttgtcgatgaacgaaaggaaagcaaatctcaacggcttttctgcggtgccgcggcgcgtccgctgaacccttgggaagtttttcgcgtatttccggaaggcgcgtcaaaaaacttccgcatctttcgcggacctctcgattttgggaggtttttattttatgacaaaaacacaaaacacagtccttaaacgaacctttttttccgaactgattttatcaaaatcgtcggggcagaaaatcgcttacatagcagtgataacggctttgtccgtcgttgcgaatatgtttctcgaattcaaaatgctcgacgtgcagttttccgtcacgctcgtcatttccgctcttgcgggaattatactcggtcccgtttgcggttttgccgcctgctttatcggcgacactatcggatttctctataatagttggggaatgatctatatgccgtgggtcgggctttcgacgggtatgacggcatttttcgcggggctcgtattcaacgcggcgaaatggaaattccgcggcgccgtgtacgtaaaactcgctctcgtgtgtatgctttcctttttcgtatgctcgataggcataaacagtacgggcttgtatttctaccagaaaggaatgggatttacggccgcagccgtcgattacgtctccgaaaaattcggaacgggggtcacctatttcggatatgtattctatcgtatgattttcagggggcagatttggaattgtgtagtcaattatgcccttttgtttgctctcgtacccttagtcaataagattaaaccgttaaaaatcaatatttcgtaaactgtaacaacttccggaaaagctgaaaaatcgtcgggcagtccttgacgatttttttttattgtggtataataatagaaacgacatcgaaaatacaaggagagagctatatgcttgacgctcttttgcagtacgagaatcccggaatctccattttcggattcaaaatttacgcatacgcgatcatcatcgtatgcggtatgattgcggcgttttttgtcatttcgctgctctttaagcgcagaaatatgtcctcggatttgtttctgacctatttttgcgtcactctgcccgtagcgctcatcactacccgtctcttttactgcattaccgacggactgcctttaaaggattggttttccatggaatccattcgcgagggagggctttccattatcggaggtatcttgggcggtacgatcagcgtgctcgcggtcagctatttcaaaaaggtcaattttttccgcgcggcggactgtatcgtagtggggcttctgctcgcacaggcaatcgggcgttggggcaatttcgccaatcaggaagtttacggcgcggaagtcaccaacgaggctctgcaattcttcccgtttgccgtctatatcaataagacggacggcggaagctgcttacagacttttgtccttacttttgaaaaaatcttcggcggcaacagcgatatttccggcgggacgtggcactatgctttctttttctatgaaagttttatcaatctcgtcgtcgcgattctcctgttcgtccacgcgtggaaaaatccaaaaaaacccaacggtctgaacgtcgctttttatttcatcaattacggactcgtccgctcgattatggagcccctgcgcgacccgtcgtatattttgggagataaagtgcagtggtctttcgttttttcgctccttatgctgttcgcgggcatcgcgttgttgctcgttctgctgttcctcaacagaaagaaggagggcaaatatatcggctccgccatcggcgatccttacggaattaccgcctatatcaaggacaataaaaaggaagtcgcatatctgacgaaaatcaacatgatgtgcaaaatatttcccgaaaattatgtaaaacccgcgccggaaaaggaagaagaaacagaagaaaacgacgaagagcaagagctcggggaaaactacgggattggcgggaacggcggagataacgaaagcccggaaaatcacagcatcggcgaaaacggcaaaaaggacggaaagggggcggacgaggaataaaatgagaaatcttacccttttgaccgacctttacgaactcaccatggcgtatggcttctataagcatggaaagcatgaagaagaagcggtattcgatatttttttccgccagaataaacttataacctattcgcttgcggcggggctggaacaggcgatggagtatctcctgaactggcgcttttccgcggaggatatggcgtatctgcgttctttgggattattcggcgaagatttcctcggctatctcgaaaacatgcgctttacgggcgacgtctatgcggtaaaggaaggagaacccgtctttcccggcgaacccattctgaccgtgaaagcgccgctcgttcaggcgcagtttgcagagacggcattgctcaatatcatcaatcatcagacgttgattgcgacgaagtcctccaagatttgccgagcggcggggaaaggttcggtgatggaattcggcctgcgccgcgctcaggcgcccgatgccggcatttacggcgcgcgggcggcggtcatcggcggctgctcttcgacgtccaacgtcctcgcgggacagatgttcggcgttcccgtttccggcaccatggcgcatagctgggtgatggatttcgacagtgaatacgaggctttcaaagcctatgcgaaaagctatcccgataattgcctgctgctcgtcgatacctatgacacgctcaggagcggcgttcccaatgcgataaaggtttttaaggagcttgcggcggaggggtatcgtccccgcgggatacgtctcgacagcggcgactttgcctatctttccaaaaaggcgagaaaaatgctggacgaagcggggttttccgatgcgattatctgcgcttcgggcgacctcgacgaatattcgatttcttcgctcatgcagcagggggccaaaatagacctttggggcgtggggacgaagctcatcacgtcggaggagatgcccgcgctcggcggagtatataagctcgcggcggtattcaaggacggaaagataattccgaaaatcaaactctccgacaacgcggcgaaaattaccaatccttccttcaaaaatcttttccgcctgtacgataaagaaagcggaatggcgattgccgacctgattaccatgcgggacgaacatatcgacgaaagcaaaccgctcacgattttccacccgctcgaaacatggaagcgaaccacggtcagaaacttccgcgcggagcctctcttgcatacggtcgtggaaaagggaaagctcgtctatcgttttccctccctcatggacgtgcgggcgttttccaaggcggaactgtccaaattctgggaagaatatctccgtctcgacatgccgcagctctataaggtagacctttccgaaaaactgcacgcgctgaaaagccgtatgctggacgaaatccgcggcggaacgggcggggagaaggaataatgaagctgtattccgcgcgccgccacgaacgggaaatttccgcgctttcggaggaatacggcgggcggctgaaagatttgcaggccgctttggcagagttgaaggaggaaaaccgccgcctttcggcggaaatttccgtcctgagagcgcagaagcaatccatttccgacgcgatgatcgccgcgagcgaaaaacgcgaggaaatgcaggaagaaacggaagcctatttcgcttcgcaaagggccatggctttacaggcagcagaaaaggctcagaggctgttggacgacgtccgcgcatcttatcccgacgaggcagccggctcgcgttttaaggcgtttgagaggcgcttaaaagcacttttgtccccgaacgaggtagatgctgcggaacggtcggaaatactcgacgaaatttcttcggggctttcttcggaagaagcctcggaaatacatacggaattggttttttctaaggagccgcccctgtctgcggacggggagtgggacttgaaggaagtcttggaaacgctcggactttcggacgattgatattaaggagtgagcatgaaagataccgctcagaaaaagagtatgcacggacaaggcgagaaaaaaccggcgggggtgaaatattcctgcctttggggaattttgctgttcgccgttttgatttttatagaccagattaccaaagcggccgccgccgcttatctcaaaccgtccgattctatcccgattgtcgaggggtggctggaaattcgcatcgtgtataaccgcggcatttcctacggattgggtaacgacgcttctcccgcggtcaaaatcgcggtcattgcggcgactgccgtcatgatgctcgcgattacgattttctatttcaaagtcgataaaaaacgttcctttatccgtaccgctttcgtgtttatcgtcgcgggcggcgtggggaatctaatcgacagagtctattataaggtttgggagccgtcgggcgcgttcggcgtgcgggacatggtggacgtcagccgtttcgggttcgccgtctgcaactttgcggatttctttattacggcgggggcgatcatgctggtgctctctttcctgttcttcgataaggacgcgctgctgcccgtggggaaatataaggcgatgaaaaaagccgaagaagaaatgcaggcggacgagagcttcgccgcggaaaaagactgaaaatggacagacgtttttttgtcgcggaggagaattacaagcgcctcgacgtatttttgagcgagcgcatggaagagtttacccgttcccgcatcaaaaagctgatagacgaaggatacgtcgaactgaacggaaaaagcgcaaaggcgggtgcggaaatccgccccggcgacgaagtggcggcggaaattcccgaggtcaaagaatattcggtaaagcccgaaaacattcccttggatattctctatcaggacgcggatttcgccgtcgtgaataagccgcagggcatgacggtgcatatcggcaacggaaatacggagggcacgctcgtcaacgcgctcttgtatgcgctcgattcgttaagcggaatcggcggggtattgcgaccgggaatcgtgcatagaatagacaaggacacttcgggacttttggtcgtcgcaaaaaacgacagggcgcatgtttccctcgctaaacagattgccgaaaagacctgtcaccgcatttatctagcgcttcttgaagggtgcgtcaaggcagattcggggcggatcgtcaccgatataggaaggagtccttccgaccgtctcaaaatggcggttctgcccgacggacggggaaaaacggcgattaccgactatgaagtgactgcgcgctacggttcggattatacgctttgtcggtttaccttgcagacggggcggacgcatcagatccgcgtacatgcaaaatatatcggtcatcccgtcgtgggcgacccgctctatgggtttcatcggcagaaattcgatttgaaaggacagcttctgcacgcctataaactgattttgacgcacccgacgacgggcaaacgcatggaattcaccgcgcctctgcccgattattttcaaagtctgctcgataagctgggcaggcaatacggagtaactatatgaaaaaaattttggacgccgccgcattggaacgcgctttgaaaagactttctcacgaaattgaagagaaaaacgacggactggaaaatgtggcgctcatcggaatccgtacccgcggcgtcatcgtcgccgagcgcatccgccgttatatcgcggaatctgagggcgtcactctgcccacggggattctcgacatcacgctctaccgcgacgatattttgagctgcgacgcagtggtaaagggaacgagaatcgatttcgagacgaagggaaaaacgcttgtcctgtgcgacgacgtcctgttcacgggacggacggtgcgggcggcgatttcggcggtcatggctctttgcagcacgatgggcagagcaaaaaaaatacagcttctcgaagtggtggacagaggccacagggaactgccgtttcgggcggactttatcggcaaaaacattccgacgtcgaaaaaagaaaaggtgtttgtccgctttacggaaacggacggcgaagaaggcgtttttctttcggaataacgcgggtgacttcggacggataacagataaattcggtgattatttttcccgtaaaacggaaaaatgttcataacataaaaatttaagacctgcaaataaaagtcaagggaaaataagcaaaagagggaaatatttttta

SEQ ID NO: 3699 - DNA, 4458 bp, Unknown
  16S sequences of unknown bacteria
ggatataactgtcggcttttttgtgggacaaaagaactaccgtctccacgccgcttgtctgcggaaacatgtccactggctgtaccgatacggtctcatagcccagctcatcaaggatgcgcaggtcgcgggccaatgtgcctggatcgcaggaaacgtacacgatgcgctgcggcgccatgcgggcaatatcttccagcacgcttttggcgcagcctttgcggggcggatcgacgcagatgacatccggcttattgccttcggccgctaagcggtccgcataagcagccgcatcgctgcagatgaattccagattatcaaacgcgttgcgcgcagcgttttcttttgcgttgcggatggcgtccggtacgatctcgatgccggtcacctttgctgcatggcgggccaggaacatggagatcgtgcctacgccgcaatacaggtccagcacttgctcatcaccgctgagaccgcagcatgccagcgcctgttcatacaagacacgcgtctggatcgggttgacctggtaaaaagacttcgaggaaatgcggaaggtgaagccgtcgatctcatcttcgatataaggacgccccgccagcaggatctctttttcgcccaggatgacattatccttgcgctggttgatgttctgtacgacgcctttgatctgcggatgcacctccatcaaggtttccgccagctgcttccatctggcgcttttcatttcccgggtaatcaatacgaccatgatctcatcgcgcgcaaaagcgtgcttgatcaatacatgacgtagctgtgccgccatttcctgatcctcctgcagatgcgcgcggacggtcccatacaccttgttgatcagatggctctggatgcagcattcctccatatcgacgatatcgttgctgttgatgcggtaaaagccgctcacggtttctcccttgacgatgccgacagggacctgtgccttattgcggtaaaaatacggcgtgtccatgccgatcaccggcagcacttccagatcgagcccggcgatcctggtgatgacatcctgcaccttctgccgcttgaacgccagctgttccggataagacatatgctgcagctgacagccgccgcagcgcccggctaacggacagggcgggatggcgcgcgctgccgattcatccagcaactcctccaccttgccaaatccataggtcttcttcagcttgaccgtacggatcatcgccttttctcccctgagcagtcccttcacgaaaaagggaaatccatccttcttgaccacgcccatgccgtcatgggtatagctttcacagacaccgctccacaactcgtttttcttcatccctgcattcaccccgttcacttgtcctattatacacgaaaacgcggctggccacacaaaaaaaacgccccttcacgcatgcgcgaaggggggaatcgtctttactgtgcggatccgttcatcacggaatcagccagttcttcatctctggcctgcgtcaacacatccatgacgctttcgtcggacgcgctcgtcttggtcagacagacatagacctgatgatcagcggtgtgctcatcatcgatctgcgcgtaattatagacattgatggacaggtcgtacatctttccgccgtcatccttctgggtaaaataagtgtcgatcggcaggatctcggcgatcgcatcatatgcgctctgcgccgtgttctgcacgagctccagatccacctcatccacgatgtcctccatattgatgttcacgcgcagcgtcgcgcttttcaggttgacctctacgctttccacataatcgaaggtcatcgcttcctggacctgggtgatctgctcttcggtgatggccggattgagatcttcttctgagaagcgcactccggtcaccggctcgccttgattctccgtggaagtcataacgacgacaccgacaaagatggtcggaatcagcacgactgcggccgcgatccacacgaggatgtgattctgctttggtttgccgtcttttgttttcttgacctttttttcttttctgctcatcgctatcactcctgacatgttctattctactagaaaacagctgaatttgctatcttttcttcaattcttcctgaatcaggcggttggtcatggccgggttggcctgccctttgctcgccttcatgacctggccgacgaggaagcctacggcgcggtccttgccgttcttgaagtccgcgatggactgcggattggcgtccagcacctgcgtgatcatcgccagcagcgcgccttcgtcgctcatctgcttcatgcccttttcctcgacgaccttgcgcgggtctttgcccttcatgatctcttcaaagacgaccttggcctgcttcccgctgatctcgcccttctcgaccatgttgatcatctgcgcgagcgaggatgccttgcatgggttgtctctgagcttcaggttggccttgttcagcgccgcggtcagctcgacgatgacccagttggccgccttcttgtaggcgtcggtctccttgcatacttcctcaaagaagtctgccagctccctggtggccaccaggacgcccgcatcgtaatcattgaggccgaaatcgctcatatagcgcgccttgcgctgatcaggcagctcttccaggttgtcctggatatcctttacccactgcgcatccaggcggatcgggaagatgttgggttccgggaaatacttgtaatcgacgttgccttccttcttgcgcatcatgatggtcgtcttctgcgtctcatcatagcggcgtgtcgcctgttccacctctccgccggcttccaggatcgcacgctggcgctcgacctcagcgtcgatggccttctgcacattggagatcgagttcagattcttgatctctgtctttacgccgaaggtatcgcttccttccggacgcagggagatattgacatcgcagcgcatgctgccctcttccatcttgacgtcgctcacgcccagatataacaggatcatgcgcagcttttccacataggccgcggcttcttcaccgcttcgcatatccggttcgctgacgatctccaccagcggcgtgccggcgcggttgaagtcgatcagcgtgccttcctgggtgtggaactgcttggccgtatcttcttccatgtgcatgcggttcagccggatcttcttcttgccctgggatgtctcgatctccaaccatccgccgctgccgatcggatggaactgctgcgtgatctgaaagcccttgggcagatcagagtaataatagttctttcggtcaaagcgcacgagcgtatcgatctcgcagtgcagtgccgtggccgctttgatggccaggcggaccgcctccttgttcacgcaaggcaggcagccgggatgaccgaggtcgatctcgttgacgcatgtattggctacttttccaaaggccaccggggccccggagaacatcttggtctttgtcttcagctcgcagtggatctcgattccgatgactgtctcgtaattcatgctttcacctccaccgtgttgtctgccagtccgctctcttcttcgatcgctttgccgatgttgaacatcgtcacttcctcaaatggacggcaggtgatgttcacggcgatcggcagaccgtctaagaagccgctgggcagcgtcatgctcgggtaaccgctgaaattgcccagcaccatgtggttgtcggccaccagatgctgtgcccccatggcttcatctgccgcttcatgctccagcggcgcgacgcctggcgctgcgctggcgatgatgcagtcacactcctgcagcagctcgcggaagtgatccacgatgaggcggcggatcttctgcgccttgcggaacagcttgtcctggttctcgacgaacagcgaatagctgccgatgatgaagcgcttgcgcacataggcagagaagcctttcgtgcgggaatgcttcatgacttcctccacgctttctcccggctcgcgcatgccatatcggatgccgtcgagattggaatgattggccgtagcctccgcgttggcgatggtcagatagaccggcaggaccgtctccatcagctcctgcggcatgcgcacatggcggatctgcgcgccgcgcgcctccaggcgggagagcagcgcattgaggttctccttcacccgctcatcgctgatggcttcctgcacattgtcgagcacgccgatcactttgccgctgacatcgctgtcgagcagcgcgcggtatgcttccaccggacgcatggagctcgtcatgtcgcggtcgtcgcggcctgcgagcacttccagcatcgtgcaggcatcctccacattcgtggtgaaatacccgacatgatccaggcttgaggcataagggatgatgccatagcggctgatgcggccgtaagtcggcttcacgccgatgatgccgttgtatgccgcaggctt

SEQ ID NO: 3700 - DNA, 6324 bp, Unknown
  16S sequences of unknown bacteria
ttccaatctctcagtcagctacgctgacagctctctttaccaaagagagccttgccattcgttcggtttaaaatgctgatttacagccaaacaagcgtgccttttaggacaaacaatccgcaaaaacaaatacgcttttaaaccaaaacaaccgagagggctgcccctctcggttgtctgtgtaatttacaaattattcgctgtaaatttctttaattgtattgtaatctttcatattttcaagaatcgttctgtaatccggcaatctgttaagccccttaacatccgggccgttctttaaaaattctatggcataggtggcggctgcagcccgtccctttgacaaaacggcttcgtcaatatcaaaattctggttgtggtgtgctgcgcctacgccctttgcatcgttcttcatacctaagaaaccgaagcaacccggccactgcataaggtagttagaaaagctctcggatgccatccaaggctccgcattgtctataacgctgtcgacgccgatttcctttccgataacttctcttgcaaatttagcgcaaacaggctcgttcacaacggcgtaacccggcatggggtaagcctcgtaagtggctgtgcagttgtaagcccggcaggtgttgtcaatgagctttttaaattcgtcatggaataccatgccccgtccgtcacggtcaaatgttctcattgtgccggcaaatgtaactgtctgaggtataacatttgccaccgcaccgccgtttaccgcacctacggagtaagtcagtgtcttgtaggggtcaactcttgtaaggcggagagcgttcataccccggtaaatagccgtgaaagcgtcaatggggttaattgactggtcagggcgtgagccgtggccgcctctgccctcgattttaaccataaagaacattgcccctgccatcatatttgtatcgtttattgccaatttgcccgattcaagggttgaaagcagatgcataccgtaaacggtatccggctttatgccgttcttttccatatatgcaaaaatatatcttacgccggcattgcttgcgccctcctcgcttctctcaaagcaaaggtaaacggtgccttcaatttcgtcctgtttgtcctttaaaattttagccgctcccaggagcattgacatatgtccgtcgtggccgcaggcgtgcataactcccggggttttacttacgcaggttctcttgcaggaaaggttaatatccttttcatctaccggcaatgcgtcgcagtctgcacggagaagcaccgttctgcccggcttccctcctgtgatttttcccaggataccgccattttcaacttccacataatcaattccgattttggaaagctcctctccgataactttcattgtgtttatttctttgccggaaagctccgggttttcgtggaagtatcttctcatggagataatataatcttcatatttttttgccaactcataattagtcataataacacctcattaaaaaatatagagtatcaaaataagcaacagtaaaaatagttgcacgggtttaatatttgccgtaaaatgatttcccaaaaaaggaaaatctgctgtgtgtcaggggccttattcataccgccgtggctttgttccttagtccggaaatgtagttgtcgtaaacttcctttgccctttccatggctttttcccggttttcgcaatatgtgtagtcaagcagtaagccgaagcatattaaccgtaattgccctgcgattttctcggcctctgtgcatttgccgaaaaatccctcgtcaatacatttctgcacacggtgggtgagtatttttataaagtatccgccctccgggttataggataaaaacaaatttttgttcataacataatatacataaaatgttctggcgtaatttacgcccctggatgtaactctcttgccgtaggcctgtaaaatttgttccagctgtcggagactgttccctgtaagataggggaaaatgtccttttcgtaataattcttcataccgtccatcaggcggactatcagccgatcctttgtagggtagtagctgtaaaatgtgcctgtggaaattcccacggtattacagaccttacgaacagaaattttttctattccctcattttccaaaatgtcaacagcccggctgtaaatgtcggccaagactttttcgtcatcaagttccttttttcgtgccataattcttaccttttgcatactgtatttataattacataacagaccctttgacactgaaaatcaatcacaggagaggcaggtttccctccccctttttttgattgtcaagcatattactcgccgtaaagttccggtatttccttctctctttcaaggaatttcaaaaggtctttaaagctctcatatcttgccatgccctttgtatccgggccctgctttaaaaactctatggcgtaggtggcacttgccgcccgtcctttaaacaaaacatcttcgtctatgtcaaaattctgattgtgatgagccgcaccgatgcccttttccgggtttttcatacccaagaatgcgaacacacccggccacatggaaatatactggccgaagctctccgatgccatccaaggctcgtactggcaaacattttcccgtcctatttccttgcctataacctctcttgcgaattttgccattacagggtagttgactaccggcaaattaggctttgtatagcggttgtaggtaggtgtgcagttgtaagcccggcaggtgttatccacaatctttttaaattcgtcatggaataccatgccccggcctgcaacatcaaaagttctcatagttccggcaaatcttacggtttggggtataacgttggcaacggcgccgccctccaaaacacctacggaataggtaagggtcttataagggtcaactcttgtaaggcgcagggcattcataccctgataaatagccgtgaaagcatcgattgggttaattgactggtcagggcgtgaaccgtggccgcctctgccctcgatggtaatgtcaaatggaagaacgcctgccatcatgccctcgtcattgattgccagcttacctgtttccattgcggaatacagatgagtgccgtaggcggaatcaatgtgaataccgtttttctctatgtaggcaaaaaggtatttggcgtttgcgttgcttgcgccctcctcgcttctttcaaagcaaagatacacagtgccttcgatttcatcctgtttgtcttttaaaatctttgctgtacccaaaagcattgccatatgtccgtcgtggccgcaggcgtgcataactcccgggtttttacttacacaggttctcttgcaggagagattaacatccttttcctgtaccggcaatgcgtcacagtctgcacggagaagaaccgttctgccgggtttcggccctgtgattttggcgagaataccgccgttttcaacttccacataatcaattccgattttggaaagctcctctccgataactttcattgtatttatttccttaccggaaagctccgggttctcgtggaaatatcttctcattgatataatataatcattatatctttttgcgtcttcatagattgtcatataagcacctcataaatctcggtttcaaaaaaattatatagcctgtaaattattgtataaatataccaaaaatatacaatagtcgcaaacttgaaaagcgttgtgagggcaaacgcaaatctcatctcgtctatatcatattacacatttttctttatgtcaatagaaattttttgttaataagttttaacgaacaagttcgatattttaaaaactttattagataaacttctatcgaaattattgaacctgttcgataatttatttaacttgcctaatttcgacaaataaatgttgtatatattgaatatttacaaattaacactaagcggttaaaataaaataaacattgagagcatataatttaccgtacacttttggagcaatttgctttccgtgggggattgtgtatacttgattatatgccgaaaggtattcgtttaaaattaaaaaggagaaaattattatggcaggtacacagaaaactgctgaaaagcagaaaaaaggctttaaaatgccgcacttgttctggattatgatgggcttgttgcttataacatcccttttgacgtacataatcccggccgggcagtttgcaacagacccggaaacaggcaagattttaggcgaccaattcaattatttaggctaccaaaccccggtaagccctatacagatgatgcttacaatgcttgaaggtttgacatcgtcctcacttatcggctgggcggttatggtatccggcgcatccgtaggtatagttatgggtaccggtgcatttgacagattcctcaactgggctatttacaaacttaaagataaagacgattccgttttgattgttgttatgtttgtcctgatggtttacttaggggctttcggcggttccgatgctcttattgccattgttccgctgggtgttatgtttgcaaaaaaacttagacttgaccctatttgcgctatcggtgtatcaacttatgcaacgcttttgggcttcggcacagggcctaacaagcaggcaaccacacagatgcttatgggtgtgcaaatctacggcacattcggcacaatgtttatctccatgaacatatttatgattttgggtcttataatgcttttgagatatgttaaaaagattaaacgggaccctacaaaatcacttatgtgggacgacggttggagaccggaggcaacagttgttgacacatcctcattgaaagaggaaaaattggattggagaacagttacggttcttcttatctaccttggccagtatgttgttttggttggctacccgcttatcacaggggatacatcaatcacatttaagcttatgattgcggtaagcattgttgttgcggttctctgcggtattataggacagttctcttttgacaaaatcggcaacgaatttgcaaaaggtcttgcctcaatggcattcgtagcatttgtaatcggtcttgcaaaggttatgtctattgttatgacaaacggcaatattttgcacacaatcgtttttgtacttacaagacctcttatgagccttccaagatccgttgcttcaatcggtatgacggcggttatctctgttgtaaacctgtttataccctctgcatcatctaaatcggctattcttgttccgattttgcagcctattaccgaaacattgggtatgaaaggcgaacttgccgttcaggctttccagtacggcgacggctttactaacatggtaagcccgttcttaggttggacagtgggctcttgcgtaaccgccggcgttccgttccctaaatgggttaaatgggtgttcccaaaagttttggcatttatggctttgtcatttgttgctatgtttatacttacagaatccggctggcagccgttctgatattcagttcattcttaaattaaaagagtaaaacctctgaaaataatatgcaccccaaaagtcaaaggcttttggcggtgcatatttttatgggaaagaaaagataaaaaaagatatgtgttatgacgaataagtgaaaacctcatttggggtataacgaaacagtccgaaaatattgtgatataatacctatactttttatcagcataatctcggatgtcaaaactgcaaactcgccctccttgagcaagggagggtggtgtgagcatttagcgaacaccgggagggttgattgaaaatccataaacctatgtaaaatagccaattaaataaaccataaaatcggctttctttcctgcacttgttcagttgtaaatcagcattttaaaccgaacgaacagcaaggctctctttggtaaagagagctgtcagcgtagctgactgagagattgaataagcaaattgttttatcatattttccgctataaaataccaacccaaataaaccgcaaacctgccctccttgagcaagggagggtgtcggcgtaaccgacaggagggttgtcaaaaacgatttttcgctacaaatcataacttcaacaaacagcaaaacttgttctccctgttaagggagatgtcacgagttttacgagtgacagagggttgtcaacgtgcaaacctgcggtttgcataggcgttcagtgaacgcccctacgatgcaaatttacaaatacatttacttgtaacagataaaaataaatcacggatacaccgtaggggcgaccattggtcgcctcatttcaaatta

SEQ ID NO: 3701 - DNA, 6563 bp, Unknown
  16S sequences of unknown bacteria
aaagacaggaggcgtaaaaagcatgaaacgcaatgcatggaaagaattggctttgggggcggccggtgtgctgctgctggccggctgcggcgcgccagtgcagagcggcagcaatttggtagggggcgaggatgtgttcacgtttacccgggaaaacttcccgcgcatcgatggctccacctcaactgtgcctttggcacaggcaatttgcagcgtgctgctggacgaaagccgggaggatgtggccgatctgacacagttttccaaaactacggcatcgtatgcagcactgatctatggggaaaaggatcttctgattgcggcggagccggcgcagagtgtgctggaaatcaaagcatcccaaggctttgcatggagcatggagccgtttgccatcgaagggctggtgtttgtggtgaatgcagacaaccctgtggattccctgagcgtggagcaggtgcaaaaaatctataccggagagatcaccaactggagtgaagtcggcggtgtggacgagccgatcacagcgtttcagcgcaatgagaatgccgggagccagaccatgatgaaaaagctggtgatggacgggctggatatgatggagccggagaaagaatatgtgatcggcgaaatgggcgcgctgatcgaagcggtgcgcggttatgacaacagcgctggtgccattggatataccgtgtactattatgccaaaaatatgaatatggcggacggactgaaaattcttcggattgataatgtgccgcccggtgcggagagtttccgcagcggggcgtatccttttttgaatccgtattatgtggttatggctgccgatacaccggaggacagccccgtcgccgtgttgtatcgctggatcctcagcgatgcggggcaatatctggtggatcgcgaaggctacgtggctgtgcgcgatgtggaggaaagcgcatgaggacaaagtggatacgcaggggcgcagcagcggtgctcccggcggcgttgacgctgacgctttttggctgtgttccctccggggcgcctccgatggatgcaagcagcggtgtacacgccgactggagcgcgctggagccgtatacagcgccgcagaaccaatatacccgccgcagcgaggaattcatggacacgttgtgcccggcagatgattatggaaacctgattcccttccctggccgcgctgtttccagcgactggatgggagatgtgtggctttatggcctggtgacagcccggggagaaatcgttgtggatccggtttacagtgatgcgtaccagttgagctggtatgactatgaaaacagctgtgtggtatatgaaccgtatctctacttaactaaagtgcattatgatgcgcaggccgggcgggaagaaaaggacatcaccgtggctgcactggatggttcctggtgccgcagcggctacagcaaagtgttcggtgtcagcgaaggtctgctggtggcctgcacggccgacgctcaggtggaagccattgacggcgctacgggaaaactgatctggagcaagcgcgcggaggaactgcacctgcctttcgatgcttcggattatgggcagaacgtcgatttcagctgcggcatgctgagttatgtggatgtggaggcacaggtcaattattttctggatgtggccagccagcatctggcctgtgtaccgtgcggcgagatgagctggccggtgttcttcacccacagccgcggcaaagccggcgaaatgcagatgaatggttccgtgtattacggcatcattgaccggaccggcgtgtgggtgacgccgccgcagtttgtgcagatcgataccttccgcgacggccgggcactggccacgctgcgcactggagcgcgcgccgtaatcgacacggacgggaatgtgctgcattcctggccggaaggcgaggtgttggtttcttgcggagcagatggggatgtgtgttatctgaacgttcgtgaagcggaggactatgtcatgggggaataccgcagctatccgcagtatgaggtaatttccgcttgcgacggagcgtttgaattgcttaatgccccgatgccgggggaaaagctggtttggcgctatgatgatacgtactgtattttttccgaccggcaagtcgctgtgggccggggaacacggcaaacagtagttcccataccggaaggcatgtttttttcccacagcagtacgattggagaagaccgactggtgctggaatttgacaacgaaaccaccggggaatacgcttgtgggctctacggcctttccggagataccctgattgcgccgggcacgtatcgttccatggccgccgattatgatgggtggagcggggagatatgtatcataggctggaggatcggtgaagaaggctatgatgtgcttgacagtgcagggcagatgcgctggagcctgccagtcggtgcaagctatccacgctggtacggtggttgccttttggtacaggatgctttcggtaccatgctgcttgacacagatggagatctgttgttccgctatttgacgctggacggcgacatttaaccgttgaacggtgggcggcactgccgcagccatggattgcgcagtaccctcaggcgtgccgcagacgtgcggcgcctcgagggttgccgggcgtttcagaaaaatgagcagcttaaaaaacgggcgcgtgtgctgcatccgctgtgcggcggatgcagttttctttgaagcggcgcgcgaaaacaggggaacggtgtcaaaacggggcggggagcatagtatggagagcgggggaaatccccccgggaaagaggtaatacaattgggtataacgaattccaataaagtcatcaatgtggatcggatcgactgctccggctcgctgcgggtgacgctggccctgacggctgcgccggatattatttccaatcccactgacatcgtgttggtgctggatcgatcgggaagtatggccggaacgccgctggccaacatgaagaccggcgctaaaacgtttatcggtatcatcgaagaggcgacgggcggcacgcaggatgggcagattggttccggcagccgtatcggtattgtcagttttgcagataccgcgattgccaacacacagctgatcacatccgtcgatacgctgaaaaatgcggtgaacgcgttgacggccggtggaagcaccaatcatgcggacgcctttaccaaagcgatgcaaatgtttgatcccgcgtccgggaatgccaaggtgattgtgatgtttacggacggaaataccacaacaggtgcgcctccggaacctgtggccgctgcggcccgcgctcaggggatcatcatttactgcatcgggctggtgggcgcagacggtgtggatgtcaataccctcaacgaatgggcgagcgatccagatgcttcccatgtggccgttacgccggacgcggcggagttggagcgcctgtttgcaaatttggcggctaatatttccaagccgggcgctacaaatattatgattcatgaaacagtttattcggattttgtcatcacaaatattctgccacccactaaaggtacggccacactgctggattcccattcgctgcgctggacgatcccggaacttggcacggtttcgagcgaaagcgcgctgctggagtttgacctgcgccatgtgtctcagatgggcggcaccaagctgatcaacgaatcgatcacctattccgatacggaaggaaatattgtctcgttccctgcgccgactgtagcagtggggtgtgatgtggtagtgcatccggaggagtgcccgctgccggtagagttgtcggtcgatggctgcgaagacgctgtgacaatggatatgggagacgcttacctggagtctcagggcaggatcattcagatggatgtgaccatcaaaaatgtgtgtccgggcaagcgggttgcgctggcggcaatccttaccgaagtcgatgagaatggcgaggaacatcagcgcggtatgaaagcaatgacgatccctgcccacaattatccgtcctgtcgtgatgtacaggtcaagtgtattaaatttgtggtgccggaagatttggatgtttccggcggttctccgcgtgccatgtgcaatcagcggaagtttaaaggccgctttattgcgcacaatatcgacacggactatcgctgctgtgaatcggtgctcacactgtaagcgaaatcgcaccgccgccgttttgcgcggcggtacatatagcctgacaacgcaaaggcggcagatcgggctccggaaaaaccgttggcagaaagataaagatgctgtgccgggcaaattgacggaatacgacgagaatattatggagtaagaaagccccctctatcataaagagaagggcttttttcatgtaagcatatccatcgttttagctttattttaggttagacttaaataattgagcaataaagcaacttttgcacaccaaacattaaataataaagttgtgaaaaaaggaaaaggcttgttttctcacgaaaacaagcctttttgcgtaccctttggtggagataagcgggatcgaaccgctgacctcttgaatgccattcaagcgctctcccagctgagctatacccccaaataatggttgactttttagaaaaatctgctatactaacatagttgagcatcttcttcaattgttgctcggcctgaacaacgatgctattatagcacgggggatttggcctgtcaagcattttttaggagattttttgtgtgatgaaaaattatttcgagttgtccatggaacccggagaaatccgggcgatcagcagcattgcgctggcccatctgggagatgctgtgtatgaggtgttagtgcgcgcctggctttgtgcgcacgggaaagccactggaaaaggaatgcaccgggctacggtggcgctggtgtgcgcgccggaacaggcgcggcgggcggagcggattctctctcgattaacggaagaggagcatgccgtctttcggcggggccgcaacgcccatgtgcacagtgtgccgcagaatgccagccgcagcgaatatcaggaagccacggcgctggaagccctgctgggctatctgtacttattgggccggcgggagcgaatcaatgaactgtttaacagtatgatggaggaagacgaaacggcggaggatgcgacgtgaagcacaccgtgattgaaatcagtgatctttccctgccggagctggacatatttgcccgcctgactgaggcacagctgcgcagccgtctggagccggaaaagggaatttttattgcggaaagcccaaaggtgattgcacgggcactggatgccggctgccagccgttggcctttctgatggagcgccggcatctggacggacagggaaaagaactgttggcgcgctgcggcgcgatccctgtttatactgccgaccgggcggtgctggcgaaactgacaggctatgaactgacccggggaatcctctgcgctatgcggcggccgatccagccttcgatggaggaactgtgcgccaatgcgcggcgggtcgtggtgctggaagacattgtggacaccaccaatgtgggcgcaatcttccgctcggcagcggcgctgcacatggatgcggttttgctgacgccggcctgctgtgatccgctgtgccgccgcgcggcgcgggtgagcatgggcacggtgtttcaaatcccgtggacccgtatcggagctgctgcatccgattggcccggcgccgggttggcgcagctgcatgcgctgggatttcaaactgctgccatggcgctgagtgaaccttcggtttcgattgacgacgcagtgctccgccgggtggaaaagctggctattgtgctgggcacagaaggagacggtctggcgcgggacaccattgctcaatgcgattatgcggtgcgaatccccatggctcatggggtggattcgttaaatgtggcggcggccagcgcagtggcattctggcagttgggtgtgcggtaaagtacagctgcctgcgctgcagcaatcgaaacggagagaggacgatcctgtgaaaaagcgaattgtatgttttggtgactccaatacctgggggtacgatcctgtcagcggaaaacggttcgacgaggacacccgctggaccgggcggttgcagaagttgctgggcgaagactattgtgtgatcgaggaagggcagaacggtcgtactatcgccagcccggatccctgggagtgggggacaaagtgcggcatggattacgtgctccccatgctggaatcgcagatgccggtggatgtactggtcattatgctgggtggcaatgatctgaagcggaaatttcatttgccggcgccggatgtggcaggtagcctgcagaatatgttgttgcgggtgcggagccacctgcgggtttatttgaacagcccgcagacccagattctggtggttgcgcctgtcccgatcggcgaggggattgccaaaagccgttttgcgcctttttttgatgcggaggacgcactgcagcagtcccgggagc

SEQ ID NO: 3702 - DNA, 10100 bp, Unknown
  16S sequences of unknown bacteria
ggcctgtttcttttgcatttggagctgtcttatttgttgttaatgcgacagccccttttcatgtacggttgtattcgtttggtgttattcttcttccatttgcaggttggcccagtagctgtagcttcgcttcagggtgtgggcgatggcatccgtatcccgctcttccagaatctttaagatttcaaaatggatgtccaccagatacttccggtcatgttcccgaatgcactgctcgatggtgcggattcgggatccgtaggtcagcttggacagcatctcgttcacggtgacaatcaggtcgtttcgggtcgccttcgcgatggcatcgtggaaggcgatgtccgtccggcagattaatttcggatccggattgggttcgtccagttcccgctcgatggaaaccgcaatttgccgcaggttctccgcatcctccggattgagaccttgatccatgataacctgcagggtaccgaactcgatgcattgccggagaccgatgaggtcttggtaggattcttttttctggagaatcatactgtagatcagcggattgatggtctgcggcttaaaggttttgcatacaaaagtaccttcgggacggcgaatttccaggatgccgtacgcaaccagggttcgtaccgcctctcgtaccgtgttccgtccgacgcagaagctggaggccagctccggctcggtgggaattttgtctcccggattaatctgcccgtcgatgatggcttctgtcaatcgttccacaacgatatcggaagcggatttcatgcgaatgggcttcataaaatctgaagcagtcattaattttcctttctgtgcagcattgctgcgttttgcggcagagggagaatgaaattagttcttcttctccacgatggtgtctgccagcgtctcaaaatattttacgtaagcggcgtggtcttcttccatgtgaccgtgcgccttcatggtctgctgaatttcatagagctgagcggtgtaaggaatcgggcaatcaatggcgtgggccgtgttgattacgttggtgatatccttgtggttaaccttgatggttccgcccggggtgaagttccgctccaccatcatcggcgccttgtcttccagagcatagcttcgagcggcaccgccttcgatggctttgtataccttctccggatccacaccggctttggccgcaaaggtgagggcttccgctacgatggcgatgttgttgtttacgataatctgattggccagcttgcagatgctgccggagccggaatcgccaatcagggttgcctgagaactgtaggtgtcaaaaatcggcgcgcaggtattgaaatctttctcgtcaccgcccaccatgatggccagcgtgccggctttggcaccgctctctccgccggataccggagcatctaagaatccgatgcctttctcctgcagtttctcatagcattctctggaatcgttggcggtgacggagctgtgatccactacaatctggccggccttcatgtaatcgattaggccgccttcgccgaagatgacgctcttaacgatggatgcgttcgggagaatcatttctaccacatcgcactgctccgccagatccttattgcttccggcggtcgcaccttcggccaccagttccgcaacaatcttctcgttcaggtcggataccatgacatccagacctgcttttaccatgtgttctgccatgggacgtcccatgattcccagtccaataaatcctactttcattgtgtgtttcctcctgttgatatttcgtgttttggattaaaaaaacagtaccgcctgcagccataaaccgaattgtgttcaacataggatgtttaacacttcaatactaatgaaaaattcatgcaaagtcaattggaattctcctttattttagaatatgaatttgttacttgaaacaaatttttcgacagaatattgtttattgttgactttagggtaaaatgttcgtaaaataaaatcaacatcccatgatggtatgaactaatgatggggtgatgtccggattcgtccgggaaaaaaactataccgcttgtagttaatgttgttgggatatcgcaggcatccggcctgcgaaggaggaaaaattgaagagaagaaaactgattgcagttgccttgatgttgaccttgctctgcacgatttccctgtccggctgtgcgaagcagaacagcggagaggtagcagagaacggatacaatcaggtaacgctgctgctcaactgtaacggaacagagattgccaatgataccagaatggcgctcctgttcaagaagtacgtggaagagcgttccgatggcgtggttcggattaaagtattcccgaacgatcagctggccagcggaaacatgaacaagggtctggagatgattaccagcggaactacggatttggacatccattccaccagtatcatttccaatctggataaccgtctgatggtatgcactatgccgtggctgttccagaactatgaccaggcggagaagaccttcttcggggctggcggaaagttcatccagaaggtggtatccaagaagggtctgacttacctgggcgcggttcataacggattcaaggcgattacaaacagcaagcgctccatcaagaagccggaagatctgagcggtctgaagatccgtattccgggtggtgcgttctacaccgccttctacaaggcattcggtgccagcccgcaggcgatgagctggagtgaagtgtttaccgcactgcagcagggaaccatcgacggacaggacaacagtttgagtacctgcaattccggaaacattcaggaagtgcagaagtatatcactatcgcaaagtatacctatgaagcttttacttttaccgcgaactccgagaagtttaactcgctgaactccaagacccagaagctgctgaaagagtgtgcgaaagatgcgtgccacgaagtggatcagcagattgtggaaggagaaggagatatcctgcagaagttcaaagactccggctgtgtaatcaatgagctgtctccggcagacattgaggaattccgtaaggttgtagaaccggtgaagcaggaatacatgaagaagtacggcgaagaggcctgcaaggcattcggcgtgacgaagtagtgaaactcaaatagaaagtgaggcaaggtatatcctatgaaaaaattctggaatgaattggaagacaatatatgcggcatcctgcttctggtgatgatgctgctcacatgcgtcaatgtatttgcgcgctatgtcctgctcagctccatgcctttcgtcgaagagctgaccaatgccggcctgattctcctcagtattgccggcgcagcggtggctgcgaaaagaggagcccatctgggcctgacggtcctaacggagagattctccccggcgggacagaaggcttgtgctctgttgggcgatgcccttggcattatctttggcctggtcatcctgtacttcggtattcggatgtccggtcacgaattcgcgctgggactgaagaccagcggcatgcagtggccggaaggtgcctttggtgccatgattccggtaggcggtgcgttcttggcgattcgctactgccagctgtttatccgtacgctgaaaagcgatgcaacgaactcggaagataaggaggcataagaatgagtgcaggcttagtagtatttggaagctttgcggtcctcctgttcctgggagttccgattgcgttatctttgggaatggccagtgtcatcacactgctgtatgaaaatctgccactttccattattccggcgaatctctattcgtccaccggcaaattcgttttgctggcaattccgttcttcatcttgggcggaaacattatggagaagagtggaatctcttcccgcttgattgattttgcgaaaaccttggtgggccacaagaagagcggtatggcgatggtatgcgtcatcgttgcttgcttcttcgccgcaatttccggttccggcccggcgacggtagcggctcttggaatgattatcattccggcaatgacccaggtgggatatgacaaagcgtcttccaccgcattgatgtccaccgccggtgccatcggtatcgtcatcccgccgtccattacttttgtaatctacggatccatcaccggaaattccgtgggccagctcttcgctgccggcctggttccgggaatcctcatgggcgtggtgctggttgtcgctatgaagttcgtcagccggaaatgggaaattgagaccattccgaaggctaccggtgcggaacgttgggctgctttcaaggatgcattctggggcatcatgatgccggttatcatcctgggcggaatctacggcggaatcttcaccccgaccgaagcggctgccgtggcagctctgtacggtctgctggttggattcttcatctataagaccttgaaacttcaagatgtgatgacgattctcaaggactccgtttctcagaccgccgtggttatgttcatcgttggaaccgccagcctgttctcttgggtgctcacggttaccggtgtggcatctgcagcaagcaatacgctgattaccatggtaggcggcaataagattctgttcctgctggtagtgaacatcatcctgctgattgcgggctgcttcatcgatgccaactcggcaatgtatattatcctgccgattctctacccggtcgcaaccgcactgggcatcgacccggttcatctgggtgccatcatggtactgaacatggccatcggtctggtaacaccgccggtaggaatcaacctgtacaccggatgcggcattgcgaatatttccctgaaggaaatttccaaagcggttctgccgttcgtattcgcgtcgctgctggtactgattctggtaacatacgttccggcagtatccacttggcttccaagcttgatttcgaactaatcgagatataacagacctgtgctgcttgcccgcaggcaggtctgtttcatgggacacgggcaatcattcatgaacaacaaggaggtcatatcatgaaggatatcagcataggggagctgaaagaccgcgcacaggatctgcgccgaaaggctctgactatgatctatgaagcacaatccggtcatccgggcggtgcgttctcggcagcagaggtcgttacatatctgtatttcaaggaaatgaacatcgatccaaagaatccggaatggccggatcgggaccgcttcatcctttccaaggggcatgcatgcccgattcagtacgcagcactgggaactttgggatattttccggaggaagagatgcataagctgagaaaagaaggctccatgctgcagggtcacccgaacatgagaaaatgcccgggcatcgatatttccaccggatccctgggacagggactgtccgttggcgtgggcatggcggttgccggcaaaagagacggaaagaattatcgcgtatatgtggtaatcggcgacggcgagctggatgaaggtgagctgtgggaaggctttatggcggcgaacgcgtggggtctggacaacctggtagtcatcctggacgacaacggtctgcagctggacggcaccacggatgaaatcatcccgcacctggatgtggtaaagaagatggacgcgttcggctttgagacctacgacattgacggaaacgatatggaacaggtagtggatgcttttgggaaaatcaatgcgtcctcttccggaaagccgaaattcatcgacgctcgcaccgttaagggcaagggcgtatcctacatggagaaccagctgggttggcacggcaaagcaccgaacgatgaagaatacgaaatcgcgatgaaggaactgggaggtcggtaatgaatacagaacagaaaattgccactcgtgtcggtttcggcgaagaaatcgtagcactgggtaaagaaaacaaggatatctacgttgtggatatcgatatcggtaaatcctgcaaaactcaggagttccgtaaggagctgccgatgcagcatctgaacgtgggtattgcagaacagaacggcgccggcgttgcggcgggactggccaccacgggaaaaattccattcgtggtaacctacgcggtattcggttccctccggatggcggaacagattcgtcaggaaatttgctacaccaacctgaacgtaaaaatcgcttgctcccacggcggcctgactccggccaacgacggcgccagccatcagggcatcgaagacatgggcgttctccgtaccattccgaacatgagagtggtcatgccggcggattactatgcggccaaagccctggttcgccaggcggcagaaatctacggaccggtatatctgcggttcacccgggatgcggttccggtaatctacgatgagaatcagaagttcgaaatcggcaaagccatccagattcaggacggctccgacgtggcgctgattgccaacggcgataccgtcattctggcaatccgggcggcagaagaactggcaaaggaaggcatttccgccagagtcattgacatgcacaccatcaagccgctggatgtggactgcgtaaagtcctgcatcgatgacatcggcaaaatcattactgtcgaggaccacaatatcatcaacggtctgggcagtgccgtatgcgaggtggcagcggaatccggaaagggcatcgtaaagagaattggcatccaggatcagttcggagaatccgcaccttatgaacgtctgctggcaaagaacggcatcacggtggagaacatcgtggagactgcgaaggcattgcagaaataattgattacgtccacttttactccaaaagggaataaccctttatacacgctgctgtgggattatcctgcagcagcgtgtatctttttgttcttcacttttcccatttctttcgggccggccgccgggccgcattttctcaattccatggcccggggttcgcgcccggaaaccgaaatcataggctttgcgggcaggcgagcgcgaactgggagccgctggatttgaaaaaaacgatcgatgcacgggatgtctaattgcattacttgcttatgaagtgcaatatctcatatgcctagaatttcgagggcgattcacgttgtttgaaacaaaagcaagaattagcgtgaacgaaattcgccggaattgcaaaaatctaattttgaagcgaccggctgatgcctattgttcacgctgaaaaaggaatctgcttcaaaaagcgtgaactgtcttcaaaagggtgacttgtacagaggaatttccatggagaaagcagaaatccattcacgctaatcagcagtaattgtaaaaatagcgtgaagtcatgcaaaaattctaggcacattgaatttttgctattaaaataattctaattgtcaaattggcattgaagaaaaaggataacacaatgaccttggagtgacctaattttcaatgagccatattaactcgtatacaagaaagaagctgggcaaccagtcaccataccatttgttcagatccttccgtctaaatttcaataacaaattcaaaaaatgttaattacagaaataattctgaaacatttcattgatataatatgcctggaagatgattgcttttttttcatacttgaaaggagaaaatgtaatgagaaaaagaagtatggcctttatgatgagtctattaattgtattgtgcacaacaccttttgtaaatgcaaatacaggaactgaatttgatgattcaaaatcagacgtatcctgtgaatggattcaagatgatgaattgcttgtaaaagatggaaccgatttatcgagaattaaaattgatgaaaatatggtaaccgttactaatcttaaaactgaaacggaagagtatttctatatttcagaaggaaaagtacattcttctattactggagaaactgttagtgtattagaaagagatccttccgaaattacaaatagcgattctgcaataaaaaaagcgtataagagcaaaacacgaacaacgaaaataacctatgcgaaaataaaaaaactagctggtggttcagctggattggctactattgcggcttccatagtagcatggttaggtgctgctgggttcctttgtccgggagcaacaccgcaagtattgaatcttatctcaggtatcgttggatttgcgtcaactgtgatgaaaggaagttcaaaacatggcataaaaacaacattaaagagttataagcgtaatgtaaaaggtgatataatggaatgttggaaagtaacaaaaattgtaaagtattgattggagaagcctatgaaaatgtattcgaaaaatatcgtccgctgtatcagtatgctcgaagatatctatgttattgtaattgctgttatttcacttatgggaactgttgataaagtttctacaacggtaacttatttactgttgctgctctccttgtgtggagttgtgttcctggtggtcgcatcaataaagaataataagtttgaaggatacgtacgctccacttgctttttggtaataatggcgaatctgtatttgtggataaaaccgtggtaaacacaaaatatcggacagtcctgttgctgtccgatatttttgttatgaagaaattgttagaatatatccacaccctctccgtgaaagaaggcttagatttgaagagatggcaattaattttttgcgaataatagagattcgaacatcgatggaccgatccgaaacatcataattctgtgcgttattaatgttcagtaattctgctctagatataatgcattgaggatgttcgaaaaaagcgtgtagaattttagattcatatgaagtaaggtcgattgttccgttaggtgtagttagcgttcccaaggaaaaacgcaataatgtatttccgtaccaaagcatgtcctcacgttcttcatgagtcagaagctgcttaattcgaagtaacagctccgggtaattaatcggttttatcagaaagtcatcaaagaaaaggcgcggagaagttgatgtttgattatctatatcttctgatgaaaaaagaaataaaaatttaccgtgatggaactgatttgaaaaagaaatttgactgtgccattctaattcaaaagtttcataatcaagaattgttaaatcggtagggctctcaaaaaacgcatcagaaaaagagcctttgacaataacatcattgaggagtttctccttttgcaggaattctttcaaattgtttgcaaaagcgaaatcccgtgagacgatagcaattcgattttcgaaagacatattctatctcctgcattgaaatgggcataaaattacaataacaaattgagcactacatgccctgatattacgagcgtaatatcagggcatgtacaatctgattccaccttttagaaaaatccgattatgaaataaacattccaaattgccgccagcccgcttccgatggacatttttcttctagctaaacctgttgccaaaatcccgattgtggaaatcacgaggagcaggattcggagagagggtgaaggttccatacggaaatagaaaactccgatgcagcagcaaagggcgtaacaaccctccagaatatcaatgatgttcatcatttgctttttcatcatgcagttctccgttttttcctttcatacagcagccacagcagtataagcaaaacggcgattccaatcgttgcgaggattcccttatgctcggagaggaacgaggccgattcttcctgcgtccccacatcgtacacccgaacgaaggatccttcgttttcgtgaatcatttcttttacctccttcaaggaaattttaccgacgcagcctttgtccacttggatgtgggttaatcctttatcggtatacacgtagagggcttcctcttcggaggccagcagattctcttccgaaagattctccatcgccgttattcggattgttttcgatttcgtctccccggcaatttcttttatcgtcttatcttggattttatcccgaacggattgatcgacttcgaccgatccgctgtagctgaatattccggggtggcggagccacccaatcc

SEQ ID NO: 3703 - DNA, 3146 bp, Unknown
  16S sequences of unknown bacteria
ttcatgatcatgatgatggtgtttctcgtctgcagtctttctgcagtcccggatcaccagatcaatggcaatgcccgagatcatggcaattcccgcttttaccagaagcagatgcaggatccgcgtaatccccacagaggatgagatcaggatcggaagcatctcatctgatgtagaaagatacactgccatcaacgtaccaatggtaatgatccttcctgcatacaagctggaagccgccgctgaaaatccgcactgagggatgattccaaacaatgctccccagattggacctgatttttttgctgcaccgatccttgctctgcctgcctccccgaccttgtgttcgatcagctcgatcagtaaatacgtaatatacaaaaatggcagcagctttatactgtccaacgctgtatctatgatcacttccatcaacatatatctgtctcctctcatttcccgtcatatcgcttaagattgcaaatacaatgcatttgcaaatcatttgcatttttcagaacaaatgctattataacaagtatcagagaaatgtcaatggaaaaatacagaagctgattttcttgatctttaccaaaagcaagggtgaaaagcctgttctcagacttttcacccgctttatcacaggagtatcttaattgctaagatctcgctcatattctattttcctgccatcttgcgctcctgcgcctcgatcatctttttgaccatataaccgcccacagatccattctgtctggacgtaaggtctccattataaccgtcgctcagcggtacaccgatctcgctcgcaacctcgtatttaaaacgatccagtgctccctttgcctccggtactgctgctttgtttgtagaacctgccataataaagccctccattggttgtttgttacgaccttagtatatgcagaccggcagatcatacactgtcagattttgtcattacagacttaagttctccccacctttggccatggctgtttctaggcgttcttttaatttttcatgttttggaagtgcaagttctgcgtcttcctccagaatccgtcctgccgcttcgcttgcctgctccagcacacgggaatcctgaaatacatctcccatacggaactccagcacaccactctggcggattccaaacagatcaccaggtccgcgcagcttcagatcttcactggcaatataaaagccgtcattggactgattcagaacttccaggcgtttcttggtctcttttcctttgctgccgctcataaagatgcagtaagactgatctctccctcttcctacccggccacggagctgatgaagctgcgccagaccaaagcgttctgcattttccaccatcataactgtagcattaggcacattgataccaacctcgatcaccgtagtggataccagaatctggatctgtccatccgcaaatgcttccataatctcatttttttcttttggcttcatctttccatgaagacagctgatctgaaattccggcaggatccctttcagcttttcggtatagtctgtgacattttccaactccagttcttcattttcctccaccatcgggcagataatatagacctgatgacctgcttccacttcttttttcatgaaacgatatgcattggggcgataagattcatccactacacagttcttgataggaagtctgtgcgccggcatctcatccactacagaaatatccagatctccgtaaataatgatggccaatgtccgcgggatcggcgtggcactcataaccagtacatgaggcatccgccctttctctgccagcatttcccgctgcttcacgccaaaacggtgctgctcatctgtcaccaccagtcccagattccgatagatcactttttcctggatcaaagcatgggttccgataacgatctgcgttttgccgctctcgatctcttctcttgccagccgcttttccttcgccgtcatggaacctgtcagcaaaatgggacgaagtgggatgtgatgggtctccagcaattccttcaccgactggtaatgctgctttgccagtacttctgtgggcaccatcaaagctccctgatatccattgcagcctgccatgatcaatgccagtactgcaaggatcgtcttgccagagcccacatctccctgcaccagacggctcataacttttgttccggtcatatctgatacaatttcccgccagactctcatctgtgcattcgtcagttcataaggaagagcctcgatcagccgggctgtctcgctgacttccaccataggcatctcgttgaccagttcttcctgctgttctttcatccgacggattcccaatataaacagaaggaactcatcaaacacgatcctctttctcgcctgtctcatcacctgctcattggctggaaaatgcacctgccgtacggcatcccactcagactccagatcgtattctcgtcgcatgtcttcaggcagatattccggcacataaacctgtcctccatcaatgacctgatgaaccgacttcaccaccattttttccgtcaggcccgtagtcagtggatatcttggctgcatcacatagagtaatttatcatagtctgccagtgtaaaatgttccggctgttccatccggtactgtccattcttttccgcaatgatcccgcgaaaaatatactgacttccacgctgaaacactcttcgtaaaaacggtacattaaaccaggtagcctgaatcacctgttctcccacccgaagtctggcactgaagatctgatattttccaaagcgcttcacctcagagacagactccacaaatccatgaactgcatattttttcccgctctcgatctctgtaagttccaccggctcttcatagatctcataatctcttggatagtattccagcagatccaatactgtatgtatgccaaccttcgcaaaaggcagcgaagtcttctctccgattccttttaattctgtgatggatgattgcagattcatcttatgcctcctgttttttcttattttatatcatacacgattgcatttctataatcaaccatatccgaacatatattctgtttattttcatttatttgaatttttatacttttttaacaaattttata

SEQ ID NO: 3704 - DNA, 32759 bp, Unknown
  16S sequences of unknown bacteria
ccgccatcatgagccccgccgacgctggcacgaaactgacgctgcccacaaatttttcgcccgcggcggcagccgacctgtctattttttcgggcggctcctccgagtagatcgccttgacgcccgtgatccccgtctttttcagttcccgccgcacgatacgggcgagcgggcacactttcgtatcttccagaggcgccgcgcggaaagcacagccgagtttgttgcccgcgcccatgcaactgacgacgggcacgccagccgcccgcgccgaggcgatgaggcgcactttgtccgccacgctgtcgattgcgtccgccacataggaaaaggcggaaaaatcgtactccgcggcggtctttgcgtcgaaatacagcgtctttatatgcactttgcagtcgggattgatatccgcgatgcgctcttgcatcacttccgtcttgtaccgccccaccgtagagcggagagcgacgagttgtcggttcagattggagggcgaaaccacgtccgcatcggtcagggtgagttcccccacgccgcagcgcgcgagcgcttccgccgcatacgaaccgacgccgcccagcccgaacagcgccacgtgcgcacccgcaagtttccgcacgccgccctccccgagaagggcggctgttctgcaataaaattcttccataaaaaaattatactccaaaagaacgcgtatctacaagcgttttgtaaaaaaaattttcaaacactcttgaaaaaacaaaaaaagtataatataatgataaagtaagcgacgattgatctttgcttgcaggctatattttagggggttagcagatttatgagtaaaattcaggcggaagacatccgcaaccttgcaatcatcgggcacagtggcgaaggcaaaacttcggtctgcgaggcgatcctgttcaacggcagatcgaccgaccgtttgggcaaagttcccgacgggaacaccgtaaccgattacgacgaacaggagatcgcgcgaaagatgtccatttcgctttcggtcgcatacaccgaatgggagggagcgaagatcaaccttttggacgtacccggattttacgatttcgaaggcgagatgaacgaggcgctccgcgccgcgggcggcgcgctcatcgtaatgggcgcgaacggaacggtgacggtcggcgcggaaaaggcgatcgcgatctgccagcgcgcgcaactgcctatggtcattttcatcaacggcatggataaggacaacgcggactacgcgggcacggtggcggcgctcaaacaaaattacgcgggcaagatcgcgcccattcagatccccatcatgcaggggcagaaaatgatcggttatatcaacgccatcaaagaaaaggcataccgcttttccgacgcgggcttgcaggagatccccattcccgaggatatgctgccgacgctcaaagaaatgcaggacagcctgacggaaacggcggcggagaacgacgacgcgcttttggataaatatttttccgagggcgcgctcacgcgcgacgagatcgtgcacggcatccgcaagggcatttacaacgtgaacaccattcccgtcatggcgggttcggcgctgcagaacaagggcatcatcaatctgatggacgagatcgtaaaatatatgcctaaggcgaaggaacgccgcgaaatggtggcgaccgaccttatgaaagacgaactgacgggcgtttcctgcgaggaggacggaccctttgcggcgcaggtattcaagacggtggtcgatcctttcgtcggcaaactcaatatcatgaaagtattccgcggcatgctccgctcgggctcgacggtgtacaacgcgacgacgggcaaaagcgaacgcatcagtcagatctatcttttaaaagggaaaaaacaggagcccgtttccgaactgggcgcgggcgatatcggcgcggtgaacaaactaatctcgaccaacacgggcgacacgctctgcgacgagaacgcgaaagtgaagttcgacgccattcacttcccccgccccgtctattccatggcggtgtacgcggacaaaaagggcgaagaggataaaattttcggcggactcaataaattatccgaagaagattacacctttacggtggagaagaacgccgatacgggcgaaatgattttaagcggtcagggcgaaacgcatctggacgtcatcaataaaaaattaaaggcgaagtttaacgtgtcggcggctttgagaacgccgcgcatcgcctaccgcgagaccatccgcaagatcgtacaggcggagggcaagcacaaaaaacaatcgggcgggcacggacagtacggtcactgcaagatacggttcgagcctttcgacggcgatttcgagtttgcggaagaagtcgtgggcggcagcgtgcccaaacaatatatccccgcggtggaaaaggggctcagggaatgtctgccgtcgggcgttctggcgggatatcccgtgacggggctgcgcgcagtcttgtacgacggcagttatcacgacgtggattcctcggaaatggcgttcaaactggcggcggcgatcgcgtttaaagaagggctgaaaaacgcccaacccacccttttggagccgatcatgcggttaaagatccgtattcccgaagcatatctcggagatatcatgggcgatatgaacaagcgccgcggacgcatcctcggcatcgacatggcggagggtatgcagatcgtaaacgcggaggcgccgcagtcggaactttccaagtacgcgaccgaccttcgcagcatgacgcagggacgcggacggtttatcgccgaatttgaacgctacgacgaagtgcccgcagcggaatcggaaaagatcgtcagggcgcggcaggcggaaaacaattaaaaatatacggcaagccccgacagatttctgtcggggcttgtttttcgggcggtttacaccgccccgcacttcctatgcttaataacaactattgtcagtgtctggtatattcgggtccgcaggaaccgctcggtgcacatgcgcctttggggttgcaactgccgctgtcagacgaatcgcccatgggcgcgcaagaataactttggctttgtttaagtttttcaatcatcaccttatacctcctattttatttttttcggaagtgcctttattccatatccccgtcgaagggtcatacagacatcttggattctttgcaaacaggtttccgctttcggcactggcgaggggacggcagtccgaacaggcgaaacgaaattcacacccgcaacatttttcgatcaatccgaaatgtaatttacgatagcgtaacgccgtttctccgcacacgatctcatgtaaattctgtttacgcacattgcccaacgaaagattccgctcaaacacgcaggggtaaacgctcccgtccgaggagacagcaagttttcccgcccagcatgtattttcccccatggcgcgagcaaaccattctttttcagccctgaaaacaggttctgtgcgacaggcgtatttgacttcttcttttctagacacgaggtgcctgttctgtatcccgcccgcgactttacgtatgacgtcaaatttataatcgtcgattttcagatcattcaaaaaagcgattatgttttcgcgttcgtttatattttctttcatcagcacgacggcgatgctcacttttattccggactcccgtaaacggcggacggtgtcgaccgttttttggaaacttccgcgcacacccgtgatcgtctcgtgtatctgcgccctatctccgtacaacgaaacacgcacatgaattttgttttcacggcataggtttgtcaactcgtcgctaaaaaacgttgcgttcgtaaaaatttcgatttgtccgaacgacaactcgcaggcgtacctcacaaggttttccagatctttattacagcagggttccccgccgataaactgcacacgaaaacagccttcgtttttcagttcgcgcagtacgcgacgccagtcttcccgcgtcaattccccttcggcttcatgccgagtgccctcgtaacagtgaacgcaacgcaaattacacttttgcgtaacttcgatccaggcaaaagtcagaggggcctgcgtgactgaaggaaggtaacgatgcgtgctttcgccatgatacagccctaaagcacgtatctcctcgataaacttccgttcgttcccgccgctcgccctttcaccatgcaaaatacagcgttctgcaattgattttccctcttcgtccagccaatacacatcgccgctgcggaaatcgtaaacggctgcgcgtttttcaccttcgacaaatacaacgtcctgtttccattcccatacctcgtattcccgcataatcctccgtttgtaacgtatgttttttattattttacatcataatatgatgtatgtcaatcattttacatcacaaaatgatattttcttaatatggaaacagcaaaattggtcgggtcacgcttgcgcgatgcccgcaaggcaaaaggactgacgcaaaaagaagttgccgctcatttcagaatgacgcaacagcaatacagtcgctttgaaaacggagtctttgaactgaattacggacaaattatcgaattatgtttattttataacattacaccaaacgagttgttcggatttgacgaataagcgctctccgccgatcggcggagagcgcttatttttcttttatttaccaccagcatctaagtaagcggtataatctgcaatgacttgcttcgcggtgccgtcctgttcgatcttgccgtctttcagccaaacggcacgctcgcagagatcgaccacgctgcgcgtgtgcgaaacgatgataaacgtcgtgccctgttcttttttctccatcagccgcgcataacattttttctggaacgccgcgtcgcccacgccgaggatctcgtcgacgagcagaatgtcggaatccatattaatggcgatggaaaaacccaacctcgacagcatacccgaagaataattcttgacgggcgaattgataaactctccgagttcggcaaattttaaaatgtcgtccatcttattttcgatctgccttttggtatagcccatgatggcggcgttgaggtagatattctccatgccgttggcgtttccgtcgaaccccgcgcccaactgtaacagcggtgtgattttgccgaacacgtctattttgccgcgcgtcggctgcaacgtgcccgcgataattttcaaaagcgtgcttttgcccgcgccgttccgtccgataaaagccaccgattcgccgtaacggatctgaaaggtaagatccgtcagacaatgaaatttttgttttttcagtttgccgcggaacagttttacgacgacttctttcaaatcgtccgttcgttcggtaaatgcgttgaaatccatgctgacgccgcgcgcgtccacgaggagttggttggaatcgtttttttctgccatgttacaacctcgccgcaatggaatttttcgtcagccgcataaaaagcagtcccaacaaaaagaaaacgatcccgaacccgtaacagatcaggtgttcggccagagagggcatccctcccatcaacagcgttcggaaatattccacataatgatacattggattgaacgccatgaccttggtgaccataggactgttcagtttatctacggtataaaataacggcgtcaggtacgtccacaacgtcagcaataccgaataaatatgctgaatatcgcggaaaaacacaaataacgtgcttaaaaataaagatatccccagagaaaacaggagaagcgaaggaagcaaaacgatcgtcatcagcatttcccaatggaaagcgacgtccgcccccatcagtatgcggatgaccatgaccagcacaagcgcgataaaggaaaatccgaacgtaaccagcgaagacaggacgttggaaatgggaaagatgctgacggagatcttgtttttttgcaacaggttgcgctggttgaccaggcacggaagcgaacccgacgtggaagcgcgcatcacgttgaaaataatatttccgcttaaaacatagaccgaataatccaactcgatcccgtcgcgcccgaagatctgcgaaaagacgaacgccatcacgagcatattcaaaagcgggttcaaaaccgtccacaaaacgccgataaacgagccgtaatattgatttctgatattccgtttgacgagcaggcgcaaaagataggtacgctgtgccgcctgattcaaaatgccgatttgcttcatgtcttctctctataacttttcttctctgtttttatgcaatctgcgatacagccccgcgggcaaaaatgccagaatcagcggcttgaacgcataaaatctgcccttgacggaacggttgagccgactcccgtacatacgcacgtaaaattcgttgcggcgggtgcggaaggtgtgctttttggcgaggtttcgcggttcgtaatacgaaatgagatcgtcctgtaaattatatccgtacaggcgcgccgcatacaggcggaatacgagatcgtaatcttcgctgcgcaccgttttggaaacgtcgcggtatccgccgacttttaagagcgcctcgcggcggaacaaaagcgtgggatggataaaggggttcccgcgtatgatatccgaaagttgcggctgtgcgggaaaagaccttctcgcgtagacgcccttctcgtcgaacaggcgggcgccgcctcccgtaaaggcgtaatcgggatgtccgtttaaaaaagccaactgcttttcgaagcgcccgacgcggcagatatcgtccgcatccatgcgcgccacgaactcgcccgcgctcttttccagcgcgaaattcagacaatacgtgagcccgcaattttcttcgagcgaaaacactttcagcgacggaaactcttccgacaggcgaaacaacttgtccgcggtgccgtccttagagccgtcgtttacggcgatgacttccatgtcccccgtataagtatatagggagcggacagcgcgttccacgctgttttcggcgttatatacgcccataatgacggatatcactcgcattccccgcaaaaatcaaaatacgtttgggcgagccgctcggcggccgtacgaatatcgtacccctcggcgcgcaaaatgtcaaccgcttttacgcacttatcgggaattttttgcatcgcctccgcccatttttttgtcgagagcgaaagaaaagcgttttgcggcgcgaacgagcactcgcgcgtgatgagatcggaaaacaggcagggaacgcccgccgcctgtgcctcgatcgccacgacgggcaggccttcgtagcgcgaagggagcaaaaaagcgtccatcgccgcatagaagagcgcgggcgtcttggtgggcgggaaaaagcggacgcggccgccgcatttctcctcggcgtaacgtaccagattttcccgctcgtcgccgtcgccgacgagaacgagcgtcagagaaggatcctctttcgccgccagcgaaaaggcgtccagcaaaaaatataaatttttttggtaggcgaaccgccccatgaacccgagcaccgtacccgaaagccccaatgcggctttcgcctcgcttttttcgggaacgtcggaaaaggcgtccaactcgaccgcgtttttcataatgaacgctttccgccaatctttgccgaacaagtatttcgccgcgtccccgccgcacgccatcaggtgcgtggcgtctttggcggcaaagcgcttcaacacgtctttgacgaatttatggtcggcatagcggttggcggcgctgtgcgagtggcagatgcgcacgggcacccccgcttttttcgcggcgtgtaaaacgaacgcggacagcgtggtcatgtgcgagtgcacggcgtcgtaattctgttccctgaaaaaccgcgtcagcgcgggcacagatttataaaagcggacaaggctcggaacggtaaaaatgcgcgcatcgggatcgagcgcgcgtattttttcgtcgaaaggactctcgccgtaggtataaaaatcgaatacgacgcggctcctgtcgatgtgcttgtaataattaaaaacgcaggacgagaccccgccgagtgcggcgttgcctacgacctgcgcgatcttcaatttcccgtcagtcatagaagtttttcctgtttttcaggccgcgaaatttggggagaataccctgcggacgtaatgtttgctcgcccaaagcgctttcgcctgatttcttaccttgcaatattcgttcaaaggaacgtgattgataaacttttcttcgccgaacaggacgacgaacaccgttttgcagaagatcttgatatccagccataaagacgcgtgcatgacgtaatagacgtcgtaataattgcgttcctcggtggaaagatatccgttgccgttcacttgtcccagccccgtaaggccgggcttgacgtagaatttcaccttttcccaatcgcggtaatccttctcataggaagggagcagcgggcggggcgcgatgaaacacatatcgcctttgagcacgttgtagatctgcggcaattcgtcgatcttgaacttgcggatgatccgccccactctggtcacgtgcatgctgttgcccgaaaccacggggttgtccttatcgaacgcgacgtttgtcgaagtcatcgttcggaatttatatactttgaaccttttcatacccttgccggtgcgctcctgcgaaaagaagactttgccgccgtcttccagtttgatcgcgatcgcagtaacggcgatcacgggagcggtcaagacggcgagcaccgccgcaatcacgtacgaaaaagcatattttacgtacaaatacattttcataccaagattatatcatttaaaatgcgcaaagtaaattaaaatttacaatattattacattttaaaagaatttttaccgttttatcatattctgcacggtttttacatatcaaatcatagaatttttggcggaaaaaagcgaattttgaaggtcgtgccctctccgaggcggctttccacggacaatttccagcccgcgcgcgtacacagtttgcgcacgatggcgagccccagcccgaatccgccgcccgtgccgttgtgcgatttatccaccgtgtaaaagcgcgaaaagatatgcggcagattttcctcggaaatgccgacgcccgtatccgatacgcaaagttcgggaattttgccccccgtgagcgtgattttcagatcgccgccatccttgttgtaacggatgccgttgctgatcaggttgttcagaatttcgatcatgcgctcgcggcgggaaaggatgatcaccccctcctccgcttcgagcgtgaacgaaatattccgctccgcgatgcgcggcccgaacggcgccgccgtctctttgacgagcgccgtgagatcgacgtcgtagggaggcagttcgtcgttatcgatggcgctgaaattgatgatgctgcgaataagattggacagccgttcgctctgccgcagaatggtcgcagccgcctcggacacgcgctcgttatcgagattgcccgaaccgatcagttccgcgaaacccttgatgctggtgagcggcgtgttcatttcgtgcgtgacgttggcgataaattcgttcttgctgcgcgccgccgacaccgcctcggtgacgtcggtcatcagaagcacgcgcgtttcctccacttttgtaaagcgcagcatatattcccgctcgccgaatttatgcgagaccgacgcggtttcgtttcccgcgagcgcggcgctcacttcggcgtcttcgacgaacagccgcacgggttcgttctcctcgtattccagaagtttcgccgcggtgcggttgatgaggatcacgtctttcggatcgcggaaaatgaccatgccgttttccatgctgtcgagtatgagtatttccaactcgctgtccgcgttgagttttttgactttgtccttgatctcgtcgctcataccgttcatcagtttgacgatgggctgcaattcgcggtatttcgtggacacgtggcggccgcccgaaagcgacatttcccgcgtgagtttttccacgggttttaagatataggaggtggaaagccaggtgaagaacaggctgaacagcaccaccagaatgagaaaccataaaagcgtgggcagcgaatcgacgaagatggaccacagcgaatcggtgggcatggaaatgcgcacgagcgccccgtcgtcgtaaacggtgccgtcgcccgagacgagccgcgcgttcaccctgacgcagtagtatatcatgtcggcattgacggacgcgctgctgcgcacggcaaaacccgcgcccgatccgagcgcggcgctcacttcctgccgccccagatgatttggataatccgaagcggcgccgtcgctgtccgccaccaccgttccgtcgaataaaatatacgtcacgcgcgcgccgaacaatttttcggaaagcgccgcagcgcccgcctcgtcgaagggctcgtcctcttcgaattcttccatgtatcgcgtaagttggtttttcgcgaaatccagcgacgaattgtaatatacgtttgccgacagcaaagaaaagaaaaccacgcccgataccgtaacgatgagcgtgatcaacagaatgcgtttgagcatagtttttccccgttattccctgtaaacgaatttataccccacgccgaacaccgtttcgatgtagtcgatgccgagtttccgaaggcgcgccacgtgattatccaccgtgcgcgtttcgccttcgtcgtacccccagaccgcgttgaggatattttcgcgcgaaagcgccttgccctccttctgcatgagatatttcaaaaggttgaattccttgttgttgagttcgagttttacgccgcgcagcgtcgcggtcatggtctcttcgtcgagcgccagatccccgcgcacgatgcccgcgctctcgccgtggcgccgaagggcggcgttgacgcgcgcagtcagttccaaaataccgaaaggcttggcgatgtaatcgtccgcgcccagattcagcccgcgcactttgtccgtttcctgccccagcgcggagagcatgatacaactcacctgcggatatttctgtttgatcttcgccaatacttccaatccgttgccgtcgggcagcatgatatccagaagcgcgagcgacggcgcgctcttttccagcgctgcccagaattcgtatacggtattgtacgccgaaagttcgatgcccgacatttcaagcgcgcactgcacgagttcgcagatactcgtatcgtcttccaacaaatatactttcttattcatggttcccattatatcacaccgcgggcgattcatcaaacgaatgcgccaaataggtcagatggtctgcggcacgttcgagattgccgactaagttgatgaacacgccgctcgacgcgggacggcatctgccgtcgttcaggcgcctgatatggctgtccacgatggcgcggcgggcgtgatcgatctcgtcctcgatggaatccaccgctttgagcgcggtcacgtccccttccgcgaatacctgtttggtgctcgcgtacagcgcgaggattttttcgaacatatctttgagcgaagattttacgctgtccgaaaaagtgatgtcgtcgcgcttgcagttagcggtgtatctggtgatattgtcggcaagttcgctgatcctcacgatatcgttgacgccgtggtgcagcgcggaaatgatcttttcgtcgccgtaggacacgtcgttggaggaaattctgatcagataatcgacgatgcggcgttcgagatcggcgcaccgcgcgttgagttcgtccaccttggctttggcgtccacgttctcctcgatgaacccttcgaaagcgacgctcaaagactgcatggcgagttgcgcgagataatcggtctccttggtagcctggttgagcgcgatggcgggcgtctgcaagatacgttcgtcgagaaagcgcgcctcgtccacagacttttccttcttttcgcggatgactttggtcgcgatcttgacgaacagtgaggtaaacggcagaaaaatcgccacgcagatgacgttgaaaaaggtgtggaacatggcgatctgcgtctgcgcctgcggaaaccagcgcacgagcgtatcctgcatgaaagagggccagcacagcagaaagacggtaaaaatgatagagccgaacacattgaacatgagatggatcaggctggcgcgcttggcgttggtgctcgcgccgacggaagagagaatggcggtgatacacgtaccgatattgctgccgagcacgagaaagagaacgccgttgctgccgggttcgccgatggacagccccgcgccgaccatgacgatgatgagcgaagtgaccgcggaactcgactgtacgagggcggtgaacgcggcgccgatgagaaggagcaaaaagggattgctcacgcccgtcaaaaagtttttgaacgactgggaatcgcggaaaatggacatggaatcggacatgacctgcaagccgagaaagacgagccccagccccgcgagcacgacgccgatggtcttgatcttttcgtttttggagagcatatccataaacacgccgacgcaggcgaacactgtgacgaacgcgataaagtcgaaagcctgcaaagaggcgatctgggcggtgatggtggtgccgatatttgcgcccatgatgatggcggtcgcctgatacaaagtcatgatgcccgcattgacaaagcctacgaccatgacggtcgtggcggaagaactctgaatgatggcggtggtgacggtgccgatgcccacgcccgcgagtttgcttttggcggttttatcgaaccagcggcgcatgcggctgttcgccagtttttcgatgctttcggataagactttaaagccgaataaaaacgctcccagtcctgccaaaagcccgataaacgcccaaaaataatccataacgtgctcctcttgtgaaaactacacattcattttacggaaaagttgtataatacacttgtaaaatttgtaataaaattgtaataaaataattgagagtttctaaacttatattttatttttttgcaattttgctaaaatgagcctataaaaaataaaggagcacatatgaaaaaaattgtaaaaactatgatgaaaggcgaaagagaaactttgtccgaagatattttaaaggaaatcgatatggagcgaaaagaatgcgaacaggtcaaaaatcaacttttatcccgattggacaagcaaggccgcgaagacttgaaacgtttaataaaggtctcgcaagaagcggcggcatttaaaaaggaagagagttacgcgcagggactgcgctacggcattttgttcggtttggaaacggcagactgttttgaccgcgtacattctgtattatacaacacttattttcaggattttttctgttgcgaaatgccgtttacgaatgcagaaatagagtcgcgcgaaagcgcatatttttattatgaaacaaaactcgcccaaaagttaaagaataatgaactgctccatcaactcgacatggcgatttacggaatgaacgcgccggttgcggacgaatttttaatgcgcggctttcgtaaggggataagcctcggcgtagaggcggcaaaactgttggaagactttgaaaaacaataaaaaaacggctgttccatgaggaacagccgtttttttattccaaaaccgctttgatacggcggataccgctggcggaggattgctcctttacgatcttaaaggtgcccaactcgcccgtgcgcccgacgtgcggaccgccgcacatctcgcgcgaaaaaccgccgatgctgtacgttttgaccacttcgccgtacttgctgtcaaatacgcccgtgatcccctcttcgcgcgcctgttcgtagggcatttccgcgaatacgacgggaatatcttccttgattttctcgttgacgagcgcttccacctctctgatctcctcttccgtcagcggacgggagaaattgaagtcgaaccgtaaacgctcgggcgtgatattgctgcccttctggttgatatcgggggaaagcactttttttaacgccgcattcaaaaggtgcgttgcggtgtgcagccttgtcgtcgcctcgcccgtatcggcaagccctcccttgaactgcccttccgccactgcgtggctcttttgctggtgctctttaaacgccgcttcgaatccagccgcatccaccgtgtagccgcgctccgccgccaactcttcggtcagttcgagcggaaaaccgtacgtatcgtacagtttgaacgcctgttttccgccgatggcactctctttcacgtaatcgggattttgtttggacatgaattcgtttttgcgctcgatgccgtttacgcacttttcgaattccttgatgcccttttccagcgtcgcttcgaagcgttcgatctcgcgggaaaattcctgcaaaatgtactcttccttttcgggcaggagcggatacgcctcgttatacacctcttcgataaatattttcgcggcgttcaaaagttctttgctctcgatgcccagcgttctcgcgtaacgcaccgcgcggcgcatcagtcggcgcagaatatagcccgcgcccgtgttcgagggtacgatgccgttcacgtcgccgatgagcatgacggaagtcctcgtatggtccgcgatgatgcgcatggctttttgcgcctcgccgccgtcgtcgtagcgcttgcccgaaattttttccagatacgcgatgacgccgctgaacaggtcggttttgtaaccgtcggtcagcccgttcaaaaaggcaagcattctgtccagcccgaagcccgtatccacgtttttgttttccagaggcgcgtatttgcccccttccaactttttatactgcatatatacgtcgttgccgatctccacgtagcgaccgcaggcgcagttgatatcgcacgtatcgcagcacttttcgtcgtgcagcggataaaaccactcgttatccggcccgcagggcgtgccgacggtgccctccaactcccaccagttgttggatttatccagatagaagatattttctttacggatgcccaactcttcgagaaatttcgccgtttcctcgtcgcgcggcgcgctctcgttgcccgcgaacacggtggaacacagtttgtccttatctaatccaaactcctttgtcaaaagttcgaacgaccaggcggtcttttcctttttgaagtagtcgcccagcgaccagttgcccatcatctcgaaaaaggtgaaatgcgacgcgtcgcccaccgattcgatatcgaccgttctcacgcagccctgcacgttgcacaggcgcttgcccgcagggtgaggttgtcccagaaggtagggcatgagcggctgcatgcccgccacgttgaacatgacgcccgtgctgccgtcgccgatcaaagacaccgcgccgatattgacgtgccccttgctttcgtaaaatgagatccatttgttccgcagttgtttgctcgttatcattttcaaatattcctctcttcgcttatttgcgcgtaagcgtatatccctctttggtgtccttgaccgcatagccgagttcgtcgagtttcgcccgcagttcgtccgacttgccccagtctttggcggcgcgcgccgcggcgcgctcgtttgcgatcgccgtgatctcggcggggaattcctctttgacctcttccgccttcgcctcgtcgagtttcagaccgaaaaccttgtccatttccagagcaagcgcgtaaattttcctgctcgcaggctctttgagcatggtccaaagcacgcccatcgcgcccggaacgttcagatcgtccgtgacgtcctcttcgaattcctttctgtacgccgcgagtttttcgtcggaaacgtcgttttcgccctctctgtgctttgcgacgagcgcgcacagccgcgcgtaggcggtcttggcgccgtccatgccctcgaacgtgaaattgagttttttgcggtaatgggtgttcaggcagaaatagcggaaacacatgggcgaataacccatttcttccaactggctcacgagataggtgttgcctaattttttgctcattttgccgttgttcaccagcataaattcgccgtgcatccagaattttgcgggatttttgcccgaatagccgtaactttgggcgatctcgttttcgtggtggatgggaatatggtccacgccgcccgtgtggatatcgaacacttcgccgagatattttttactcatggcggaacactcgatatgccagccgggataccctttgccccaacggctgtcccactgcatgatgtgctctttgggcgcctttttccagatggcgaaatcgaaggggctgcgcttttcgtcgttgacctcgacgcgcgcgcccgctttctgatcctctaaattgatgcccgaaagttgcccgtaggcggggaatttggaaatatcgaaataaatgccgtcgctcgtttcgtaaccgtagcccttttcgcacagcgcatagacgaaatcgagcatttctcggatatgttcggtggctttgggggtgagttcgggcttgccgatattcagttttttcagatcgtcgaaaaacactttcgtgtaaaaatccgcgatctcgtagggcgatttccgctgttctttcgccgccttttccattttgtcctcgccctcgtctgcgtcgctcaagagatgccccacgtcggtgatgttcatgacgcccttgactttatagccttcgtaacgcagggtgcggcgcaggatatccataaaaatatacgtacgcatattgccgatatgcgcgaagttgtaaacggtcggcccgcacgaatacatgcggacggtcttgccgtcaagcggcgcgaattcttcctttttgcgcgtgagcgtgttgtataatttcatttttttgcctcttttttattctttttgttcgccgccgtgcggtttgcagggctgaaattcgccgcccgtcagttttacgagcgcggcttccaactccgccacgcgggagcgcagcgagcagatctcttcgagattcggatcggctttttcctgcaaaaggtctggtttttcgcccttgatgcgcacgactctgccgggaacgccgaccacggtcgcgtgcgggggaacttcttttaagaccacggcgcccgcgccgatcttcgcgccttcgcccacggtgaatccgcccagaactttggcgcccgcgctgatgatgcagtctttttcgatggtcggatggcgcttgcccttttccttgcccgtgccgccgagcgtgacgccctggtaaatgaccacgccgctcttgacttccgccgtttcgccgatgacgacgcccgcgccgtggtcgatgaacacgcccccctcgatcttcgcggcggggtggatctcgatgcccgttaaaaatttcgcgaactgcgagatcatgcgcgcaaggagttttaacttgatcttataaaaaaactgggcgccgcggtgccaggagagcgcgtgcacgcccgaataggtaagccagatctcgaatttattgcgcgcggcgggatcgttgcgctttgcggcgttgatatcctgccgcagccgtttgaaaaacatttgtcgtttcctcctatcgcgttcgatggcaaagaagccgccctttttccttccaaataaaaaaagcgcctctatacagtatataaaggcgcaatgcacgctgttccactttacttcaaaagcccgaaggcttttctcgttggcgcgataacggcgcgcaccgcgggggattggcccgtcctcaagcgcggaaacgcaccttctcagcaaaaatttgcgccgatttcagccgcgtcggcactctctttgaaactcgctgatactctttttccgcatcggaaacactatttaattggatttgtgccgtcattttatcacgatttacggcaaaatgcaagcgtttttacgcgatgagcggcgcgatcttgtattccgcgaacgccgcttgcaccatttcgggattggtgatgcggtaatctaaaagaaaacggatcaccacgtcgcgcgcgtcggaataatcgaacgagtatccgcacgccgccaaaagtccgttcacgtcttcaaggctcgcgcccgttatgagcgcgatttgatagatcagattcttttcgggaaggtatttgcccttcaaaatgcccttccaggtcgcctcgggatagtcgaactccttgtaaaattccgcgggggaaaagccctttttctcgatgacgctttcgatgcgcgcggcgggcacggcgctgtgatgaaaaatcgccttccagcgcagtttcaagggcgcgacctttacggtaaaggaaaaattgttgtcgacgtacttttccttgacctctttcaaaatcaccgcgggctgcggctgacagtatattttgcgcatttcgttggacgccatttcgccctgttcgatgcggttctgatttttgaggatcatgcacatggtcaccgattcgtaactcttgacgccggcgatcagatcgtaattttcgtatttcttagcaaagtattcgtctaaatcgcgaatgagatcttcactcatagtcaacctcgatattttcttgacactattatacatgatttgcgcgaaaaaacaaagtaattcgcgtgcgcggaaaaatttttccgtcttttcaccgaaatttgaaaagaattcacaattcctgaacattttattgattttagccgacgcttatgatataataataaccgatattcgaccataaggggggccccattacgaaacgaacgagaatcgaagagatcgcgcttctcatcgagaagaacggcaaaatgagtctggaagagttggcggagcaatttcccgacgtatcggacatgacgctgcggcgcgatctattgcaactggaaaaggaaaacaaggtcatccgcgtgcgcggaggcgccatgtcggttctggaagtgcaaaagcgctcgggggaggcgtacgcgcagaagaccaccatcaacaccgacgcgaaaaaggcgatcgccaaaaagacggcggcgctcatcgacgagggcgtgagtttgtttctggacggcggcactaccgccatgtacctcgcgaaagaacttcccgaccgcccctgccatatcttcacgaacggcatcgccgtggcggaggaactggcgcacaaaaaacagcccaacgtggtgctggtcggcggcacgctcatcaaggaaaatctttccaccgcgtccccttattcgcgggtgtttctggaaaacacgaatttcgaacttgcgatcatatccgcttccgcgttttccttcgcgcacgggttttcctgtttggggcaggtggaagccgaccttctgaaatttattctggataaagcgaaaatggtatatatgatgctcgatacttccaaaatagacaagatcatgccctataccttcgcatcccccgaggacatcgacgtactcattaccgacgataatctgcccgccgcggtaaaagcaagtttcgaaagcaaaaatatcgtagtcgtttaaaagaaagaggagaatatggaaacagcaatccgcgtactggacattatactgaaagtctttttagtcatgtccttttataaattcgtttatatgatcataggtttttgccgcaaggcaaaaaccttttcagttactgaaaagaaacatcgttacgccatagtgatctgcgcccgcaacgaagaaaaggtcatcggcaacctgttggacagcattgcggggcaggattatcccaaagacaaactgcacgtgttcgtgatcgcggacaactgcacggacgaaaccgccgccatcgcgcgcgcaaaaggcgccaccgtgtacgagcggcacgatctttccaaagcgcgcaaaggttacgcgctcgggttcgggttcgatcggatcaaggaagattacggcatcgaaaatttcgaaggatatctctttttcgacgcggacaaccttttgcgccccgattacgtcaccgaaatgaacaaagcgttcgatacgggcgaactcgacgtaattacgggctaccgcaatacgaaaaacttcgacacgaattgcatttccgccgcgtacggcattcacttttacagaagttcgctcacataccaccgccccaggcagttattgaattccgccacgcacctcgccggcacaggctatctcgtgaaagcggagattttaaaggacggctggcgctggtattgtctgaccgaggatacccaactcaccctctacctcgtggcgcacggatataagatcggctactgcgaggctgcggaatttttcgacgaacagcctgtcggattcggaacggtcatcaaacagcgcatgcgttggttcaagggccgcctttacgcgttttttgcctatgcgcaccaggagatcgcgggcatgttcaaaaagaaaacgcagaaatgggcgtgtttcgatatgttgttttacgcctttccttacggtttggtcacgaccgtcatatctttggcggtcaccgccctttccgtcgcgctcgcggtgcaggcgggcaccgtgatggattcctacgggccgctggcgacgctcaaaagcatgggaatggaccttttgagtttctggctgatgaccgtgttcaccggcaccgtggtcgtcatacgcgaacggaaacacattcattgtacgacgaagaaactcgtcctgtacgtactgctcttcccctggttcgattttatcgagatcccgctcgcgatcttcagcctgttcatgcacgtcacctggaaaaaaatcaaacacgtggacacgaccaggatcgaacaactcgtccccgtaaagacggacgtgccgcaaacggttatcatgaaagacaaagcgtcctgataaaaaaagcgcgcccgaaagggtgcgcttttactatttgatcagactgacgatcagcatgatgatgaccgcgggaacgccgaaaatacccgcaagcagcgccgtccaccacacgagcgggatttccaccgcggggataaaattcaaaagccagatggcgagcgcgccgatgacggcgtttaaaacgatcgtaaaaatggttttgaacgtcgctttgaataacttcagaccgatcagcaacagcacgatgaccgccgccgcgatcaggatatattgaatggtttggctcatatcgaactctcctttttatgatagtatgcgccgcgccgcgatcctttatgcgaaaatcgtcaacccaattttttatgttctcccgtcagggaaaagagtacccattcagcgatattcaccgcgtggtcgccgatgcgttcgagatatttcgccaccatcaaaagatcgagcgcgcgttcgttgccgccctcgtcgccgctccggtgcatgacggaagtcagtttcgttttgattttgataaaacattcgtccacgacgtcgtccgcgcggcatatctcgcgcgctttttgctcgctgcgctcggtgaacgcctgcatgacgcctacgaccatcttctgcaccgcgtccgccatcgcgctcatctcttcggggatctccccctctttcaacccgctcattttgaccaccagttcgctgatatccaccgcctggtcggcgatacgctccatgtccgtgatcatcttcatggcggaagtgataaaaagaaggtcgcttgcgacgggttgctgacggatgatgagttttaaacacaggcgctcgatctcgctctccttttcgtccaccgcgttttcatagcgtttgatagcgcgcaccacgctgacgctcccgtacaattccccctcttttctgggagggatcgcggggcttttgagcgccgcgaccacctgtgcgatcgcctgcgaattcagatcccccatttcggtaagcaacgatttcagttccgcgagttgctcgttatattgatttctgaccatatcagccaaacctccccgtgatataatcttccgttctcctgtcccgcggcttatcgaaaatctgatcagtttcgccgaattcgatgagatcgcccaacagaaaaaacgcggtcttgtcggaaatgcgcgccgcctgctgcatattgtgcgtgaccatgacgatggtgtaattctgtttcagttcctgcgccaaatcttcgatcttggaggtggaaatgggatcgagagcgctcgtcggttcgtccatcagaatgacttcgggttcgacggcgagcgcgcgcgcgatgcaaaggcgctgctgctgtccgcccgaaagccccagagcgctttttttcagacgatctttcagttcatcccagatggctgcctgccgcaaagatttttccacgatctcgtccagcgccgccttttttttcacgccgtgcgtcttggggccgtaggcgacgttgtcgtacacgctcatgggaaacgggttgggtttctggaacaccatgcccacgcgcttgcgaagatcgttgacgtccactttcccgtacagatcttcgccgtcgatcagcacttctccgtaaattttgcagtcgggcacgaggtcgttcatgcggttgagcgatttcaaaaaggtggattttccgcatcccgacggaccgatgaacgcggtgatctccttttctttgatgtccatatcaatatttttcagcgcatgaaaattgccgtaatataaatttaatccctttacgttgaacttatccaagatcagtactcctttttgagttttgcgccgacgaattccgccaacccgttgatgacgagaacgagcgcgatgagcacgacggccgccgcccacgcttccttttcgtacagcgcgttggtcgcgagaatatagacgtgaatggagagcgtttcgccgccctttaaaaatccgcccgccacgttggtggccgtgcccgccgtatagatgagcgcggcggtctcccccacaattctgccaaggcttaatataacgcccgagatgatgcccgacatggcggagggcagaatgatcttgaagatcgtacggagttttcctgcgcccagcgcgaaactgccttcgcggaaagaatcgggcacggcttttaacgcctcttccgtggtgcgcatgacgagcggcaggatcatcagcgccatcgtgagcgcgcccgagagaacggaagtgccccaaccgaacaactgtacgaaaaagagcatgccgaaaatgccgtacacgatggaagggatgcccgccagcgtttccgcagccatgcgcacgatcttgacgaacacgttattggatttcgcgtattcgaccataaagatcgcggcgaacacgccgagcggcacggcgacggcgagcgcggtgcccgcaatgaacagcgtgtttaaaagcgcgggcagcatagattggttttcggtggtatattcccattcgaacagtctggcggacaggttgggaacgccctgtacgagcgtatagacgagcacccacaagactgcgcccacggtgatcgccgccgcaagcagcaccaatacgagcgcgccgagcgaaaaaggttttttcagataggcgcgcagtttatccgatacgctctgcctgttgatggcgacggcgccctgcggcatttgcgatgcgggcagaattttttcgcgttccataaatacctccttatctggactttttgcggatgagcgaaacgagcagcgtgatgatgagaataaatacgaacagcacgcccgccgtggcgatgagtgcgccgcggtgcagatcggtcgcgtagccgagttcgatgacgatattcgccgtcatcgtgcgcacaccgtcgagtatgctcgaagggaacaccgcctgattgcccgcgatcatgacgaccgccatcgtttcgccgatgacgcgccccagccccagaatgatggaggtcatgatgcccgatttcgccgcgggcacttcggtgcggaagatcgcgcgttccttggtcgcgcccagcgcgagcgcgccctcgtaataacttttcggcacggcgcggatggcgttttccgacacgctgatgatggtgggtaagatcatgatgcctaaaacgagggacgcggtcagaatactcgagcccgatccgccgaacgtgcggcggatgagcgggacgatgactgccacgccgaaaaacccgtacacgatggagggaatgcccgccagaatattggtgagcggtttcagcaccttgtacgcggggcgggggcagtagcgggccatgaatacggcggtcagaaaaccgatgggtacgccgatggcgagcgcgcccgccgtaatgtagcaggacccgacgatcatggtcgcgatgccgtaactcggattgccgtcggtaggcgcccagttcccgttgaacagaaaatcgatgatgccgatctcggcgatcgcgggaaacgcctgcgcgaaaatgaacacgcagatcgtcgccaccgccgccacgaatacgacggcggagataataaagacgatcctcatgatcgtttctttccattggatctttacggcgcgttttacgccttcctgtaaggtttgttccattttttcctctcagaacgcggcaaaagcgggtctgtacaaagccccgccagcccgatttattttttgctttacgcctctaccgacacgcccacgtccgaccatttcgtcgcgacgccgatatagatgttgcaaagttgttctttggtaatattcgtgatgggattcatattgttgacgatgaccgcgatgccgtcggtcgccagcacgacggattgcagcgccgcggcctcgctctcttccaattcgcgcgacgccatgcccagatcgtacgttccgttcatcgcacccgtcatgcccgccgtggaatcgttgaattgcagatcgatcgtcgatttggaaacgcccgacgccttgcagtaactttcgacgagcgcctgcatcaaaggatacaccgaggaggaaccgttgacgaccagtttttccgtaggcgccgtagcgggtttcgtgtacgaagccgtattttcgggcgcaatgaaatcttctccgttgatgacctccgccgcttccgtactcgcgatgtatttcatgaaatccgccagcgtgggattgtcgttgtcctctttgtacgcgagattgaagggcctcgaaagcgtgtaagagccgtttttgatgttgtttacggtagccgcagtcccttcaaagggcaccgctttgacgctgtcgttgagcgaaccgagcgaaatataagcgatggcgctcgggtttttctgtacgttttgcagcgctaccgcggtagaattggcaacctgcgcggtcttgaccgtcctgtccactttgttgccgtccttatccttctgttgtacgcccgtcagttcgataaacgcgccgcgcgttcccgaaccgctctcgcgggtgatcaccgtgatcgtgtccgtcattttgtcctcgccgcagccgactgccgcaacgcctaaaacgcctaccattgcgatactcagaatcgcaagcaatatctttttcatttttttcgatctccttgttctttgtaattcgagtataaacccaaaatgtctaatcttttcgcaaatgttgtcataattttgtaataaccttattttacgcaatcggcataaaaaaatcccgacgggagatcccgtcgggaaaattcagttttgtttgtacaatcggcccttgatgagtttatacaccacgaccatcagcacgatggcgatgatgagataaaataagagcgtcgtgaacgcgggaaacaccgtgcacacgaaagagatcaacagccccgcgaccacgttgccggcaaacgcggcaagaatgctctgccagaatttgagccccgcaaacaccgcgatcgcggtgcccgtccacacgcccgtcagcggtagcggcacagccacgaacagaaacacgcccagcattttataaaaagtttttttgcggggagaagactgcgctttgccctcgctctccattttttccgccttttcacgcacggagtgttcgaaacgctcgatgagccgcttgaaaagtttcgtgcttttcagccagcgcaccaaaggctcgagcaaaaatgaaagcaggatcgcgacgatcagcccgcccaatatgccgcatccgagcgccgcgccgcccgacagggcgtgttcgccccagaacgccgtgctcatgccgaaggggatcgcgcctttgagttcgatgatcggcacgatcgatatgagaacggtcgcgagcgccgcattatcgccgaatacgcgcgcgaacagttctttgatccattcggtgacgcccgccgacaggatatttccaagatccatagattcagtctccgttgccgcgctctcgttgcagcgtttccacgattttgagcaagtcgttttcggcgacgcccagcatctgcgcctgctcttccgccttcgcgtgcgcaatgaatttcaaaggcgcgcccacaaggcgcaaactgacgcgttcccctctctgcgcgaaaaattccgcgaccgcgccgccgaacccgcccgccgcgtacgattcctcgaaggtgacgagttttttatctttcagccgttcgagcatatcttcgtccagcggcacgacggtgcgcgcgtttacgatcccgaaggggatctttgccttttcccgcgccgaaagcgccctcgcgatcgaacgcgcgccgctcgcgagcacgtagacgtcttccccctcttcaagcacttcccacctatttttctcaaaatccgcgccgcttataccgactttgccgatctttccgttgggataacggagggcgacgggacaatcgagcgaaagcgcgtaggcgaacatggcctccgcctcgtcgtcgtccttgggcgcgaatactttcagattggggatcgaacggagatacgcggtatcgaacattccctgatgcgtctttccgtccgcgcccgacaaccccgccctgtccaccagaaagacgacgggcagattctggatacacacgtcgtgaacgatctggtcgtacgcgcgctgtaaaaacgtggaatatatgcacacgacgggctttaaaccgcccttcgccatgcccgccgccatcgtgacggcgtaactttcgcagatgcccgcgtcgaaacagcgcgcgggatatttttcggaaaattcgttgagccctaccccgtcgcgcatcgccgcgcagacggcggtcacccgttcgtctttttccgccgcgcggcacagcatcgcgctcacgcgctcggaaaaggtattttcgctcactttgaggtccgcgccgatgccgtgatagagcgacggctgctgttccgcgagttccatgccgtgccccttttgcgtgaccacgtgcacgaacgcgggcttgtcgaggtgttttatatcctcgaacacgcgcacgagttcggaaagattgtgcccgtcgagcgggccgatatatttgaatccgcagcgctcgaaaaacgcgtttttattgagcagccgcttgatatttctcttgactttgcgaagagatcttcccagagcgttggtttcgcggaaggtcttttccagaaacgaattgaaacggcgatagcgccgtttcgccgtcattttgctgaccgcgctgtacagcgcggaggtgtttttgccgatagacatgccgttatcgttcaaaatcacgataaaatttttgggcttggattccgacgaaaagagcgcttccagcgccagaccgttggaaagagaagcgtcgccgataaggcagatgactttttcgctcccgcctaaaagatctctcgcatggcaaaacccgatgcccgtcgccacgctcgcgccgctatgacccgcgataaaagcgtcgtaatcgctctcttcggggtcgggaaagcccgagagtccgcccttttggcggatggtcgaaaaccgttcggcgcgccccgtgacgagtttgtgcgcgtaacactggtgccccacgtcgaagagcagtttgtctttgggaaaatcgaagacgaagtgcagggcaagcgtcagttctaccacgccgagattggaagagagatgcccgccgtttttgcgtacggcggcgacgatctcctcgcggcagtcgtcggcgagcgcttccagttgttttaaattgtacgaatgtatctctcgggaagacaccgcttgcataacccacctcgacgctctctattctatgagagcgcggcacgaaaatatgccgcctgcaaatctattgaactttaacattgtacccaaattcgcggcgtttgtcaagcctatccccttttcgcggcgcgcgcgcttgtgtttttcacatacttttgttataatgttaacaaaaccttggagatttttatgccgtacagcgtctatttgaaaaagaacgaggaaaaacgcctgctgagagggcacagttgggtgtatgccaacgaagtcgcgcgcatcgagggcaaggacaagaacggcgccctcgccgccgtctatgcaagcgacgggcgctatatcggaaagggctatctcaaccacctttccaaaattttggtgcgtatctttatccgcgacgggcgggaggacgacgagacgctgtaccgcgaacgcatcgcggaggcggacgccgcgcggaggcggttgatttccgacgactgctaccgcatggtatttgccgaggcggacgatctgcccgcgctcatcatcgaccgctacggcgacgttttggtgctacaatgcctttctttgggcatttcgctcaaaagagagatgatcgtgcgcgttttgaacgatttgttccgcccgcgcggcatttacgagcggggcgacgtggcggtgcgcgccaaagagggtctgcccttggaaagcggcgtgctttccggcgaagtgccggacaaagttcagatccgcgaaaacgggctgatcatgtccgtagacgtgaaaaacgggcagaaaacgggatattttctcgaccagaaagaaaatcggtccgccgcgcggcgctactgcaaggacgcgcgcgtgctcgattgtttctgcaacagcggcggattttccttaaacgccgcgacggtcgcgaaagaggtcacggcgctggatatttccgaatttgcgctcgcaaacatgcgggaaaacgccgcgctgaatcagtttaccaatatccgcacgcagtgcgccgacgtgttcgaggcgctgcgcgcttataaggcggagggaaaaaagttcgactgcatcgtgctcgacccgcccgcattctgcaagagcgcggccgaggtcagggacgcctgccgaggctataaggatatcaacctgctcgccatgaaactcgtagagcggggcggatacctcattacgtgctcgtgttcgcactatatgacgctgcccctcttcgaaaatatgcttgcggacgctgccgcggcgagcgggcgcagggtaaaaatgctggaagtcaagatacaggcgccagaccacccctctcttttatgcgcggaggagaccatgtatctcaaatatttcgtattgcagatcctgtaatcaaaaaaagactgtgcggcgcacagtcttttttatttggaaaacgcgtaaaatcccgcgcgttcgtagtggtcgagcaataaattcgcgcggcaggtcgtcgcgcgaagcgccacggcggtatccgcgcccgctaaaacgacgttgacgagggcaaagagcaaaaggcaaatatttttcaacgccaccgaaagcgccgcaggcacgatccccagcaaaagccagggaaaaagcgcgccgacgaggtatttcccgcgctgcatgggtgcggaacacgcgcagtagggcgtgcacgtacggcgatcgaatcccaaccgcacgcagcgcaacgaacggttgaccgccgcccagcccagcgcgtgcagaagttcgtgcacgggcacgctacaaacgatccccgccgcgagcatgacccagcccagccagaccgatgcaaccgagcgcgcaagtatggcgtacagcgcgacaaagagcgccgaaacgggcagtaccgttgcgagcatcgccgccccgcccgcgcccgaaaaggtgcgatcgcgcgccgtatacccctgcgcttgcagagattcacaggtattttcgaaacgctcttgggggctcattcttcgaaaatgggcgtggaaagataccgatcgcccgaatcgggcagcagcacgacgatcgttttgccggcattttcctgccgcgccgccagatcgcacgccgctttcagcgccgcgcccgacgatatgccgaccaacagcccctcgcgctttgcaatgagttttgcgaaagcgaacgcatcctcgtcggcgatctgcgcgatctcgtcataaattttcgtattgagcgctttgggaacgaatcccgcgccgatcccctgcaatttatgcgggcccgccgcgccgccgccgagcaccgcggaattgacaggctccaccgccaccacgcgcagggtcggtttctgcgatttcagatattcgcccacgcccgtaacggtgccgcccgtacccacgcccgccacgaaaatatccaccgtgccctcgctgtcgttccagatctcggggcccgttgtttcacggtgaacggcgggatttgcgggattttcaaactgcgaaggaataaaactgtcgcgatactgtgcggcaagttccgaagccttttcgatcgcgccgcgcatgcccttggcgccctcggtcagcacgatctccgcgccgtacgcttttaaaagtttgcgccgctccacgctcatcgtttcgggcatagtgagaatgagccgatatccccggaccgcgcagatcgccgcgagtccgatgcccgtatttccgctcgtcggctcgataacgaccgtccccgctttcaccgcgccgcgtttttccgcctccgcgagcatggaatacgccgcgcggtctttcacgctgccggacggattgaaatattcgatttttgcaagcaaacgcgcctttaagcgcaattccttttgtatgttttcaagcgccaccaggggcgtttttccgatcagttgggtgatattccgataaatcatgcgatgacctcctctttctattatatcatattacccgcgcgttgacaatcatgcgcgcgaaattgcgccgaacgcggcatcgagatctgccagaatgtcgtcgatatgttcgatccccaccgataggcgcacggtcgcgtcggtgattcccgcagcgcggcgctctttttcgttcatctgcgaatgcgtggtcgacgcggggtgaatgaccagtgatttgctgtccgccacgttcgcaagcagggaaaacaatttgagcgagtcgatgaacttgcgcgcctttttgccgccgcccgccatctcgaacgtaaaaatactcgccccgccctgcgggaaatatttgcggtaaagcgcgttgtcccgccgctcggggttggcgggatggtcgacgaacgcgacttctcgccgcgaacggagaaagtccaccactttcagcgcgtttccgacgtggcgctccacgcgcagggagagagattccagcccctgcaaaaagagaaaagcgtgaaagggactgagcgtcgcgcccgtatcccgcaaaagcgccgcccgcatttttacgatatacgcgagaccgcccgcggcgtctgtaaataccgccccgtgataggagggattggggcgggaaagcgcggggaaattaccgttgttccaatcgaacttgccgccgtccaccacgacgccgccgagcgccgcgccgtgaccgccgatgaatttggtcgcggaatgcaccacgatatccgcgccgtgctctaaggggcggaacagatacggcgtggcaaaggtattgtccgcgatgagcggcacgccgtgcctatgggcgatttccgagatcttttccacgtccgcaacgctgctgtgcggattgcccagcgtttcgataaatatcgctttggtattgtctttcatcgcccgttcgtacgcttcgggcgtgttttcgcaaaaatccgtctgtataccgaactccgcgagcgtatgcgcaaacaagttataggtgccgccgtacacatcggcggagcagaccagacgatcgcccgcgcgcagaatgttctgcaccgcgtaggtgaccgccgccgcgccgctcgcgagcgaaagcgcggccttgcccccttccagcgccgcgatccgcctttcgaacgcgtcgttggtgggattggtcagccgcccgtaaatgttgccgctctctttgagcgcaaagcgcgcctcagcgctgtcgcagtcgccgaacacgaaagacgtgctcgcataaatgggcacggcgcgcgcgccggttgcgggatcgggctgttcctgccccgcgtgcacctgcaatgtttcaaaacgataactcatgtttactcctgttttcctatcataaatataggaataaaatataaaatttttacggcaaaaattcgcccgtgacgagggcggaaagggaaacggaatcgcaaaatccggcgatatgccgatcgagagcgcgccagaacggtagcgttttacagcccgccgcgcgcggacagggattgacgggcgcggacaagcacgcgaccgtagcgagagagccttcgcccgcgcgcaggatatcgcccgcggtgatggcatcggcgcttttcgaaagcacgtaaccgcccgttttgccgcggcggctgacgagcagccctgcgcgggaaagcgcgccgacgatggcctcggcatatttgacggagatctcttgccgcgcggcaagttcgtttacgctcgtgatttgcggctcgtgctcggc

SEQ ID NO: 3705 - DNA, 3918 bp, Unknown
  16S sequences of unknown bacteria
aatggaaagcacacgaaacagcgaggtgataagaatgaaagctgatatacatcccaaatatcacgaagtaacagtagtctgtgcttgcggagccacgttcaagacgggaacgacgaaagacggggacgttctgaaagtggatatttgcagcaattgccatcctttcttcacgggcaaacagaagctggtggataccggtggacgtatcgataagttcaagaaaagatacggtatgtaaaggaagaaacgaaacgggctttaaggtgtcttttcatcttaaagcttttttttgtatgtggagagcgccgtttctttttaagtctgccgccgggaaaaagctctgtccggcggttgaggaaagcgaaagagaggggctttcagtcaaagcgccgcgcgggatcgccgcgccgcgttcgaaaaaataaaaatagccggctttgcggcggcatataatatatccctatgaaaaatacagagaaacgaaaaaagacaaaatcggaaccgggaaaagcctgcacgtatatcggcggtcaggcggtgatggagggcgtcatgatgcggggcaagtgcgcgatggcgacggcggtgcgcgacggcgaaggcaacgttcaggtggagtcggaacgcctgacgccccccgaaaagcgcagccgtttttcccgcctgccctttgtgcgcggcgtggtgaatttcgtcaattccctcgtcgtgggcaaccgcgtgttgatgcgcagcgccgaagtggcggaaggggacgacgaacagccctccaaagcggaaaaatggctcgcggaaaagcataaaatcaacctcaatgccctcctgaacggagcggcgacgatcctcggcatcgttctcgccgttctcatcttcgtgctggtgccgcaggcgctcacgcagctgacgggctttcggacgacggggatgcagggcctttggttcaacctcatcgagggcggcatccgcatcgccattttcatcctgtatatcctcggcatctccctgatcaaaacgctgcgcagggtgtatatgtatcacggcgccgagcataagacgatcacctgtttcgagcgcggtcttcccctgacggtggagaacgtccgcgaatgttcccgcgtgcacgacaggtgcggcaccacctttctctttttagtcatggtggtgagcattctcgtgttttcgctcgccaacgcgctggtggggacgtacatttacacggggcataagacgctcgatttctttatccgcctctgcttcaagctcctgatgctgcccgtggtggcgggcgtttcctacgaggtgctgcgggcgctcgcgaaaacgcggaataaatttttcctcattttcaaagcgcccggacttttgttgcagcgaatcaccaccaaggagccggacgacggcatgatcgagtgcgctatcgcggcgttccaaagggtgtacgatatggacgcggacccgaccattcccgaaacggtctttgccacggcgtgcaagatgaccgaacttttggcgaataccaaaaagcgctttaaggacaacgggatcgacgaagaggaagcggagtggattttctccattctgttgaatattcccaagagcgccgtcaatacggaggagcatatcctcaaagtggcgcaggtgaaagagattttaaaagtggcggacgaacggctgacgggcagacctctttggtacgtcatgggcgacgcggacttttacggctataaaatcaaggtggacgaacgggtgctgattccccgtcccgaaacggaggagcttgcccagcaggtgatcgcttccgcggaggagggggacaatatcctcgacttgtgcacgggcagcggcgcggtcgccatcgccgtgtataaggagcttgaaaagagcaggcgcaaggcgaacgtgacggcggcggacgtaagcggggacgcgctggcgctcgcccgagaaaacgcggaaacgaacggcgcggacgtcaactttgtgcaatccgacctcttttcccgcattcgcggcagatataacatcatcgtcagcaatcccccctatatcccgacgaaggacatcgaggggctgcaaagggaagtaagggaattcgaaccccgtttggcgctcgacgggggcgaggacggtttagacttttacaggcgcatcgcgcaggaggcgggaaaatacctcgtccgcggcggaatgctgatcatggaagtgggcatgggcgaagcggaagacgtggtaaagctgttcaagtactgcgattacgcgatgatcgtcaaggatatgcagggcgtggaccgctttgtcaaaatcgtggtgtgacgtgcggagtaaagtatgctgaaaagactcgacgacattttaaaacgctatgaatttttgtccgcgcagcttgccgatcccgcggtgatctcggacatgggcacgtggcagaagtattccaaggaacactcggagataggggaaacggcggaaaagtatcttcaatatctcgcttgcgagaaggagatgaaagaagccttcgcgcaggcggaaacggagggcgacaaggagatgcggcagctgttttccgacgaaggctatgcctgtaaggaaaagctttccgcgctgaaagaggaactcaaaatattgctgctgcccaaggacaagaacgacgaaaggagctgtattttggagatccgcgcgggcgcgggcggggaggaagcggcgctgtttgcggcggagctttgccgtatgtatcagagctactgcgcgaatcaccgcttgaaaatggagatcgcggacagtaacgaaacggagcttggcggcgtcaaggaagcggtgtataacgtttcgggaaagggcgcgtataagcttttgaagtacgagagcggcgtgcaccgcgtgcagcgggtgcccgaaacggaaacgcagggacggatccatacgtccacggcgacggtggcggtgctgcccgaggcggaggacgtggaggtggagataaacgataaggacatccgcatcgacattttccattcggggggcgcgggcgggcagaacgtcaataaagtggcttcggcggtgcgcatcactcatttcccgacggggatcgtcgtcacttgtcaggacgagcgctcgcagctgaaaaacaaggaacgggcgttcaaggtcctgcgttcgcggctgtacgatttttataacggccgcagcgaaaaggagcggacggaaaacaggcgcagcctcgtggggacgggggacaggagcgagcggatacgcacgtacaatttcccgcagagccgcgtgacggatcatcggatcggcgtaagtcaatacaatttggacgcctttatcatgggggacatagattccatggtggaagcccttgcgcttgcggacagagaagcgcagctcgcgggggaaacggaggaagaataagaaagggcttgcctgtcgtcaggcaaacccttttttcgttgacaaagaagagatcgtttgatataataaacataagcaataaggggattcctcgaaggcggttagcaatcctcccgtaaaaaggaggtggttttatgagaaaagaacttatcgaacttctttcgcttttggtgaaagaaggttacataatttctttccgtgtgacaaagagtaaaatctatgtgacaataaagcaataaccgcccgagcgctggtcacgtcggcggttattactttgtgttttaactacttacggggctaaccgtttagaggtttgcccttattgtgattttattatagcacgaaaatttttctttgtcaacaaaaacggaaattttgttttggttttttgttttgccgtatttaaaataaatgaaaaggcattgacaaacgctccgatttatattataatatcgccaagcaataaggggattcctcgaaggcggttagcaatcctcccgtaaaaaggaggtg

SEQ ID NO: 3706 - DNA, 7844 bp, Unknown
  16S sequences of unknown bacteria
ggctgcggccattgtcaggccctctgtccgcagcagatccacattccggacatcatgcgcgatctcgcgcggcgcatcagcgagtaaagcgcagggagcaagcgctccttgtctttgcatgagcgctcttcgatgactgcctcagcgtctctgggcggaacaggcaaaatctggtatactggtcatacgaggagtgatcatcatggaattgagagtactgcactattttctggccgtggcaagggaacagagcatttccgctgcagcgaaatcgcttcatctctcgcagccgaccttatccacccagctgcgggcgctggagcaggagctgggaaagccgctgctcgtgcgcggaagcaagggatcgcgcaagatcacgctgaccgaagaagggatgctgctgcgcaaacgggccgaagagatcctggaactggtgcgcaagaccgaaaacgagatcacgctttcagatgacaccatcgccggagatgtatacatcggcgccggagagacccgcatcatgcggctcatcgcccgcgccgcctgtgacctgcaaaaggaatgcccggatatccactgccacatctccagcggcaacgcgcgctatgtcatggagcagctggacaagggactgatcgacttcgggctgctgtacgctgccgtcgatcccctccgctataattcgatcccgatcccgctgcaggatgagtggggcgtgctcatgcgccgggatgcgccgttggccgatcaccctttcatcaccccggaagacctgattggacagccgctcatcctctcacagcaggaagagaccagccacatcatcagccgctggatgaactgcgatcctgccaggctgaacgtcgccgccacatacaacctgatcttcaacgcttcgctgctggcagaggaagggctgggatacacgctgtcttttgacgggctgatcaacaccaaggacagcccgctgtgtttccgcccactgaagccgaccttgcgcgcccaggcgtgcctggtctggaaaaagtatcagatcatgccgaaagcagcagaaaaattcctgcatcagctgcaggaatatcttgatgagatgtaagagccgaaaggctcttatttgctgtatgcctgtgcgcctgctttcagccggcgcagaccttccatcagccgcgagcacggcaccgccatgttgatgcgcaggaaatccttcccctgctcaccatactctccgccataggcgaccttcagcccttcctcctcatacaggaaggcacagaatgcctccacatcgatgtcatatgcgccgaggtccagccataacagataggtcgcttctgccggcactgccttcatcttcggcagctcgcgcttcaaaaacgactctgccgcttcccggttctgctgcaggtagacacgcagctcatccagccatgcttctccctgggtgagcgcggcgatcgccgcgtcacaggcaaacacattgggctccgctgcctcatcggtattcagcccgcgccatacccgatggcgcaggaacggatcggcagcgatgatgcaggcggactgcaggccggccaggttaaacgccttgctggcggatacgcaggtgacacagatgcgctcattggtctcattcaccgaggcaaagggcacatattccttgccgggcgcacaaagatcgcaatggatctcatcgctgatcaccgtgacatgatgacgggcgcacagcgcaccgatgcgcgccagcgtctcgcgatcccagatcttgccgatcgggttatgcggattgcagaagatcatcagcgtcgtctgcggatctgcgagctttttttccagatcgtcaaagtcgatatgatagccatcctgcgcatagaccagcgggctgctcacgacaaagcggccattgttcaggatggaatgataaaagatctgatagaccggggaaaggaccagcacctgctctgccggcgtagtcagcttccgcaccatcgaggagatggccggaacgaccccggtgctgaacatcatccacgatgtgtccggcgtccagccatgacggcgtgaccaccagcgctgatagctctcataatatgcctgcgggacatcggcatagccataaatgccgaactgcgccttgcggagaacggcctcccgcacacagggcgcgctttggaaatccatgtccgcgatgcccatggagatctccccttctcgaacatcccatttcatggagtctgtgcctgtccgttcgatcactgaatcaaaatcgatcatctcatccttctcccttctcttctgaacgcaaaaactgacgtgtccgctcctgccgcggggcgctgaacatctgcttcgcgctgccttcttcgacgatgacgccgttttccatgaagaccacccggtctgacacttcccgggcaaacgccatctcatgggtcacgatgaccatggtcatgcctttggctgccagatccttcatgacctggagcacctcctgggtcagctccggatccagggcgctggtcggttcgtcaaaatagatgatcttcggatcggcagccatggcgcgcgcaatgccgacgcgctgctgctgcccgccggagagctggctgggataatgatcggcatacgcgcccatgctgacctgatcgagcagctgagctgcccgcgcacgcgcctgcgctttgtccatgccatggccatagaccagcccctcgctgatgttttccagcgcggtgcggttgcggaacaggctgtaatcctgaaagacgaagccgcatttccggcggatcttcagcatgcgctgacggtccgcatgcggaaagcggatgctcgtctcatccagcgtaagctctccctcatccgcccgttcgagaaattccaggcagcgcaggaaggtcgtcttcccgctgccgctcgggcccaggatcgaaatgacgtctccctcatggacatccagatcgatgcccttgagcacctgcagatcgccaaagcgttttttcagtcctctgactttgagcatgttctcacctcaattcagttccagcttcttttcacagatgcgctgcaccttggtcaggatcgtgcagaacagcagatagatgagcgcgacctcacaatacagcgcaaaggaatcatacgtgcgggcagcgatgcgctgggcggacatgaacatctccatgatggtgatgttgcttgccagcgacgtatccttgagcagtccgatgagcgaattgctcagcggcggaaaagccgtgcgggctgcctgaggcaggatgatgcgcgtcatgatgcgcggataagtcatgcctgcgcaataccccgcctccatctgtcccttgggcaccgacaggatggccgcgcgcatcgtctccgccgcataggcgccggtattgatggaaaagacgatgattgccgagggaaacgcatccagcgtgacgcccaggctgggcaggccgtaaaagatcacgaacagctggaccagcagcggcgtgccgcggatcacccaaacatagaatcgcgccagctgatcgaggacacgcacatgagcgatctgcaccagtgcggtaaacagcgcgatgatcagcccgaacagaaaggagatggccgtcagcgggatcgtcacggtcagtcccgggagcaggatctgccagaaggaatcgatcagcaaagcgatggtgcgtccgtccataccctactcctgtgtgacatccatgccgaaataacgctgagacagcgcgctgagctcgcctgagtcacgaagcgcatccagcgcctcatcgatggcctccagcagtgcggtgctgcccttgcgcaccgggatgacgctggatgtggtcgtttcgctccttgccgcgatcttcaccggcgcatccggatgcttcttcagataatcgccgaatgccgtctcggaattcagcgtcacatcggcacggccgctttccagcagctggatcgactgatccatcgagtccacgccgaccagctgcgcgccatagctttctgccagctctccccagctgctcgtcaggttctgcgcagcgcgctttccctcaagatccgcaaagccggtgacggactcctcatcgtcccggaccatcagcgccccgtgcacatacgtgtaaggctgggaaaaatcatatttttctgcccgttcttcatttgcttccacctcattgatgacgatgtccacgcggccggagtccatggcggcaaacagcgaatcccagctgctctccacgaactgtgcttccacgccgagctccctggcgatcagctggccgacctccacgtcaaacccggtcaggttcccctcttcatcatgatagctgttgggggcataggtcccttccgtcccgatcacgatcacgcctttatcctggatctgcgtcagctgatcagctgaggcagcatctgaagcgccgcaggctgccaggacacaggcagcgctgaacagcgcgatcactcgttttatcgttttcatctcatcattcctttctcaagcggtttctgttcgatgatatcaagccagcgtccgcgcagctggcggatgagcagcaggatgccgcgcacgcacagctccacggccatggcgatccatgcgccggccaggcccatgggaccgaccagccacagtgacagcgggatgcgcacgccccagatgctcaccagattgagcaggctggggatcagcgtgtctcttgccccgcgcagtgcaccagaaacgacaatgctggccgcatagagcggctctgcgaacaattcgagccgcagcacctctgccgccagcacgcgcacctgcgcatccggcgtcagcagcgcgaacaccatggggcacagagcgtacatgatgaccgccatcgcgctcatcaccccgatgcccaggatgaccgacaggttggcaaagctgcgcgccaggtccttgcggcgggcgccgacgctttgtccgaccacggtcgtcgccgcattgccgatcccatagcccggcatatagcacaggctctctgcggtcaccgcaaaggaattggccgcgatcgataccgtgcccagcggcgcgatgatgcgggtggaggcgatctgcgcgccgcacaatgccgcatgctccagcgccatcggcaggctgatgcccagcatcccgcgcacgatctgccagtcaaagacaaagcgttcgccccggcgcagatgaagctgcggtgagcgcaccagcgcggcatacagcatcatgaccgccacgacgccctgagccagcgccgtccccatggccgcgcccagcacgccgaagcagcggatgaagatcaggttgaagatcacatcaagcccgcacatggaggcgttgaggatgctggggaccttcatgtcgccgctgcactgcagcagatatgcgcccagcaggctcatctgcagaaagggcagcgcgcacacatagatcagaaaatagcctgaagcatccgcgtgcagcgaaggatcagcacccagccagccaggcagaaaagagctgatcatactgccggcaaaggacagcgccagcgcaaagagcaaagtgatgaggaggccgtgcttcaccacgctgcgcgcgccttgctcatctgcggcgccgatgcgctgggccacctgaaccgaaaagccgctggcagcggcggtgcacagcccgctcagcagccatgtgctcgtcgatacgacgccgatcgccgctgaagcctctgcgcccagcgcgccgaccatcgccgcatcgatatactgcatcatgatcgatgtcagctgagcgaagatggctggcaggctcagctggatcagcgcacgcagctgcgcctttttcgtaagcggggcatcgcgctgcagcagtgcccgcactgattgcttctgttccacattcttcccctcccgagggcgccgcataccgcaaaacgcctcatgatcctgatctgttccctcggcgcttgcgcctgcgcgacagtcggtagatcagaaaatccaggcagctgatctttctctccgtctgacagatctgttcctggacatgacagcggcaccgtatgatgtttctcaccctgcggcgcggatcactttcctcccgcatccgcagaaggccgccgacagcgcgatcgctgcatccgcactgacgcagacgctctgccagtttctgcatatcgttctctctcaaatggcgttccccgctttccacctgcagtatacgctccttctctccgcatagcaaatacttatatgttatagctaatcatatctataaactataaaaagatgtcgaagcatctttttatagttttcggacaaagagcgcgcggatagcgttgagcacggcgatgatcatgacgcccacatcagcgaagatggccagccacatgttagcgatgcccatcgcccccagcagcaggcagatcagcttgatgccgatggcgaacacgatgttctcccggacgatgcgcaggcatttgcgcgcgatgcggatcgctttggcgatcttcaggggatcgtcatccatcagcaccacatcggctgcctcgatggccgcatccgcgcccatcgcccccatcgcgatgccgatatcggcccgagagagcaccggcgcatcgttgatcccatctcccacgaacacgagcttttccttgtccccgcggcgggaggcgatcagctcctccacctttgtcaccttgtcatccggcatcagtccgccatatacttcgtcgatgcccagttcgcggccgatggcctgcgccgtttcttccttgtcgccgctgagcatgacgatgcggttcacgccgcagcggcgaagtgcctgcaccgcctgtgccgatgtcggcttgatcagatcggagatgacgatatgacccgcatatctgccatcgagcgccatatggacgatggtgccaacgctgtgacattcctgataagagatgcccagctcatccatcagcttcccgtttccggcagccaccctgatcccatcgacgagcgccgtgatgcccttgccgctgatctccttcacctcgcgcacccgcgtacggtcgatctcctgtccataagccttctgcagcgactggctgatgggatgagaagaagcgctttcggccagcgccgcatactcgatgagctgatgctcgtcgatgatgctgtgatggatggcattgaccgcgaatacgcctttggtcaacgtgcctgtcttatcaaagacgacggtcttggcctgagacagcgtttccagatagttggagcccttgatcaggatccccgcattgctcgcgccgccgataccggcgaagaagctcagggggatgctgatgacgagcgcgcacggacagctgatgaccaggaaggtcagcgcacggtagatccatgagccccactgcggctgagcgccgctgagcatgagcaccaaaggcggaagcagggccagcgccagcgcgctgatgcagaccgccggcgtatacacccgcgcgaagcgggtgatgaacgcctcagagcgtgacttgcgtgagctggcattctccaccagatccaggatcttggacaccgtggattccccgaattccctggtggtgcggatcgtcagcaccccgctcatgttgatgcagccgctgacgacctcctcgcccgcacagacatcgcggggaacgctctctccggtcagcgcagccgtatccagcgtggacgtcccttcgacgacgacgccgtcgatcggcactttttccccggggcgcacgatgatgtgcgtgccgatctccacttcgtcaggatcgacctgttccagcctgccgttccgctccacattggcatgatcggggcggatgtccatcagctcgctgatgttgcggcggctcttgcccaccgcgtagctc

SEQ ID NO: 3707 - DNA, 23109 bp, Unknown
  16S sequences of unknown bacteria
gactaaatgtggaaggagaaattcgttataccacagggcagttacaagctccgacctctaaggccttagccgaaggtcggagtagttgacttgaaagtaccattgccgagaagtttgatgcaatactgcagcgtcttgaactgactggaagaatgaaagatttttacgatatatattacctttcaaggacattcgattttgatggaatgaaactgcaatccgctgtttttgaaacattgcagcgacgtgaaactccctatgataaagatagttttgagcatgttattacgcttgctgataatgaagatataaaaaagcgttggagatattttttgagaacaataaaagatgatacgcttgagttctcatttgtcattacagaaattaagacatttcttgaacccgtttttaatgcaattgcaggggagagcgtgtggcagaaaaagtggttttgcagagaattaaaatggttgtagtttatttatatagaaaataaagcctgtgctgatatccggcgcaggcttcataattggtttaacagttatcaaattcaggattaaaggcatagaaattcttgctgtccagtctgtcctgaacaattctcagtgcttctccgaacctctggaaatggacaacctctcttgctctgaggaacttaatcggctctatgacatcagggtcatctacaagtctcagtatattgtcataggtggttcgcgccttttgctctgcggcaaggtcctccgtcagatctgttattgcatctccttttgaagcaaagcagagtgcatcaaaaggaaatcccgcagcagcctgagcatatatgcctgccgtatggtcaacgaagtaatcttcaaaaccggcttcttttatctgttctattgtcatatctctggtgagctgatgaacgatagctgccaccatttcaaaatggcctatttcttcggtgcctacatctgtaagcactgctgcaacttcaggatacggcattgaatatctctgagtaaggtatctgagagatgctcctatttcaccgtcaggtccgccatactgcgatatgatgaatttagccatcgcaggattaggattttttatgtttatagggtactggagttttctgtcataagtccacataaattattcccccgtttcccaaggccaaggcattgttgcccatgtccagccgtcttttatattaactccagcaggtgtaagcggtccgtactgctgctcatattctgcggcagccttttcaaacagacttctgtatttgtcatagaaattaagcgcagcctcatctccgggatgtgtgtcgagataaagctgtgtatcctttaatacaaaagcaagcgttacaacctttcttgaaagctcattcatctgcatctgcctcccaggaacggcaggttgaggcacggaaatatagttccgttcatcaggccttcatccggctcatatgttttttcccatgcctgccacggtatatatgccatagcaagcggccagttttcaaaatcgtttctgcatacaggcatttgtctttcgttattgtccataggttcatcgtcaatttcaataggcatacctatatacggtctcggagtagttctgtttacttctattccgtcttgaatcaaattaaagtcccctttctaaacagtatactttatagtatgagtaagaacagaatttgttacccgtaatgtgttttgatgctggtttttgacagagttgcatttctgatattacggatgttataattaaaaaaataaacagaggggaagaaaattatgaaatatattacagggcagcatgccctaaatctgccatgctcacttatgacatcaggtgattggcatcagtctgcattgcaatgggagtttcctttctgccgagatagtagagacagtgtcttcggtgattatggaatagaacataatatttctattcccgaacataaaggcacgtatgatgtggcaaatcatatcagagcattgctcgaccttttagagatgggcagatttacagcagcgcagggaatgaacaaggactatatctgcaatgacaagtatacagatgaaattttcgggcaggtgtcaaaattgtatgattctcctttatggtcacaaattgattgttttatgggcagggagtattatgcagaatggcttgaatataagaaagcaaggggattatgagtgataggaggcaaacaggaaactgtcggctggaagctgtaaagcagatacagacttgagatataactgaatatgtgaagcggagagcatcaggttataacaggtgctctctgtttaagtgtgcgggtattgttccgctaatctgcgccgtattattccgatagcgcttatattgttccgcttttgcatgacggctggaaaaacgccctgaaccgacagactgatatatattaaaacaggatattgcacaaatagcatttttactgtatactatattataagaaaaattctgaattatttgttaattatatattgcttttatagagctttgaccgctcgacagaaagggggttgctatgaatatcagaaacagtgtaaacacattaaaaaacagatttttaagaagcgtctacagacacgatcctcatggcagaggcataacaggcaaggttatagctgcgctgctgatatttgattttatcctgtttgtcatagttttctatacggaggtaattgtaagaagtcagaatggcacttttcctccttgctagaatttaaaaggcaaaaataaaaaatacaatatatttgatgcagatgtcagaatttcacttgtcaatacgaatatatattaaaggctaaagtttgaaacacagtaaaaaacacatttgggaggaagagattgattatgaaacgaatttgtatggtgctggtactcgccgttataaccactgctgtatgcggctgcggctccgggaagcaggaagcttcaacaaacatcgtgtctgagttttcggatataattaaaacctactatatccagaaagacactggcgcagaggaactggcaggcgatatgttttccggggatatctataagtatctgaacctcaaaatttctgattgcaggcacagagcagagcaggaaaacatacagaagcagaactacaccgtaaaaacaaagctgcttgaaagaatagacagcgaggattacaaaactcttaaatatcaggcagtaagcagtttcaactatgagggaatgtccgaggacaccacagtaagcgaggttgtatatattgtatacgaaaacgagtcgggcaggatagtaaactttgccgtaccgggagataattttgatacatatgtaagaggcattacagacagcgatgcttccttagatgactatgaaccgaaagcatttgtaatgactgacgagatcagaagcaggattaataaactaagctgatgatacagggctgaaacgataatacctttgcattttgcggaaacaggaattttaattccaccggtttccgcattttctatggggaatatcaggaatacccgtaatttcagttatgaggtgaatcggcatatattaatcgggtgatttttcggatgaaaagaatagcttaaattatcggtatatgttattctgataacggagatatacattaaaaaaacagggccggggaatcggagaaaccatataaaaaccgttatacggcagatgtaaaaggattttgacatattttttgggaagtgtcaaagtcatttgatagacgataagagaaattgtccatataataaaagcacaggagaggtgaagtggtaatatcggaagtaaaatacaggcggccaggcttgaaaaaaatatgacgcaggaacaggttgccggattactggaagtgagtcgccagactatatcaaattgggaaaacgcaaaatcctatccggatatagttagcgtcataaaaatgagcgagtgttacgatgtctctcttgactatttattaaagggggaacaaaaaatgaatacatattatgattatcttgaggaaagcacgaatgttgttaaaagtaacaccaaaaggaacaaaacagttactatcttatcctatcttatgatttggacagtttcaatgcttgtgttctgggtctttaaaggcggcattgatgctatgggttatagtttaatgttcctttggattattattcccgtaacaacattcaccgtttctgttattatcggaaaaaataatttctggggaataaaaaaatgggcgtttacttttcctttcggtgtaatgtatatgcttgccgaatacggcacattcagcatggcaaacaacattgcttttaacaagataaatgaactggagtgggatttggctgtagccggagcaataatttctgcaatcggtatgctgacaggtctgctgattaaccggatatgccgcaatcggaataagattgcgtgaattaaacagtcagcagtaaacatatttaactgaagagaagatagagatgttgcgattatcttaaccggagcgtttgatattagtgtatttcaggtattgatatgtcagagaagttaataaacagtattctaaaagcaatcggctttgcaggcgggttgcttttttgtaaacatttttaattttttctgtcacctttaggtacatttttctatcaggttagtagtaatgtatgcagatatgcagtaaaactggtgcaaagatggtgcaatgcagagttagtggttgacgtgtactattacaagcagtacaataagcacgaaatttattgatatggaggataacatgaaagagattttaaaagggaaactggttgtggttttagcagtattccttgcagtatgcatagtggcaagcacggtaatgagtgtatgctcccttgcatcaataggcaaggtaaaaaatgaggttgcgtcaataaacggcaatacagaagatgtaaacagagaaaatgacgtcaccataatgggtgaatatactgttgagtctacagagaagatatcagatgcctacaaaaaaggcagcgatgcgggacttggcgacaaagacaaagaaacactcaagatggcatcagatgtactcaatgagataataaccgatgatatgtctgattacgacaaggaaaaggccgtatatgactggcttgttaaaaacataggtcaggacaagggactgcttacggtaataccaagctcaggcaaggacagcgataatccttacggcgttctgaaatatcacgatgctgtatgcgtaggctatgcgactaccttcagactgtttatgcagatgatggatatagactgtatggttgtacataatacagagatgtatcatacatggaatcttgtaaaacttgacggcaaatggtaccatacagatgtatactcggatgcagaaacaggcaattatgcgaacttcaatatgaatgatgatatcgcttcggcaggacacgactggaatatggatttcttccctgcggcagacggaaccaagtactgctatgtatttatgaacagggcagaggcaaaagatatattcggtatccctgaagcagtcaagaagcagattgatgagcagaaatacgtatttgcaatcggatttgagaaacagcctgcggatgatgatgcggcgactgtaaatacgattatgaacagtctgtcagatcgaataagcgtggattacacagatacatatcttgactggaactggttcagagatgataacggcaaatacattcttcgtgttgttatcaacactcctgcagagtcagacagtgatatttcacaggaaacggcagaaaaaatcggcagaagaattgccaaggctttcggtgacagtgacagctggcctgtaacatacaattcctcagcttcagagataaacggcgaggaagccatcaaagacaagataaataatgctaaataggggtaataacatatgaaaaacaaaattaaagcaggtttactggcagtgtgtatgcttgcggcagtatttgccgcaggctgcggcggcagcagcgatacggtcagtatgtatgatttaagaactgccatggaagcggccgatgacactctgggcgaaatgctttcggcagacagcagcagcgaggatgcggaggatctgtttgcatatatctcggatatggattacagcaaggttgacaaattctttgtgtcatattcaaatgagggaagcgcagacgagattgcagtaatagctctgaagaatgcttcagatacctcggatgccgagaaatcgcttaaggatcacgttcaggacagaataaacgtattctcgcagtatgctcctgaggaggtcaaaaaagcagaaaacgcaataacctttaaagacggcaaatatgcagtcctcataatctgtgacaagcaggacgaagtcaagaaagcatttacggatttcatcggtaaataacaggaggatatatggtattcagcagtatagtattcatattcatatttcttcctgctgtgatgatactttacagaattcttccggaaaaactgcgcaacggcttgctccttacagcaagccttatattttatgcgtggggagagcctgtatatgtactgcttatgatgttttcgatagtatttaactattttatgggcaggagacttgagcagacagacaggagaaacctgatacttgtcatatgcgttgcagtgaatatcggtatgctctgcttctttaaatacaccgattttgccatagacaatctaaacaggatttcaggaattaatataggcactcttaaactggcgcttcctataggtatatccttttatacctttcaggtgctgtcatacataatagatgtctacagaggaaccgtaaaggtgcagagaaacattatcgacttcggcatgtatataacgtttttccctcagcttatagcgggacctatagtaagatatcaggatattgaaaaccagcttaaaggcaggactttaaattatgatatggtatcggacggaattgtaagatttgccgtaggacttggcaaaaaggtgctcatagcaaatcagtgcggtctgctgtgggatgagatatattcctatggcggcaatatacctgctcttatggcgtggacaggtgctatagcgttcacattccagatttactacgacttttcggggtattccgatatggcaataggcctcggcaaaatattcgggtttacatttcccgaaaacttcaggtatccgtatgagtcaaaaagtattacggaattctggaggagatggcatattactctcggcgtatggttcagagaatatctgtatatacctctcggcggcaaccgcagaggcacagcgcgtcagattctaaaccttgtaattgtgtgggctcttacgggactgtggcacggcgcaggctggaacttcatagtatggggactttactatttcgttcttatagcagccgaaaaactgtttctcggccgcatacttgaaaaactgccgcatgcactgtcacatatatatgcgcttctgtttataatagcaggctgggttctgtttgcctgcgatgatatatcggttctcggcccttatcttaaatcaatgatagggcttggagcaggaggaagctcgcctatgagcatatattatttgcagacctacggagtgctgcttttcatagcggcatttggctcggtgcatacagtcagggatattccggcaaggcttttgaaaaacgaaaaggctttggatgctacaaggttcatatttgcatttgtgatgctggcggcggcaactgcctttataatcggggacagttacaatccgttcctgtatttcagattttaagaggggaggctaaactatgaaaaaattattcatatacatatttacggcctgtctgattgcaggaggaatatcagtatttgcggggacagacagaagcttttcggaaaacgaaaacagatatctgacaaagctttcagatgtgctttcggcagatatattatcgggagaatttcagcagcagcttatggactacaccagcgatcagatgccgggaagagacttgcttacagcttcggccacagcagtcaagaaagcctcaggcagaaaggacataggcggagcatatctaggcagagacggcttttactttgacaagaagcttgacaaggatatgaattttaaaaggtatgagagaaacctgaaaaaaattgaaaacattgcgcttaaatacagcgacaaaaccgttacggcaatgcttgttcccgaaagcggcgacatatacagcggaaagcttcctgtaaatgcgcagctctttaatgatgccgcaatgtatgatacggcaggcagtattcttaaaaactgccgggttatagatcttagggatgtacttaaaagcaaaaaaggggatttattatattacaggacagatcatcactggacacttgacggagcatatgcgggatatgaagcttttacgggtaaaaaatgctcatatgatactatagaggtatgcgatgattttctcgggacactttattccaaggttcttgataaaagcgcagtgaaaaaagtatcagagggtggctcccttgatacgattaaaattcctgtgctggcaggaaaggtacaggttacggcagacggcagggatatcggtatgttcgatatgaatgctctgaaagaaaaagacaaatacagagtatttttcggaggaaactacggaataaccgatataaagagcggtagcaatgacagaaaacttgttgttgtcaaagattcctttgcaaactgcttcgcaccgcttctgacagaggactacggggaaatagttatggttgatatgagatatttctcgggaaatatagatatgatagcgggcgcggcagacgagatactgtttctgtatgagctttcaaactttgcaggggatagcaacatagcaaaactgggaatgtagatattaaaggacataaggcagacagcgctttatgtccttttctctgaagctaatagccttcatctgcaacttcccatacatcacctgaaagcctcatggcaattctgcggtcaggctcctgaacaattccgtctgtactgacattgacggcgaatatatacagattatcctttgatccctgcttgagatagctgattgagtttacggtaaatacagtatgcctgtaatagtcaagagcagttttttcggcggcttcaagcatagcttctgtaagaggctgcagagccttgtccccttgcctgtagagtatttctctcggaattgcttcgctgtcaggtcttttaataaattcatcgttttcagttattgtgtagtcatcgaaggcggcggagaatctgccgtcatcaagcagtcttacagttacagccttagtcagtgttttgccgttttcgaaggttatttccataactatgatatcgtttcgcaggttttcaggcaggcctgtaattgtgctgctgtcgttatcggtcagttctctgatagtattctcagggacccagtctatgagcagggaattgtattcttttttattcttaccgtatatgacggtgaaattctgagtctctccgtattcgtcacgtttttgtgtccagtccctgaaatcaataaactgatttttacaggaaaacctgatactttttatattctctcccgacagataaaacatcagagggtggcctgtcatttctcccgtatcatctatagtccccgtacttataactgcctcggcgggcgtgatttcgttgcctgtttcgtattcacaggcagtaaccgtcatatcaggtatactaaaaaagaaaacagcgctgcctgcaagaagaattatggcaacagccgctgcaagagctgattttctgcagcgtacaggtacgctttttcctgctgctgcggcataggtttcagcctccagaatatgcctgtcgctgattttgcctactgcgtctgaaatagtttctcgtttcatattacatacccctctttctccagatattttctgagctttttccttatgcgtgacagtctgactgccgcagttcccgcccggatattgaaattttccgcaatgtctgaaatgctgtctgcataccagtagcgccgcacaaacataattcgctccgtaccggtcaaagtatccagaaaagaatccagcagacctgcaagctcatttgcagaaacactgtcttcaacagacgcaggtgatgacaggcataattcaagttcatcaagcgcagaactgtaaaagctgtttcgtttggcggcagtgttgctgtgatatttcataattgaaatattgcgtacaatacggcatatgtatgcctgcagcggatccggctttgcgggaggtatggaattccatgctcccagatatgtgtcatttacgcattcctccgcatcagaagtgttactcaggatgttctttgcgatcttaaggcacagcttgccatactttgatgcaagctccgaaatcgcctgctcagagcgtgcaaagaacagctcaattattttactatcttccaattctgtaatcctcctttcaactgtttactatggataaagagcaggatattacataaaaattttctgtttagattatactctcaataactgcaatatgtaaataccgtaaccccgatgtcatacgagctgttgacaaggaactgctttgtgttacaatcaaataaaagcagccagattgcatacgacaaaaggcacagggaggtaacaggtggaattaactttaaaaataaatgaaaatatatctgccaagcaggccgcaaagcttacagagcttggcagtatgattgaggagggaacgctgatagagcaggactgtcagaatgcagtcaggctttatatgattgcggcaaaggcaggagatccggaggctttttatcatatgggcagagtgtatatgaacggtatcggaactgcgcaggatattgcaaaggcgaagctttacttcaagcagggagcaaattgcggcaatatcgattccattgttgcgataggacgtatatacaaggctgagagcagcattgcgcaggctgcggcctccttatactctatctgctggttatagacggtaggaaaaatggaaaatctgataaaaataacagttgaagatgatatgaagggcagcagaattgatgctgctcttgccggtattgtgcagaatctttcaagaagcgcgcttcagaagctcatagagcagggcggcgtcagcgtaaacggacagatatgcacagaaaaaaaacgaagggttgaagcaggcgaccttgtggaagttctggttcctgagcctgtggagcttgatgttgcagccgaaaacatacctcttgatattgtctatgaggatgacgatgtgcttgttgtaaacaagcccaagggaatggtggttcaccctgcggcaggcaattacacaggcacccttgtcaatgccgtaatgtatcactgcaaaggcagactgtcatctatcaacggagttataaggccggggattgtccacagaatagacaaggacaccagtggcctgcttatgatagccaaaaacgacgaggcccacaaaagccttgcggctcagctcgaaaagcatacgattaaaagatcctatcaggctatagtctacaacaactttacagaggacgagggaacggttgacgctcccataggcagagatccgtcaaacagactcagacaggctgttacatacagcaattccaaggaagcatatacgacctacagggtgcttgagagattcggcaggtttaccctcatagaagctgtactcaaaacaggcaggactcatcagataagagtccatatggcatatataaaacacccgcttttaggagatactgtatacggacctaaaaagcctctctacggagcgcagggacagatgctccatgccaaaaccctgggatttgttcacccgtctacaggagaatatatggagtttgacagcgagcttcccgaagaatttcagacaatactcgaaaagctgaggagggacaggtaatatgggcaaaaggtcattcaagggcggagcaatgcttaatccggttcctgccgtaatggtaagctgcggaagcagaaagcccaatatcattacaatagcgtggacaggaatagtaaactcaaatccgccgatgacatatatatcggtcagaaaagaaagatattcacataatataattgaaaacacaggagaatttgtaataaacctgtgcagcgaggaactggcatttgcaacggatttctgcggtgtcagatccgggcgcgacacagataaattcaaagaaatgaagctgacgcccgaaagagccgaaattgtcaggtgcccgatgattaaagagtcgcctgtcaacatagagtgccgcgtgcgcgagataatagagcttggcagtcacgatatgtttatcgcagacattctcaaggtccatgtggacgagcagtatatagaccggtccggacgcatcagactggatcaggcatcgcttgtggcatacaaccacggcgagtatttcggactcaaacgtcagccgataggaaaattcggtttttctgttatgaagccaaagaccagaaaacgaattaaccgtgagaaacaagggggaaatcgcagaaccggcattaaaaaaacgaaataggtttgcagtgcaaagccttcccgaatgatatataaataaattaatcaacttattctcccgccagagaaaagtcagttgctatgaaaaacagtatattacaaaagtaataaggctggatatttaaatccatgaaatattagaagttatcttttaaaaaatgggcgcaggtgtcacagatatattcgcccttaaaagcgatttctccgtatggagcgccgcaaatacagcatattttgttcattttcgtctccttaatatattatttaccggttcggcgataaacctaaaataatatattatcagaggcagttcaatagcagcggcggcaaacgaccccgtaatgtaataactcggatttttaatgttatgaaatgaaaggagcttgagcttatgaacagagaaatagccattaaatcctcactcagaggacttaaagcctatgagttttcctgcagcaatcccaaatatataatgtgctgtgtgcatggcataggcgaatactttctcagatatgaaagaatgtcggaaatacttgaagaatacggaattaaaatgataggcatggatcttagaggtcacggcgccacagagggcaagcccggacactgcgcgccgagaaccgatgtgctttcggatatagacggcatgctggaatatgcaatggaaaattatccgggactgccgattatactttatggacacagcatgggaggaaacataggtcttgactacagatacagaggcagactcaacggagttccatgcgcctacgttatatcggcgccgtggattaagcttgtaagacctgttacgggagccctgtatcatacggtaaaccttatgtcaaaaattctgccgtcgcttaccatcggctctgacatagatgaaaccatactgggaaatccaaagcttgtgacaggatataacgacgaccctatgacccacaacaaaatcagtcttcagacggctatagaggggttttcaataggtaacgctctctatgacggcaaatgggagaaaaagggtaagggctgtgagaaaccgctgcttctgatgcacggtgactccgacaagatatgtgatgtaaacggctccagaaagcttgcggcaaatgagggcgatatctgcacatatgtggaatggccgggtctttatcacgaaattcataacggaggacctgaaagtacaggtgaagaggtaataaacaagatagggcagtggataacagaaactgtaggataaagaggtgttataatgggtaaaaagaaaatatacggaattaaacgtgaaataatatttatggcaatagcccttataattatgggagcggtctttgttatattccctgcggcaagcgcagtaaccatatgctatataatagcggcggctctgtgcgtatgggggattacaagacttgcaggatatttcagaaccagccggttcaacatattcggttcctacgggcttgtgcagggagcagtccttatagcaggcggcatattcatattcataaaacctgaattccttgcaggctttatagttacaatcataggaattataatgctggctgacggagtgctcaagatacagtatgccgttgatcttttgagaattaaaggacagggctggtggattatactgcttaccgcaatcataatggcggcagcaggcatagttgtactgttcaatccttttgcaagcgctgttgcgcttatgacctttgcaggcatcttcctcatagcagacggcattgccgacataatatccctgctgtatatctcaagaaaaataaacaggctcaaaaaagcaatggaagaaaaagctgacgatataatagacgttgactttgtggaaaaatagcaaccttgatcagggactcttcggagtccttttttaatgcagggaaacggataatctccatgataaaggggtttaaaaacagagaatataaatgacctgaacaatgaaggaatataacagtcgactttttttatgaaatttctacaaaacacttgacttgaacattgatgtccaatttataattaccatatgagagatttgcgttttatcagcgcaaatacagagaggaggacaaatttttaaatgaagaagaaatttctcagtatagcggtatgcttgtgtatgattatgacaacgataccgggggggtattacagcctgatgtagcatgggcagcagtgcatacatcacattgtgtatgtggaggaagtagggctatcggtgatcataccgaacatactgacatcacagactggaaggagtggacagaaacaacctacctgccgaaagaggccggcagctactacctgacccagaatgtggaaatcagcgaagcatgggagcctgcaagtggcacagtgctttgcttgaacggcaagaacatcacagcaaacggcagatttgatgctattgatgttcaagcaagtgtaacctttactttgactgactgcgaaccgaacagtacaaggggcaatatcacacacgcaaaggacagtaacaatgccgctctgagtggcagcggcgtgagtgtcaaagacggagcggtcttcaatatgtacggaggcaatattaccggtaacgaagtcaccatcggcggcagcggcgtgagtgtcgaagccggagcagacttcaatatgcatggcggaagcattactaagaataccgctcttaataacagcgccaagggcggcggcgtgaacaactacggaatctttaccatgaccggcggcacaatcagcggaaaccaaggaggcacagcgaacggcggtggaggcggtggcgttttaaacgccggcactttcacaatgagcggcacagcagtgattggcggcacgaatgccgaagatgccaatataggctataacggcggcggtgtatacaactacaataccggtcaattcaattttaacggtggcacgattattggcaacgaggctaacaagaatggcggcggtgtgtataatgagcaaggaagttcaacttttaccatgaccggcggtatcatcaagaaaaataaagctaagaatggcggaggggttgctgtcaacagtagtgctaccttcaccatgaccggcggaactatcggcgatgcaaatagtaattacggtaacacagtaaccaacgagggtggcggtgtgtgcgtcttatccggcatctttaatatggacaccggaaaaatcatcggaaatacagctgtcggaagtaagacagacgaatatagaggctggggcggtggtgtgtacatttccaccggcacattcaccatgaccggcggcacaatcagtagtaatagtgccatcaaggagcaaggaagtgcgggcgcactaggtgcgggaggtggcgtatacaataatcgtagcggcacattcaccatgaccggcggcaatatcagcaataatacctctgattcacacggcggaggcgtgtacaatagcggcacatttaccatgtcagataccgcagccatctccggcaacacggtgaccaatgaaacctgttacggcggaggtgtatttaattacagcagcttcaccatgaacggcggaactatcggcggattaaacgaaggcgatgcaaataccgcaggattcggcggtggtctttaccatggagacggcgaagcacagttgaacgggggaatgattcaaggaaacatcgctgcaaaaagcggtggtggcgtgttctacactaaaaacattactttgaagaatgttaccatcaccggcaacaccgcaaatgaagatggtggtggagcatggatgggatttgttgatgatgctgttatgacggtcgacggaaccactaccattacagacaataaagataaagacggcaaagccaacaatgtggacttaagaatgggcaaatcattgactgcagatgcatctctttccccttccgctcgcattggcataacaacactgacaaacaacgaaaaaactttggtgaaaaactcgacggacacgaaagtttttacaagtgacatgagcggttataagctgattgatgatggaaacagtggcttgaagctggcggtagacgatggttcgactccaactcaaacagggcacaaacactatctctgtggcaagactcacacggaggtaggcgaccacacttcggatgaagagaccaaatttacggcatggacaagaacagacagcctgccggatactgcaggtaactattacctgaccgaggatgtaacactgacaagtgctgttgagtacagaggcggaataggcaaggactattgcggctgggacgtgccggatggcgtagttctttgtctgaacggccaaaacataaccatgaagaatcctgacgggatgactgacgaagttgatgtcattaaggtatccggtcacttcacattgacagactgcaagactggcgacgcacaaggcaaaattacgcacgcgacagatgcatccagcactaaatgcgaaggcaaaggtgtgaaagtactcggcggcacatttgatatgttcggcggcattatcagtggcaacacaacaaactatgacatcggcggcgggggtgttagcgtcgaaggagtttctgatacaacaaaggcaagcatatttaaactgtatggcggaaaaattagcggaaatactgcaaagagcggcggtggcgtgcatgttagaagaactgtttggtgtggtccatccgaattccgtatgtacggtggcagtattacaaacaataatgctgacagtgatgctggaagttacggtgtaggcggcggcgtatatgttagttggacaagcaaatttgtcatgagcggcggtaccatcagtggaaacacagcaactcagaatggtggcggtttatatgcttctgcattagcaaaggaatatgcttctagctcaggcggtgcagcgacattgaatgtctccggaaatgctacaatcagggataatacggtagataacaagaagaataatgtctatctggacagttctacaacagatatagatgcggtcagtgcgacacttacgattaataatccgctgacaggtgcgattggagtgactccggcggaagtccctgttaccattgctacaggtgcagaaagtaatacagactacagcaccgttataacaagtgacaatgctgattatgaaatcgctcacgacagtgacgatgctacgaaactgatactgaaggatccaaatgcacctatacctgtaaaggaacacaggcattgtgtatgcggtgaaggaactctttctgctgaagggcatgaacataataaagaacagaagtggacagagacaaaaactttaactaatgatatgaaggcaggctgttactatctgacggatgatgttatactcacaggtaaatggaagcctgcaaataatgtagtgctgtgtcttaacggttataatattatctgcaatgcgggaacttatgatcattctgtttctgccattgacatagactctaatgatactcttgttctgacagactgccataccggaagcgaggcaggtaaggttactcatggcaaggacagctcagataaaagatttatgggcagaggagtatctaatcacggaactttcataatgtataacatcagtattgccgataacgataatacaagtacaagctttagcggtggaggtgtagagaataatgccggtgcgacatttactatgtataacggcagtatcaccggaaacaaggacgttaatggcggcggtgtatacaacaactatggaacttttaacatgtatggcggcaccatttcgggcaacactgcaagtaataatggcggcggcgtatttaatgcaggaaagagtgacagtaatgctgtatttaacatgtacggcggcactgtcaaaggaaacgccgcattatcaaccggaactgatttctctaacggcttaggcggcggtgtgtgcaacgccggcagcttcaatatgcacggcggtgttgttggaggtacggaagcatctgatgcaaatatcgcaagcaacagaggcggcggtatatatgacggcagagcttattacgacagtaaccctgtatttaacatcagtggcgctgcaaatatcatcgggaacaaggtaaataccaaggataataatctgtatctgtacaaccaggaaaacactgtgacagtaactgctgccggattagaagaaggtgcacgcataggtgtgagcagcttcacagaaccgtcagatgaaaatcctgttatcattaccagtacaggctgcaatgcagcgtacttcttctctgatgataacagctgtgaaatcggttctgattctgataacgcagttatattgaaaaagaagaatattactcatgagcacacatgggatacagcgtggaagcacgatgacacctaccactggcatgaatgcactgacactgactgcacagagctaaacggcaaggcagagcacacaggcggcacagccacatgcacggaaaaggcagtctgcagtgtgtgcaaagcaccttacggcaaagtatcaggacatgactttggcggtgaatacaaatacagcgctgcaggacactggcaggaatgtcagcgtgaaggctgtaatgtgacaggcagtataactgatcatatttatgataacagcagtgatgccacctgcaatacctgcggctatgttcgcactgtcaaaccgggtacttcaggcaaaacagataatgttataaacaaggcagaagacaggaatgcgggaacagtagcatcaacaactgctacaattaagccttctacaaccacttccggagaaaagaagactacaactgcaacagttgataatacaaccgcaaacaaaatccttgataaggcagtttcaaacaagtccactgaggtaattataaataccttgaccagggcaggtataagcgaagcgcaggcaggaactgcaactgaaatagctctgcctgaaaaaacagtcagggagctttcagaaaagacagaagcctcgctcataatcagagctgatgctgcggaaataactcttgacaagaaagctgttgacggacttgcagcgcaggcaggaaccgacggctatgtaagacttattgttgaaatcgtaaaacaggattcaaatacccttgaagcggaacttaagctcgtaacatcaaatggcacggtaacagactttaagggcggcaatgtttcagtaatggttaagcttaatgatacacttgctgcaaaagaccttgtatgtgtatatattgatgatagcaacatatatcatatggtaaacggcgcaaagaattcagacggcacatacagctttatgacaggtcatttctcaacatatgcggttatggcacgcagcgaggcagagaaggtaattgcagagcagaatgcagacaaggcgacagaacttgttaagtcagttaagctcaaggcccgttctgcaaagacagcaaagggcaatatcagagttactctttctgtggcaaatggcagggacagcattaaggcgcttgaagatcttggctatactgtaaagtacaaatattacagaagcacaagcagggctaagaactacaagtcgatgcttgaaggtaccggcaaaacatatatcaatgctgccggcaaaaaaggtacaaaatacttctacaaggcaagattaacggtatatgatgcacagggcagacttattgcaaagacagagcttaaacagtgcagatatgcatgcagagtaaagtagatgactgagattaataattgaatggaattcacctgaataatgagggcggtcagagatggccgcctttataatgggtaaattttctgcgctggatacatatttatgaattaaagtataaatataggtaaaatgatgacatataatgtggttaatgtagcagatatacattaaagagcttgtttaaggcaaaaaaactaaccaatggttaatatcttttttgaaaaaaatattatataatcccttgacaaaggtaatttaaagggaaggaggggcatcaggtaagcagactggtaaggtatagaggataaattaacttagtaaaggaggaattatatagtgaaaaagagattattcagcatacttctgtccatatgtatggtattaacaatgataccaatggcaggtgggggggtgtttgctcagacaactgaacataaacattgtgtttgtggtgcagaacataaggaaataggtaatcataaaacagaagatgcagacgcatcaaaaatatttcaggcttgggaaagtgacagtaccttgccaggtacaaaaggaagatattatcttacaaaagatgttgtgataagtgaaacttggcagcctgctgatggtactgtattgtgtctcaatggtaagacgattagtatgaatgcagcaaaagatgcgatatcagtaggcaaaggtgaaacatttattctgactgactgtaaagaggcacagggaagcattacgcatagaataaattcagaagcgactacgtatgcaggcagaggaatgagtgttgccggcacttttactatgtatggaggaaacattacaggtagtaatcttgaatgtaatagtaatgaagtctttggagcaggtgtgtatttggctcgggaaagcggagacaatagcagtgagccaaatttcacaatgaatggcggaagcattgcaggaaatataataaagaaaatgtcttattccgggaatgcatgtggaggcggtgtatatgtagaagcaaatacaatctttacaataaatggcggaagtattaaagataatacgacagctgaaggcacttatactaacgggacttacggtggaggcgtgtatgcaagaggcaccgtatatatgaacggcggaaatattataaacaataaaagcgagcggggcggaggtgtgtatatataccctgctgcaaagttctatatgagtagtggaagtattaacaataacgaagcagcgagttcaggcggaggcgtgtatatagccgaaagtagtgattggggtaatacaactcttgcaatgagcggaggaagtattacgggaaacgcagtaatcagtaatcttactagctctaacggtggtggagtatataatgcggcatccataaaaatcagcggtaatgtgcaaattgcgggcaacctgaaaaagaagtcagagcaagatgccggtactgcaaacaatttatatctgccggaaattgctacaatcaatggtgcaattggaaatgatgcaaatataggagtgtcagcattcaacacacctgaaaaaggtaaacctgttactattatcgatgcatatgatacagactatagcaagtacttccattcggataatgagctgtataaggcgtgttatgatactagcgataagaaaataaagctgaaactattattatcacaatcaaagtttaaatttacagacaaagataaaactataactaaaacatatggtgagacatttacaaatgcagcaacaggagcagcagaaggtagcacagtaacttattcaagcagcaacgaaaaagttgcaacagttgataatgatggtgctgtaactgcaacaggagcaggtactgcagtaattacagcaacagcctcagagactgatgattataaagaagcaacagcctcttataatttaattgtaaataagagaactgccgttgcaggcgactttatttttacgcctcctgcagatttaacctacgatggtaatcctaagactgcacaggttgctttaaaaagcaaatatacaggctgtggtgacattactgttaaatattatgatgagtcaggcaatcagatcgaagcagtaaatgcaggtacatataaagttaagattgatattgcagaaggtgagaactttgccagtgttaataatctggtggttggtacatttactgtagatgcaaagcaactggaagaaggtatgattgcggatatagatgcacagacatataccggcaatacgattacaccggaggttactgtaactgacggaagcaggaaactggttgaaggtactgattatgatgttacatatgaaataaagcctgacagtacaggtgctttaagtgaaaataagccgattggcgcaggtacatataatgttattattacaggtaaaggcaattacagcggtgcagtaacaaagccttttgctatatcagctaaacaggaagcagatgttatcgcacctgaaatcagagtactggcaggtgagagcagagaggttgacctgagcagctataaaaagaactctgcagatgtaatgggtggtgcatatggtgacagcaagcttatatttgaaaataatggtctgccacataaggtacagggcgcagacaaggttggatttactgtaaagagcgatgctgctgcaggtgaaagcgacataattactgtaggtgttgactctgctgacggcaatacatactatgacataaagt

SEQ ID NO: 3708 - DNA, 5105 bp, Unknown
  16S sequences of unknown bacteria
ggggttcgcggcgcttgagtgtgggttctgccgcgctaagaacgccggaaatatcctgatgaagaacttgatggatttctgtatcggtactgcggttttcattcttctcggctattcgctgatgatgagcgaggattacatcggcgggttcatcggcgtgccgaatctgcatattttcactgacttttcgaatttcatcaatggcaacgcttcgctcttcgtattcaaccttgtgttctgcgcgacggcggcgacaattgtctccgggtcgatggctgagcgcacaaagttcagttcctactgcatttattccgcggtcatctcgctgtttgtatatccgattgaggcgggctgggtatggaattctcagggctggctcgcgaagctcggattcattgatttcgcgggttccgcggcgattcacacggtcggcggcgtaaccgccctgatcggcgctatcatggtcggtccgcgtatcggaaagtacacgaaggatcctaaaaccggaaagatcaccgttcacgcgattctcggtcataacattccgctcggcgctctcggcgcgttcatcctttggttcggctggtacggattcaacggcgcggctgccacaaacggcccgcagctggcttcgattttcatgaccacgactgtcgcccccgcgatcgccactgtcactacacttctcttcacatggatcaaaaacggcaagcctgatgtctcgatgtgcttcaacgcctgcctcgccggtcttgtcggcgtcaccgcgggatgcaacaacgtcgacgctctcggcgccgctataatcggtatcgtctccggtatcctcgtcgttgtggtcgtcgaaggtctcgacctcaaactccacattgacgacccggtcggcgcggtcggcgtacactgcgcgaacggcatctggggcacgatcgccgcgggtcttctctccaccaacaccgctccggcgggcgttgacggtcctgtctacgcaatcgttcacggcggtgacatcggcgccggcttcaaagtcctcggcgttcagctcctcggtctcgtcgctatagtcgcgtggatcacagtctgcatggtcaccaccttcacaatcgtcaaaaagacaaacggtctccgcgtctcccgtgaggaagaactcgaaggtctcgatcccaccgaacacggcctcccgtccgcttacgacggcttctcaatggctcccgaacacatcatcgaggacggcacctccgttcccgctgtctccggcgacgttccggtcgctgaagcggtcgaggtcaaatccgttccgtccttcgaagctcccgctcccggcggaaagaagctgaccaaagtcgaaatcatctgcaaggaagtcaaactcgaaagcctcaagaccgcgatgatgaacatcggcatcaccggcatgaccgtctcgcacgtcctcggctgcggtatccagaagggcaaactcgaatactaccgcggcgtcgccgtcgaagctacgctcctcccgaagattcaggtcgacattgtcgtctcgaaggtcccggttcagcaggtcatcgacaccgcgaaggcagtactctatactggtcacatcggcgacggcaagatcttcgtttacaacgtcgaaaatgtcgtgaaggttcgtaccggcgaggaaggctatgacgcccttcaggacgttgagtaattaaagtcagaggggcggaaaaccccttttgaaaaaggggttttccgagccccaacgttgtaatcgcgcacgcgcgattacaacgcgacacctccccacctttcccccaaacttttcaaaattatggattggtgagatggtggagtatattcaaaaattattgcagaagtcccttccgtcgggaaatccggcgggaggaatttctgcccacacaggggaaagttataaatcacttctttcaaaggaatccgcacaatcttcatccggagcgaattacattcatttgtataaagcttgagggatggagggggcgccgggggaggaaggacccttcccgaagggtccttcctcccccggcaaacaaacaattaacaagaggtaaaatatgaaaaacacactgtacagcccggagtttgagcatgacgcctgcggcatcggcgctgttatatctatagatggaataccgtccgcgggagtcgtcgacgacgcgctctctatcgttgagcggctcgagcaccgcgcgggcaaggacgcctccggcaaggtcggcgacggcgtcggaatcatgcttcaggtctctcacgagttcttctccggggtcgccggggaaatgggaatagacatcggcggcgcgcgcgattacggcgtcggtatgttcttcttcccgcaggatacgctcgcgagaaaacaggctcagaagatgttcgaaatcatctgtcagaaggagggcgtcgagttcatcgcctggcgcgaagtgccggtcgactcctcgattctcggcgagagagcgctcgacaccatgccttatatctgccagtgcttcgtcagacgccctgacggaacagaaaaagggctcgcgttcgaccggaagctctatgtcatccgcagagtgttcgagcagtcgttcgacgacacatatgtcgcctcgctgtcctcgagaacaatcgtgtataagggtatgttcctcgtcgggcagctcagacggttctatctcgacctcagggacgggaagtactcgagcgccatcgctatggttcactccagattctcgacgaacacgatgccgtcctgggagagggctcacccgaaccgctttatcctccacaacggcgaaatcaacaccatccgcggaaacgccgacagaatgctcgcgcgcgaggagactatgtcgagtgaagtcatgaaggacgacatggacaaggttctgccggtcatcaccgcgtccggctccgactccgcgatgctcgacaatacgctcgagttcctcgtcatgaacggaattccgctgccgctcgcggtcatgataatgatccccgaaccgtggaagaacaacccggacatcacccgcgaaaagcgcgacctctaccactactacgcgacgatgatggagccgtgggacggtcccgccgcgatactcttcaccgacggcgatatgctcggcgccgtgctcgacaggaacggactcagaccgtcgagatattatataaccaaggacagacgcctcatcctctcgagcgaggtcggcgttctcgatatccccgccgatcagatcgtatgtaagtcccgccttcagccgggcaagatgctgctcgtcgacaccgtctcgaagcgtgtcatctcggacgaggagtgcaaggaatactacgcgaagaagcagccctacggcgagtggctcgacgggcatctcgtgaagctctccgacctccccgtgccgaatcacaaggttccggcgtacaagcaggacgagcgcgaaaggctctgcaaggtcttcggatacacctatgaggacatctccggcgcgattctcccgatggctaagaacggcatcgagcctaccgcgtctatgggcaccgatatcccgctcgccgttctctccgagaagcaccagccgctcttctcctacttcaagcagctcttcgcacaggtcaccaacccgccgatagacgcgctgagggaagagatcgtcaccgacaccaccgtctacgtcggctcggacggcaatctcctcaccgaaaagccggacaactgcggggttctcgaaatacacaacccgatcctcaccggcgtcgatctcatgaagatacgctcgatgaacaagccgggcttcaaggtcgagactgtctcgctcctctactacaagaacacgtcccttgagaaggcggtcgaccggctctatgtcgagtgcgaccgggcgtaccgcgacggcgctaacataatcatactctccgaccgcggggttgacgagtatcatgtcgccatcccgtctctgctcgccgtgtccgctatcgagcagtatttcgtccgcaccaagaagcgcaccgcggtctcgatcatcctcgagtcggctgagccgcgcgacgtgcaccatttcgcgacgcttctcggctacggcgcgagagcgatacatccgtatctcgcgcacgagtgcatcgccgagctcgtctcgtcaggacagctcgacaaggacgtctataccgcgataaacgactacaacagcgcgatacttcacggcatcgtcaagatcgcgtcgaagatgggcatctcgaccctccagtcctaccagtccgcgcagatcttcgaggcggtcggaatctgcaaggaagtcgtcgacaaatacttcacgaacaccgtcagccccgtcgagggcatcggactcgcggagatcgaagagggcgtcgagtggaggcataaccacgctttcgatccgctcgggctcggcgtcgacacgacgctcgattctgtcggcgcgcacaagctccgctcctcgacggtcgccgaagaccacctctacaacccgcagacgataatcgccctcagagaagccgctcagaccggcagttacgcgagattcaaggaatacaccgcgatggtcgacgacgagaagaagccgcacaccctccgcgggctcatcgagttcaacttcccggaggacggcggaataccgctcgacgaggtcgaacccgcgagcgaaatcgtaaaacgcttcaagaccggagcgatgagctacggctcgatctccgaggaagcgcacacctgcatggctatcgccatgaaccgtctcggcggcaagtcgaactccggcgagggcggcgaggacccggcgagattcggaaccgagaagaattccgcgataaagcaggtcgcgtccggacgcttcggcgtcacgagcggctacctcgcgagcgcggaggaaatacagataaagatggctcagggcgcgaagcccggcgagggcggtcatctgcccggaaagaaagtctacccgtggatcgcgaagacaagatactcgacccccggcgtggcgctcatctccccgcctccgcaccatgacatctactcgatcgaggacctcgcgcagctgatcttcgacctcaagaacgcgaaccgcgcggcgagaatctccgtgaagctcgtctcagaggcg

SEQ ID NO: 3709 - DNA, 2314 bp, Unknown
  16S sequences of unknown bacteria
ccttggagagaacctcgcgtcccgcggcgacgagctcgtctttgaactgggcttgcgctgcgcgtgcctgctcgagcgcgcggtctgcgacatctggggcaattccaaatgcctctttcaggtacgcgcgcagctgacggcgcatgtcgcgggtgctgtaccagtggaacagcgggctgtcgaagggtatgccgaagcgacgctcgggattgtcggaattgcggatgaccagcgggtatcctttgacgacggcgcacatcgacacgctcgtatcctgacggttctccgtcggcaccgtcgtcacgaccggcatgaagattctgtcgacgccctgccgtgccaggtccctgaggtgcccgtgcacgagtttggcggggaagcagacggtgtcggaggcgatggacggcaggccctcctcgtagcatgcgcgcgtgctgaggtgcgagagcctgggcgtgaagccaagggcgcgcagcagcgtcgtccaaaacggcgcctggtcccacagcgccagcacacgcggcaggccgatgacggtgtgctggtctggcagcagcggcgtgcacgggtattccttgaacagcagctgttcgcgggtcttgaacaggttggggaccgaggcggcttgtgcgcgcacctgcttgagcttggcgcgggtctgctcatcgccgaggtctccgacgacgctgccgcgctcgcagcggtttcccgtcacgaacgttgacccgtccgagaaggtcacgagcgtccgcgcgcacgcgttgccgcagaacgggcaggtcaggttcgagcgctgccggtaggagaatgcgtcgagcgcatcgagcccgatgaaggacgacatgcagctgccctcgcgtgcgacctgttcttcgacctgcgctttcacgagcaacgcggcgccgatcgcacccatgagaccggggtagggcgccctcgtcacgggcttgccgatgtagtcttcgaacgcggcgagcacggcgtcgtttctgaacgtcccgccctggaccacgatgtggtcgcccaggctgtccaggttggagacgcggatcaccttcgtaaagacgttttcgacgatggagcggcatagccccgccatgatgtcgtttgcggtcttgccgtttttctgttcggtcacgacgctcgagttcatgaataccgtgcagcggctcccgagttgggcgggccgttccgcgtcgaaggcggcggatgcgatatcttccatgcggatgttgagcgactgcgcgaacccctgcaaaaacgagccgcagcccgacgagcaggcctcgttcacgacgatgtcggtcacgatgccgtcttcgagccagatggccttcatgtcctggccgccgatgtcgagcacgaaggtcgcctgcgggtcgtactcgactgcggcgcgggcatgggcgacggtttccaccatgtgcaggtccgcatggaacgcgtgggcgaaaagcgcctcgccgtaacccgtcgccgcgcatccgaggatctcgagctctacgccggcatcctcgtacgtgctcgcgagcttcttgagggcttcgacggcgatgtcgagcggttcgccctcgttcgtcgcgtagaacgcgtcgacgagctgcccgtcttcgtcgacgagcgcgaacttggtcgtcgtcgaacctgagtcgatgccgaggtaggcgcgcaccgtgctgcccggtgctctcgtggcggcgctgcagacatcgggcaggcggtggcgctcggcgaacgtctggcgctcggccgtgctctggaagaagcgggcccctgaagcggcatgttccgagagctcgcgtcgtgcctgtgcgagggaagcgagcagttctgcggagctgcgctcggcatccgcgtgcgcgaacatgccttcgagcgcgaaggccgctcccagggcgacgatggcctcgggacgttttgggcggatgatgtcttgcgccgagagtcccagatgctcggcgaacacgccgatcagatgcgggttgaaggtgagcggcccgccttcgaagatgacgggcgggtggatgtcgaggccctgcgccaggccgccgagcgtctgcttggcgatggcatgaaacgtagagagggcgaggtcctccttgcgcgcgccggcgttgaggaggggctggatgtcggtcttggcgtacacgccgcagcgccccgagatgtcgtagaccgtggagcccatcgctgctgcatcgtcgagccgttcgacgtcgatcttgagcagcgcggcgatctcgtcgatgaacgcgcccgtgccgcctgcgcacgagccgttcatgcgcatgtcggtgacggtaacgacgcccgc

SEQ ID NO: 3710 - DNA, 13148 bp, Unknown
  16S sequences of unknown bacteria
aacgtatcaatgaccgtctgttccagcgcttcctcgtccaagatccaaccggaaccgccgcccacagagccggaagtgcctgccagctgtgtctgctgcatggtgtctgggttgatattcttcaagatcttggcataggccaccatctcatccgtactcaaattggtgaacacatatttggtcatgctgctgtatatgctcggaatctgcgtaacctgcatatccttgatcgccttggccaagcccatcagaaactgcatttgtctttggccacgcgaaatgtccgaaccgtccatgcctgcgatcttgcgctgtatgcagaaggtaaaggcctgatcacccgtcagcttgacggtttcgccttccttacccacgccggttaccgattctttcagtgtcacagtcacgccgcccaccgcatcgttgagcgggctaacgccgtccatattgatgccgccgtatttatccagcgggatgtcatatttgccatcacaggaaagcaggcgtttaacgcaatataccacgttttccgcccctttgttacggtcctggtttccgccgccgtatgggaaagaggaattcagcttattatagtcctccttatatacattgccgtccgtatcgatgtggcgaatcaatgccttggaatctcgcggacaaacaatcattttgatggtattttccacaacatccaccgcgcagaccaccatcgtatcgctgcgggcgcccaagccctctcggccttccgcctcggactggtcgatgccgatgagcatcaatgtcaccaggttatcgttgtagtaataccgttctcccttatacgtcacatacgttttgggtttgcttgatcccaactctccatcgttatccagcagaatgtccgggctgatgtttttcagccgctgatacgccgcaaaaaacacaccacctgcccctacaaccaaaaccgccaggatacaggaaagaatcttgatcaactttcttctgttcaaatgcgttgcctcctaaattgcaagtctgccatttgcatggcagactctacaatgtagtacgttaaatatccaaataattgccgcgcttataatcgtatacagcgctgtaactatcgatatcctccaatgccttgccggttccaatggctacacagctgattgcatcctccgccacataacacggcaacttggttttctccgtcagcatccgatccaagccattgagcagtgagccgccgcccgtcatgcagatgccattttctgaaatatcagccgacaattccggcggggtgcgctccagcacgccatgcaccgcttcaaagatgagctgcactggctcctccaacgcctccaaaatctcgttgcccgccacacggacagttctcggcagcccagatactaggttgcggcccgtaacatccatatatacctcttcgctacgaggataagccgtaccgatgttgattttcagctcctcagccgtcctttccccaatgaaaaggttgtgttttttacgaatatagcgcacgatcgcttcgtcaaacttatccccggccaccttgatggaatcgctgaccactgaaccgcccaacgatacgaccgctacatcggatgtaccgccgccgatatccaacaccatagagccgtaaggggccccaatatcgatgccggcgccaatggccgctgcaatgggctcttcaatcaaataggtcttacgcgcacccgcctcatccgaagcatcgattacgctccttttttccacttccgtcacgccgctgggcacgcataccacgaccctcggcttgaaaaacagtttacggccgatgactttgtttagaaaatatcgaagcatgcgctctgtgacgtcgaagttggaaataaccccatccttcaacgggcgtatggccacgatgttgccaggggtacggccgatcattcggcgcgcttcatctccgatggcaagcattttgcccgtaaatcgatcgatggccactaccgatggttcacgcaatacgatcccttgcccctttacatacaccagcacgctggccgttcccaaatcaatcccgatatcgctatattcaaatagtttgctctttccaaacaaagccattgtatcgccctcgttcctgcgtttttctatattctttcctttttcccaaaaaagtgtacaaaataccaaaacaaattcactttatcttaccctgtttgtgtccgtttttcaactctctttacttcacaaaacgccagaatcagacaagtttgttgttcagtctaccactacacagtcctcgatgcaagaaaaaaagccccggttattcggagctttgttttgcttgtcctccttattttaccagtgtgcgggctcagccctgcgcggctttgtatttgcggtgtgttgcttctccaccccttaaatgcctttccgccttgtttttttccagcacaacacgtacctgcctgtatagctgcaaattcaatctttgcaatcgatcgcaaacatccttgtggatggtgctcttgcttacgccaaattgcctggccgcgtcccgtaccgtcgcgcctgtttccaggatgtatccggctacctgcatcactcgttgttcgatgtatccgcgcatttccccactcaccctttttcacagtttgtacagggtatgaagaaaagcggccatttatgctgccagatgggcagatgcgctgtttttctttattttcttcgcggttttggctttgcagtctgtcttttcgccgtgcgctgcgcggccgcgcgtttccctccttgcacaggaggcttctttccgcccggccttttctccggccgaaccaggcactttggcccaaagcctatcagatcctcccggtgtgcccttctcagtgccaggcgcaccaaatcggcgttttccggccggtaaaactgaagcagcgcgcgctgcatgcgtttctcctttggatctttgggaatatataccttttcccccgtccgcggatcctttcccgtataaaacatcgtagtagacaacgtccccggcgtgggataaaaatcctgcacctgctccggccgctgccccgtctttttgagatagcaggccagctctatggcgtcttccagcctactgccaggatggctggacataaaatacggcacaatgtactgctctttgcccaagcgccggttgatggctttgtaccgcttcacaaatcggtcatagagctcatggtgtggctttcccatcagccgtaagaccctctgcgacacatgttccggcgcaaccttgagctggccgctgacatggtgctgcaccagctctttgaaaaaggtaccatccttatcatacataatataatcgtagcgaaggccgctgcgcacaaataccttttttacatggggcacctgccttaccttccgcagcagcgcaagataatcgcgatgatccacctctaactgcgggcatttgggtgataggcactggcggtttttgcaaacgccgcgctttagctgatctttgcatgacggctggcggaaattggccgtcggcccacccacatcgtgaatatagcccttaaacccttcctgatgcgtaatggcctctgcttcttctaaaatggaatcatggctccgcacctggatggttctgccctgatggtaggtaagcgcacaaaacgagcaggcgccaaaacaaccccggcaggaggtaatggaaaaggagacctcgtcgatcgctgggatatgctgggtatagctggggtgcggctttctggtatacggcaaagcatatacctcgtccatctccctagtattcagaggggcagaaggcgggtttaccaccacatagcttgcgccatgtttttgtgccagccgcttgccacggataccatccgtctcctgctgttggcgtaaaaaggcgcgtccatacgcatctttatccgtgcacaccgtttcaaaggagggaatttcctctgcatccgccacctcttccaagctgtgcgttaaatagcaggtgcccggcacatacgtgatgtccttgatatggatgccagcgtccatagcatctgcaatttccaccaccgagcgctcccccatgccaaacatcaaaagatctgcaccgctgtccaccagaatggaacgccttactttatcatcccaataatcgtagtgagcaaaccggcgcaagctggcctctatgcctccgatggcaatgggcattttggaataggcttcccggatcttattgcagtatacgatggtagccctatccggtcgcttgcccgctttgcctcccggcgtataggcgtcgtcgctgcgtggccgcttgcctgcagtataatggcaaaccatggagtctatgttaccggccgttaccaaaaagcccagccgcggcctgccgaatcgcttaaagtccgcagtggaatgccaatccggctgtgcgatgatggctactttatagccgtggctttccagtacgcggctgatgatggcggcgccaaagctgggatgatctatataggcatcgcccgtcaccaagcaaaaatccggcctatcccagccgcgttcttccatttccgcccgtgtcaagggtagccattgctgctggctcaagcgcgtccctcctgttccttttgatactgccaaggccccagcttataataatcgccgccctggcagtccatcgctacgatggcggggaagtcctctacctccaaacgcgccaccgcctcgctctgcaattccggataggcaaccacttccctgtgctttacatgcttggccaacagcgcgcccgcgccgcccagcgccgcaaaatatactgcgccgtatcgaacagcggcctcctgtaccgcctggcttcgggggcctttgcccatcatgcctttcagcccttgagccagtagcttaggggcaaaagcatccatgcgtccgcttgtcgtagggcccaggctgcctaccggcatgcccggctttgctggcgtggggcccgcataatagatcagcgccccttccagctccatcggcagcggttgtcccttttccagcgcttctaccattttggcgtgtgctgcatccctggccgtatagatggtgccgcaaatgcgcacctgatctccggcttttaggccccttatttggtcctcagtcaaaggcgtatgtattcttttgattttcatgctattctcctttacagcacagcctgtacatggcgcgccacatggcagttgatattcaccgccacaggcagccctgcaatatgggtggggtatgccagtatctttacggctagtgccgtggtccgccccccaaagccctgcggccctatacccagcgcattgatgcgcgacagcagctcctgctccatctctgcatagtagggatcgggatttggcttgtccaatggcagcatcagcgctttctttgccaagagcgccaccctgtcaaaactgccgcctacgcccacgccgactacgatgggcgggcagggattgccgcccgccctgcgcaccgtatccacgacaaagtccttcacgccctcagccccggcagagggcgtaagcattttcagcccgctcatattctcgctgccaaagcccttgggcgccagggtgatggttaccgcgtcacccggcaccatctccacatgcaaaagcgcaggcgtattgtccaatgtattgatcctgcgaagcggatctgctacgacgctctttctcaggtaccctttggtatagccgcgccgcacgccctcatcaacagcgtccttgagcagcatcccttcaagatgcacctcctgccctaattccaccatcacccaggccatgccggtatcctggcagatcggcatctcgttttgcgcagccgtctctgcattttcaacaagctgtgataaaatcatccttgcaggtgcaaacggctcttggtccgcggcacagtgcatggcgcacgccacatcctccggcagctgccggcaggcctgtatgcaaagcgcctctacggcgccaatgatctcatcgctgtgtacgatcctcaaaaaaatcccctcgatttaataaaattttatatttctttttttctcgttttattgtattatgattatatcttatttctttctattgtgacacgcaagctgtatcaaaggttcacgttgattgtatgagccaatatttctaacatatatttttatttttgtagatcattttagcaaggaagcctttgtgccttccctgctatgatttttaatccaattttggaaaggacggaacaaaatggaaaaatctaaggtgtacttctccgacttccacaccgtcgacggcctgagcctgccgaaaaagctggctcgcttgatcaagcgtgccggtttcgacaacatcgattttgaggacaaatttgctgccatcaaaatccacttcggtgaacctggcaacctggcgtatctgcgcccgaactatgccaaggtcgttgtcgatatggtaaaagaacgcggcgggaaagctttcttgaccgactgcaacaccctgtatgtaggcggccgtaaaaatgcgctggatcatatggattctgcgtatgaaaacggctttaaccccttccagaccggatgccatatcatcattgctgacggcctgaaaggcaataacgaggcagaggtgccggtagaaggcggcgagttcgtagaaaaggccaagatcggccgtgctatcatggatgccgacgtattcatcaccctgacccactttaagggccacagctccacgggctttggcggctgcttgaagaacatcggtatgggcagcggctctcgcgcgggcaagatggaaatgcattccagcggcaaaccgttcatcaatcaggacgcttgcatcggctgcggtacctgccagcgcaactgtgcacgcgatgccatcaccatcacggaccgcaaggccaccatcaaccatgacaactgtgtgggctgcgggcattgcattccggtatgtcccaaagacgccatcacgccgccgtttgaccaggcgaatgacgtgctgaataagaaaatcgcagaatacagctacgccgtgcttcatggccgcccgaacttccatatcagcttggtatgtgatgtttctccgctgtgtgactgctgcagcgaaaacgatgtgccgatcatcccgaacgtgggtatgttcgcttcttttgatccggtcgcgctggatatggcttgtgcagacgcgtgcaacgcgcagcctgtctttgaaaacagcgagctggcccacaaagaacatgtccatgacgaccacttccgtaacctgcatccggataccaactgggaatcctgcgtagagcatgctgaaaagcttggcttgggcagcagggagtacgaactgatcaaggtgtgatcatatacgataggccattgatcttaccaaaacaggcgcccgttgtaggcgcctgtttttttgatttctccgcttcgcttcgtgtataataggaaaaaactttggaggccctagatgatctttcgctttgccaccgtacaagacagcgctacgcttctcgagatctatgcgcagtatatcgaaacccccattaccttcgaatgtgccctgcccacggaacaagcttttgccgatcgcatccacagaattgtacaggagtatccctatctggtatgggaagacgactcgggtcgtgtattgggctatgcgtatgcccaccgccaaatggagcgtgccgcgtatcaatggaatgcagaactctccatctatttagaccgcgcgcatacctctcaaggatggggcaaaaaaatgtatcttgctttgatggatcttttagcccttcaaggggtcaaaacggtatatggtggcgtaactattcccaatgaaaaaagcgagcgcctgcatgcctgcctgggatttcagcgcctgggaacttatcataataccggctataaatgcggccgctggcacgacgttgcctggtttgaaaaggccttatctccttacgaatatgcaccgcggccgatcgttgggatccaggcggtccctcaggccgaaaaagatgctgttttgcgcaaatatctctaaattcttatattaaaaaagccggcgattcgccggctttttccctttattgttttgtaaatgagatgatggtctctatctccgaatctgttttggcatattctatctttacaatcgttcctacattgcaggttacgatggtctcataggtgctggcaggcaccacaaacatcttgccatccacgccttccagacggatatagaaataggtattaccctctttgacaatgctcttcatctcggtaatggcgccctctgccgtttctacaccggtattgctgttggcgtctatgccgatgccatgctggctcatcagccgcaggtattccttttcgcattccggcacggtatcgccgatggcaaccacttgatactggcctacgttgaccattgcatactttttcaccagctgcgcatcatccttgagcgagacaaaataggtgggctggccgccgatattcagcagcagcgggaaggtggcagtatatctcaagttctgtacctgtccctctgccgaagccatggcagatttttcgtccgcacccggcaccgaataatacttggtttccttggtgcgctgattgaccagcacaaagcccacgttgctctggtcgctattcacactggatacaccgctgtacatccaaatatcatcgttgagagccagataattatatccttctgtactcaccagggaatccttttgcccaaaaatggaattgatgaatccgtgtttgagcgttccccagttatcaaactgttcgatcaaaatatccggggacacggcgcggtccacccattgcggcacttccccaatgggataatactgtgtctcgcccgttaccgcatcgcagagcacaacgccggtaatatccgtgccgccgtacaagccaatggtatattcaatgcgcggcaccacccaataggggtgcccgttttcatccacctcaaagtttgggtcatcaaaaataaaggtgggatagcggaaccgcaggtggcgttccaaattccgtccgaaatgatctgccggggaaaacataatgccctgctccaaacgaatgaccgtgacttcctgtgtcaccatatcgatcatgatataagcaggaatcccgtttttcatattgttgaaccatttgatcagatccccgtattgcagcggcgttacgcgtaccgggcgcccctgatagttgatctgcgaataataatccgtcacctcaaattgagacaccatgtctaccagctcgcccattttccggtcgcccaattttttcgcgctttccagatccagcatcgggatctggtcaaaatcgatctcctcgacctcctcggcaaagtcgccggtctgcacgttgagcatgctttggtaccttgaggcatggaagatctttgtggagccgatccagccgatgaccgccgtcagcgccaccaccgcagcggcgccgatcagcgcgatttccgcagggcccaccttaaaaccgccttcaaaaggcagctttccctgcagcagcgtcctaccgtagcagagcacggcaaagatcaccagcacgatggccaggtacgttacaaacagcttggaatgcagcgttacaggcggcagcatgatataaaacatgaccgccgcgatcaccagtgtaatgactgcattgatgatgatttgtttgatcgtcagcttcataaaaccttggttcctccccaaaattggatgcataagagtatataacttcagtatcttactctatcagtttctttggccccatgcaagcggttttcttcttgtctaacaaaatctttatatcattgcttttcccctgcttttgcggctatactataaaggaaagagtcacctttgcatcaaggagtgttttgtgaagatgaaacggccccgttcgttgttcttttctttgttaaagggccaaaagctgactttatgcatcgttttattttgcatggccttaactgccctgttcacctttcttccacaacagatcattcgttatgccgtggatgtcgttttagctggcaatcccagttttctgccgccttttttagaatctgctgttcgctttttagggcacaacagcgtgctggggcgcctggtggtctgtgcgcttgccactgtcgcggttgcattggtcaacagcttgtttacctattttagaagcaagctctccgccgatgtggcggaaaacattgcctttcgcctacgctgccgcctatatgatcatatgcagcggctgccgtatgatacgctgctatcctttggcaccggcgatttattgcagcgctgtacttccgatgtggaaaccatccgtaaattcatttccgtacagattgccgaaatgggccgtgccatttgcctgttggcttgtgcgtttttcattatgtggcccatgagccataccatgacgttgatctctttggccagcgtacctttccttttgctgtattcctatttttactttgtgcttgccaaaaagaattttttaaaagccgaacaagcggaaagcgatatgtccgtggctttacaagaaaacttaacgggtgtccgcgtggtgcgcgcctttgccgcccaaaaggccgagcaggaaaagtttgataaagccagcgcccgtttccgcgacctttcccggcgcttaaacgatattatgagctattattggtctatttccgaccttgtcatctatgcgcaggtggttctgaccgtctgggtcggcaccactatggcgttggccggcacgctgaccgttggcaccgtcatcaccttttcctcttatgtaacggtactgctgtggcccgttcgccaaatgggccgcattttagctgatcttggtaaaaccagcgttgcgctaaaacgcatcaacgatattttgaaaacccctatagaaacagacacgccgggcagcgctgccccggatatttccggggcgattgagtttgaccatgtcagttttggctatcaggaagggcaaactgtgctgcacgatatcagctttgcagtaaagcccgggcagaccgtcgcaatcctaggcgccacgggcagtggcaaaaccaccctcatgttgcttttgcaacgcctgtatgaccccaccagcggccgtattctttttgatgggcggccctctacgggcatccagcgtgcctggctgcgaaagcatgtaggcatcgtactgcaagagccctttctctattcgcgttccgtattcgataacatcgccatcacgcgcccctccagccgggaagcagacgtccaatccgtcgccaagatggccagccttcacgactccatcctttcctttgaacaagggtatcaaaccctggttggcgaacggggcgtcacgctttccggcggacagaaacagcgtgtggccatcgctcggatgctgttgcaggatacgcccatcatgatctttgacgattctctttcggccctggataccgaaacggatgccgccatccgcgcagcactggccaaacgacgccataaggctacaacttttatcatttcccatcgtgtaaattctgtctggcaggcagatcagatcctcattttagagcagggtcgaattgccgagcgaggtacacacgaggagctgttggcaaaaaacggcctatatgccaaactctggcgtctgcaaggggcctccaaggagcccttagagagggggcaggactgatgcaaagccatttggaagaaaaggattattcagaaaaaatcagcctttcgctttggaaacgcctgtttgcctttgcgcgcccttatcggggactgatgatccagcttggcattgcggatatattcctgggccttggcgagaccatctttccgctgctgacccgctatgccatcgatcatttcataggccagcataccctggacggcctggttccttttctggtagcctccatttctctggcagctttgttggccttttgtgtctggctgtttatcaaacaggccggccgcatcgagcagggtatcagctacgacatccgtaagaagagcttccatcacctccagcagctaagcttttcctattatgaccgtaccccggtgggctatatcatggcgcggatgaccagcgacacggctcggctttccgaaaccatcgcttggagcctggtggacatcctctgggccgttgcacggatgggcggggctctcattgctatgttttccatcagcccgcgcatcacaggctatgtattgcttgtcattcctccgcttggcatcgtgaccgtctatttccagcggcgtattttcaaaagccaacgccaggtccgcaaggccaattcccgcatcaccggcgcgttgaacgaatccatcatgggcgcggctacaacaaaatccctcgtgcgcgaggagaaaaatttagaggaattttccgggctagctgggcatatgcgcaaggtttcgcgcaaggccgcccatctcaatgctacctatctgccccttgtcatgctgctgggcagcatcggcggggcgttggcgctttggcgcggcggcatcctacaacacgaagggctcatttggtttggcaccatctccgcatttgccagctattcgctgcaatttttcgatcctatgcaacagctggcacgtatttttggcgaaatgcagatggcgcaggcctctgccgagcgcgtctttacgctgctcgataccgaacccgagatcgtggacacgcctgcttcgcttgaaacagagggagatgcctttgctccgaaaaaagaaaattgggtgcccgtccgaggagaagtcgtctttgaagacgttaccttccgctatggcgacggccctgttgtcttaaaacatttcaacctacatgtatccccggggcagaccattgcgctggtcgggcagaccggcagcggcaaaagcaccatagtcaacctgctttgccgtttttatgagccgaccagcggccgcatcctcttagacggggtggatatccgcgcccattcccaagcctttttgcagtcgcacttgggatatgtattgcaggcgcctcatctgttctccggtaccattgcagacaatatccgctacggcgaccccaccgcctctatggaacgggtgcgctgggcctgtctcttatacacatctgacgc

SEQ ID NO: 3711 - DNA, 32759 bp, Unknown
  16S sequences of unknown bacteria
gacggggctgtggccggtattgcatcgccggacgtgctccaaatgttgatgccggaagatcgaagaacctgtggtcagcttcttttccggtttcattttgagcatttccctcgccatagtatctgttggcagagtcccacgtagtatcaagataattccatgtgccgttgtaatatacagcattccatgcatggttgattcctttgttctggtcgccttcctctaatagtcccttggcatagccattgatttccatgcaaggcactcctgctgcacgacacattaaagatgtcagctgtgcatagcctccgcaaacagcataacccttcgtaaatgctgcttcaattccgctttctcctgcatatgttctggtcatatcatatgcgatattctgacatatccagtcgtgtacggcctttgtcttagaagcatcattagagcatttagctgtgatttcctgcgcttttttgacaattgcatcatagctgctgccggctgatttttttaagatgagtgactctgcatccttgtatttgtcagggctgtcatcagcgttcaaagcattcagaaaatcgatcgatggctgtccataaggattatagaatgaaacctgattatcctgaatttctataaagaatgtgcggtcccaaattacatatccatgattatctgtatatgatttaaccctaaaaagaaaattatataacccgttatctcttttctgtttagcaaagtctatgtttaagacgcacttgttgccatcaaagtcagctactccggcccatgatcccggaactgtctgcgcttcaattccccatttgcctgcgcccggaagagttgcacgtgtatcaactacttcaagtgtcagaacgcttccgctggtagatgccttccatgtatagttcagggcatctgcaagagcattgttctgtatctgtgtattattgtctctttgcagagcatgaacagaaacaggagcgctgaacactgccaccatgaccagcatcagtataaaaacaaatagtttttttgagaatgagattgatctactcataaaaaagcctcctaaaaatgaaatatatatttttttacgacttgattatacagcaatgtgaaacatgttttccgctttggcgtgaaatgtcatatttaaggcgtgaattgtctgaatttcattgtgctttgtcgaaaaatcaaatataattaagataacatattcgacaacagaaagtgaaaagcatgataaaaatagccatatgcgatgatgataaaatgtgccttgacaatattgcaggtgccgttgctcgctggagcacagataataatatacagatcaaaacagaattctttgataacggagacagtctgcttgactattgcagcagggaaaaccccgatatagttctgcttgacattattatgcctttgttaaacggcatggatacggcccgtgaactgcgtcaaagcagcgataccgcaaaaatagtttttcttacatcctcccctgagtttgcaattgaatcctatgatgtaaaggcctccggatatatcctgaagccgttttcctatgaaaaattatgcattgtactgaatgactgtacagattccatagtctcaaaatcagattcccttacagtccgcacctcatcaggctatcataatatctatatgcaccggattgaatgtattgaagctcaaaacaaacagctaatcataactcttgcagacggaacagagtgcagggctcatggcacactgtcctccttagagaaaatattaacctgtgatatgggattcttcaaatgtcaccgcagttatattgtccggattcaggcagttgattatttcacttcgtcagaaatagtaacaaaaagcggacgccatattccggtagcgcgcagtatgggtaaaaatttcaaagccttttatttttcccatatgtttaaggaggtttaactatgtacggtatattcctgtctgctgccagatatatgcttatactcttttttggtgtttttgcttcagcggcgattgcagacatcaggctaaacaaaaaaaatcttttaatacttattgtcttttatatatgcaactgcctgatacagcttgtaattctgctcacagacaatatacagcatgttatattgtattatcccgtaataactcatctgccgctgtttcttttatttgttctcgtatttaaaaagacatatataacctcgcttgttgcaattaccagcgcatacctgtgctgtcagatatgcaactggagttctaccatcccaagatatatgggggctgcctcatggattgtagatattacatatattgcagtacttattccgttattcctcatagttatgcgctgtatcgcaccctccatgtccaaactgtatacaaaagaaaacacatatgtactgatgttcggaatagttcctgttttttactatgtatttgattatgcttccacagtatatacaagactgctgtatggcggaaatattataattacagagtttgttccgtttttactttgtctttactatatcatcttctgcatagtttactaccatcagtatgaagaaaagcagagaattgcaaccgaaaacatgatcatggatctcaaacagagtcagtatgaacgtgatatcaaagcattcgagcgtaacgaaaaggccgtacgccttatccgtcatgatatgctgcactttttaaataatatttctgttttaatagaaaccgggcagctggtgaatgctcagaaatacatacaggaaattataaataccacacgaagcaccgacaataaaaaatactgttccaacaagatgatcaatatgattctttctttgtatggcgacacatttgacaaaaacaacatcagcttcagctgcaatgccggtgtaccggagcagatatctgtatcagacatagatataacctcgattttatccaatgcgcttgaaaatgctcttaatgctgtgcttcctcttgaacagagcctgcgtactgtaaatctcaaaatcattcagaaggatacaaaactgcttattcttatctcaaatccatatggcgataaaaaacctgttctgacagacggatatccggtatcaagagaacagggacatggctttggtactcaaagtatacgtcataccgtagaaaagcttcatggaaactgtaaattttcagtaaccgatagagaatttgttcttcagataataatataagtgataatcaccggcagttttatcggatttatcacacaaaaaacagttgccgtcaaatcagcaactgtttcattttgcaaaggctgtttagtaattgtcattgttaatctcaagaacaccgctgagcagcagctcgtctgccattgctctggtaccgattacccacagcagatctcctgtttctattatcgtgtccacatcgggatttataatcggcagattgtctctttcgattccgattatgaagcccttgtagtcttttttgaaattacaggttctgataggcttcctgttgaaagacgaatccttattggcaggaacaggacagcatacaatctggttctcggcgcttacaccgtcaaatacctgaccgtaaatatattctttaagagtcacagtttcttcacctatcatattcatgccgtttgacctttcgagcacaatcataaatgcggcaatatcatcttctgtaccaagtatatgaagtatatcgccttttttgatgcgcgcatcgccgtcaggcatatttatatgagagccgtttctgagtatctttataaccagtatgcccagatacttgtttcccgcaagctcctttactgtttttttcttaggctcacttgttatctctatctcgcatatatgtataacctcatcaagccagatatgattgctcttgtatttgcgctcctgctgcagcttggcaagctgcttttccgacaggtttgatatgaactgcatctccattttgattgcggcgctgctcataaagtctgatttaattgctatacctactatcactgcacctataactatatttataactataggtatgttccagaagtcgcgtatcagcatcattattacaaacataacaaaaacaattctgataccgtacagtgcggcaagcggcagtctgtttgtgttgcttctgagccacagctttgtaaagtaaatgcttcgctttgagcacattatgcttgtaagtataagtatgcaggcaagcagaagaattacagctacgatatcacctgctccggcacccatcagttcttcaaacacaggcacaacaaatttgatacctgcaaagtaggtaaccagtatgccgcctccgcatataagcgttctgataatatatttggtgagatactgtttccattccgattcctgctctgttgaggttttgcggtcagatgtatatcttctgataaatctgtgcgccttgtcaggcagcttgtcgtctacaaaatcatataccttctcggaattctttatgaatatcggtgttgtaaatgtggttataaccgatacgcatacaactatagggtacaggaagtcgcttgttactccgagagtggtaccaagagttgcaattataaatgagaactcacctatctgcaccatactgaagccgcctctgatggcggtattcagggaatttcccgatatcagtatgccaagggttgagaacgtcatctgtccgataattgtcactacagttataagcagtatctgccatatatattcaaccagcatatccggtacaatcatcatacctacggatatgaagaacactgccccgaacatatccttgataggcttgataatgtgctcaactttctctgcaagcacagttccgcctatgattgaacctgctataaaagctcccagcgctgatgaaaagcctatcacatttgcaagtattaccataccaagacatatggcaagtgatactataagcagagactcgtcgttcataagcctagaggcttttttgagaaatgtaggtatcagatatataccaagcgccagccacagcaccagatataaaatgagcagtccaagttctcctgcaatagccatgcctcctgcgctctctttgctgactgcaatagtcgaaagaattatcatcataaaaattcctccgatatcctctattacaagtgttccaagcaccagcgtggcgaatttctttctcttgatgccgaattcctcataggcctttaatattatcatagtcgatgacatagacagcatcccgccgaggaatatactgtccatctggccccagcccagaagccttccgatcagaaatcctattaaaatcattgcagtcattacggtcattgccgtaataatcgcgcttttacctacgtctacgatttttttgaaactgaattcaagtccaagggcaaacataagaaatactatccctatttcaccccacatggaaatatcctcaacagccaccaccgtcggcagtagtttgaaattaggacttatcagaaagcctgccactatatagcctaaaacaacaggctgctttaatttcttaaaaagaagggagacaactgctgctaccagcatcataagagccaaatctgctatgaatgcatccaaatgttccaaattatcactcctttctctttaatccgataatattttatcaaaaaatccacctgttcacaatagaactttgttattagagcattattattttgccattattttatctaaaagcccgtttatcttcgtattcacttctttttcgggagatatatgtatcatctgctcctttaatataatgctgtctgggcagtaatccacatatactgcgtcagatgcggctgtttcatcatcatcgtgtaccgtaaatttatttacggcatttatcacgctgcctgccgcaagccctctgatatgagcctcatagacactgtccttcatgcatatatcgctgctttcatcgctcaccttaactatattgctgcacaaagaaatcgcactgtcgtaaattccgcctatgccgcttcctatatccagcactatatgggtaaacagacccgactcagctgcggcgcttataaactttacaaactctctgtcctgaagctgcagcagcttattatacggtcttacataattaagatatgaaactctatactcgtctaatgacaggcaggcggttaaatcctcttttcgaaatcctctggtaaaaaaattaaacagcagcctgtttatattcatttcacattctgcccctgcaggagaaaacggtatcatatcaaggctgatatacagaacctgctgttttcttgctctctgcatttcctgcgctatgcctattgcaatactgctgcagcccgtgccgccccttgcagagcatacgcctgtaataccgcaggggcttccaagggccagcttggtgtagtcgtcataatatctgcagtattcataaagaacttttttgcatatatgctctgcgctttcaaacctgtacactatattatctccgcatatggctctgctgtctgcaaggtaaatcacaccctcactgcaggggcttttggcatcataatccgtaatcagaatatttccctcagagccgctttctgacaaattaacagtgaagctgccgcttaatgccctgcccagtcttttttcaaattccttgtcttttaaatcaatatttactataatcatttcttctaccctttctgatacttttttaccattataatacatacattgttactatttgtcaatgcttcttaatttttttattgcgctgctgatacctccggtttcatctataagtcccgcatctactgcttcttttccaaaaagaattgttcccacatcgtttgccatattatcggtacagttaatcaggctcagtattttttctctgcctgcgcagctgtgctcctcaatgaagcttacaactctttcctgtgtttttttcatatattcgaatgtaggctgcgctgtaatcaccatgccgtttgttctgatcgggtgcagcgtcattgttgcggttttggtaataaaggaataatccgcagcaactgccagcggaatacctatgctgtgtccgccgcctaaaactattgataccacaggctttgaaaggcttgctatcatctcggctatggcaagacctgcctccacatcgccgcccacagtgttaagtgtaagcagcagccccttgatttcagggttttcctcaacggctataagctgcggtattatatgctcgtattttgtggttttgttttcgggcggaagtaccgtatgcccctcaatgcttccgattatatttatatactggatatctgttttaaagtcgctgtacatatttaaaacgcccagttctctgacaagctcctctgccgatatgttgttgttttcttttttttcttcggatttttcacacataatttttcacctctcaaatatcattattaataatagtatttactcatgcggaggtcattatgcggttaagtgaaataggcaataaggaaattatagatctgtcaacaggttcaagacacggacagctgtgtgactcggagcttctttttgacccgcagacaggtgaaataaaggcgatacttatatccgatttcaaagcttcaaagcagatgagactggacgaatacagacagcttccgtggcagtccatattaaaaatcggcgaggatatgataatatttcaaagcagcaggtactaaaaaaactgccatcggcagtttttaaatcgtaatattatagcagtgcgcttacgccgtaggtcaggcagaagactataattcccgctgcaagcacgcccagcgctattgcaggaaagcatcttttgagcctcatatccagaaacgccgctaccagcgctcctgtccacgctcctgtccccggaagcggaatcgccaccagtataaacagccctacattctcatatttgtgcaccttgtctgcgttcttctcagccttggcttccattctggcaacgactctgtcaagaaattcgcttttgcttctgagccatacaaatatttatgaatataactataaaaggcaccggaaccagatttcccagaaatgccgcagccaatgccagccttggatcaagccctgccgccgtgcctatgggaatagcgcccctaagttctaaaaccggcagcatagctataaaaaatgtcataataaaatgtcccagtgtactcaaattcctacctccgttaaccccagtagattaattttagcaaaaaaatggatagtacgcaacgaaaatatcatctggcttttctttttttaacaagttctatggcttccttgcctgtcatatgctctatttccataaccgccacagcaagctggtcatattccctgtcaatggcagcctttctgttttcggctgtatcctccggggcatatttccttgcaagcagatctatggcatacattgtctcgttttcgtcatctgaaaatctcactcttccgaaagctataacgcttctgaaatatgtcgtatattcaggcggaacaacttcatctttatctataacgcaaaacgatgctttgtcgcaggcctttattgcgctcaccttgtgaccctctctgccgctgtgaaaatatatcttatcgtcatcatatacatagctcagcggcacagtatacggatattcgtcatctcccataagtcccagaacacctgacgtattgctttcaagtatcccaatgctttcctctctgcttaactcctgcttaaatcttctcatttttctaaacatagtcttttttcctcctgaagtttttttcgtttctgccagctgtaaaagccgtatatgtcattggcaagaaacattgcaaagcacataaccataggcagatatgccgtatcctcaaggcttgccattacccacagaattataaggattatgtcgtttgccccgtaggccagcgcataggcgctgcttctaaacagcatcagtgctgatgcaaggaaactggtggttattgatattgtgctgaaaaacagatttgcgttattgaaatatctgagtatgaaataaaaaatcacagtaacaattacggcggttatgcaaagcataatggttttcttaagactcagtctggctatactaacctctcttttacccttttcctcagggtgccttatccatgtataaacagacatggctgctattggcgcagtcataaacatatatgtaatcatttcaccgtagtaggtaaatttaaatgaaatcacagaatatagcatgctgaacatgactgtaagcacctgccctgtcacatcgccctttgcaacaaatatcagcgccgtaacaccgattaatgacgcgatcagagtaagcactctgaaattcccgcctatgataaacgaagcagacacaaccgataccgaaaccgcccacagccctaattcaaattttgtgaagcttttcataatgtcctccaaaaataaaaacacccgcaatgtatatcttctaagacctaatgatatacaaacgaatgctctaaagcagactacccggtggcagtaagtattttttctcagtatatcagaagctctcccgtttttcaataactttcttgctgtcttgctctaaattcaaaataagcttgctgtatgtgtcggcatatgatagtatatagttagtattctaattattagctttataacaaaggagaaacctatgaacacactgcactattatctgatggcagaccacagcctttttcacaaggcactgttcgcatccatcaaatcaacagggctgacctccggacagccaaaggtccttgattatctggccgataacgacggagctgtccagaaagacatagcggcaggctgctgcattgagcctgcaacacttacaaatcttttaaacggtatggaaaaagaaacgctgctggaaagaagaacggcagacggcaaccgcaggtcataccatatatatctgacgccaaaaggcaaaacgctgtgcgaaataataaggcaggagtttatggctatagaatacagagccttagacggcttcacctcagaagaaaaacagcttctgaatacttatcttgacagaatacacgccaatatgaaagaagggttatagtgacattaaaggaaacaatcaaacgatatctgctgtttataataagtctgtttatttccgcagagggcattgcgctgacaaggcatgcggaactgggagtatctccaatatcctccattgccaatgtggtaagctacaagctgccgtcattgtcttttggagtactccttataatatggaactgcatccttattctcgtacagattattgtattgcgaaaggatttcaatccggtgcagctgctgcaggttcccctttcggtacttttcggtatattcgtagatttcggaatgtggtcggtttcatttatccctgcagggatttatcctgtcaggctggcgcttgtagccgcaggcacgatagtcttaggctttggcatttcgctttctgtaacggcaaacgttattatgaattcaggtgaagccatagttaaggccatatctgataaatacggcacaaacttcggcatgacaaaaataactcttgacgtatcctatgtaattatcgcagtaatactttctctcatattctttgactttaaaattgtcggaaccagagagggaactgtaattgcagcgcttactacaggtcttgtggtaaacttcttctacaaaagaataaacaagactgtatcctcactgctctgtgataaaaatgcacctgcaaaaccgcaaagcccgctacttgaaataatgaaaaaagacgtatatacggtaaacgaaaatgccagcctgattgaagctctgaagctcatatctgaaaagaaagtaagcggtatgcctgttaccgatgataacgacagacttacaggcttcatatcagacggagatattataaggtttctgtccgacagctacccttcctttgtcaatatctactcatttataaccatagattttgacagcagactcaaagagattgttcatacaaaggtaaagaatatctcccgaaaatcagttgtaaccgtaaacgcagatgatgatatttcagatgtctgcagcagactcagcaaaaaacatatcaaaaaagcccctgtcatcaaagacggagctatggtgggaataataaatgtgagcaatattaccaaatatgtgctcaaagatttaacagaaaacatcgcctgaaaagcggtgtttttttctgttacagcagagaaaatccgccatcattattctctttatttcacatatattctcctaccagaacacccttatcacctttgatgcaggtctgttcatctttcgcttgctgacaccaagtttaggcgtactgtcatacacatagcctcctcctgcatacattgcaacgtggtatacgggattaccgtagaatataaggtctccttttttcttcttgctgaagcttaccgtcctgccaagcttcctgtctttagcaagccattttgacgtgtattcatattctgcaagcgcgtgatccacgatgtttgtgtcaggatttattccggctgcataaaggcactgatatataaggccgctgcagtctgcgtatgtgccgggcctgccggagcagcctatgcgataccttgttcccgctcttgcatattccgctgcggtattaagcattgcgtttatataatcagacttcctgcttgcgccgtcaatcttaaccggcgtgacataaacgcccaggctttcccatgatttctttgaatatcccatagcctcccacgtcttcaggtttacattgcctgtagccttgagtccgtatttcttctgaaagttttttaccgcgcaatatgtcctgtctgtataacttgcctgtgatgtgccgagcatttttctgttgacatatatcactttaagacctatattttttctgctcacattatatgatcccggcggcagctttatttcctgtgttactgcgtagtatccgctgcctctgctgtataatctttctctgaccgtaacattatagatttcttcgatttcggggttccggctatctgtgcaggtgactgtgcagctgccgggctttattcccttaatgcttccctttgccgtcactgacgcagtttcagggctgtctgatttccatacgccgcccgcaatgctgctttcggccttatgggttttccctatatgaagctctacatatacagactccggaattataatttcattttcgtctgcggtattcatatcctctgccgcatatgcagctgccggcatcagtaaaaaggccgctgtgattaaacttacgaaaaatcgttttactgtcatttgaaaagcctcctttttctctttacctgcattttccttatcctgctatgtgatgctcatgacggcagttttatttcaaatactgcgccggtttcactgttgtatgctcttatattacccttgtgcaatctgactatttcctttgtaagagccagtcctatgcctgtattgcctgttttgcctatgtagaacctgtcaaatatatgctttatatcctcctctgctataccgtcgccgtcgtcctgtattttaataacggcattgcctccctccgcatgacagaatatgagaatttcacttccggcatatcttataccgttcataagtatattaagaaaagcttttttcatctgtgtttcatcataaaccgcagaaaccggactgtccgaaaaacaaggtgtaatcctgatgttttcacgcattgacacaggctcaagcatcctgaggcagtcataaagacattcccttatatctcccaatgttttgttcaggtttatctgctccatatcaattttagaaatctccagcagttcttcaaccagctgagtcattctgtcgctttcttccaaaataatgcgggctgaatcgcctgcatcaagcactcctgtttctatcccctctgcatagccctgtattgacataagaggtgttttgagctcgtgtgatgcgttctggaaaaaaattctctgtttttcctgagcgttttctacggttctgccgaaatacagccctattatacacataattgcagaaactgcaatcagaactgcgaaaaatatctgattaagagaagtcatatattctgtaacaggatttacatctatatacataatgtacgaatagtcttcgctgtcaccttctgacgccgtcataaaaacgtatttgctgctgtctgttttacagatatagcattcgccgttttctgtattgttttcttcacagtattttgtgattgccgttctggctttgagagtatctttgccgtagccgtacagctcataaggtatattctcctctatatactttatattgtagctcagaaaactccattcatagtcactgccatcctcgttcatataattgatttccgctttcagcgcttctttggcttcatttgcaaaatgccccggaataaatacgttcataattaaaaagaaagcagaaaacagcaaaaaaaccgatgaaagaattatgtagataattttgcgtttaatacttttcatttccggtttcctctgctgttttcattctgtatccgaatccccatatggtttcgatttttacgctgctgcctgcctgaagcagttttttccttattcgccttatggtttcatccgtcactcttgtttcaacttcactctcatagccccatatttcattcagtaattcttctcttgaatatgctttttcggctcggttcatcataaaagtaagcatttttaattctgtctgcgaaaaacatattgttttatcattgcagtatacggtattttcctccggtacaaacctgagatctcctgctgtgatgtttttttcctcggaaattttgtttttactcatttcaacacgtcttaggagagctttgacacgcataagaagtattgtaggacgaaacggctttgtcagatagtcatcactgccctgcgttatcccgctcacataatccagttctgaatcctttgctgtaagcagtattatcggcacgtctgtaaactctctcaatctgctgcatatttcaagtccgtctgttcccggcatcataatatccagaattacaagatcggcaggatttttccggaaagctgtcagcagctcatcaccgttttcaaatgagataacggcatatccgtcgctttcaagaaatctgtggatcagctcccttatttttttgtcatcttctgctatatatatcgaataccccatttgagcctcctgaaaaatcctgcatcatcatatgcaaaaccgtatcatttatattgtctgcttattactgattttacacattatcatcatcaaaagcaatagtatcatcaccgtaatcttcaccccatacagatttatataattcatcaagtttcttctctatttcatcaagcttttttatgtctgcaatcagggcagctttttcagcttctgtcaggctcttaaccccctttatagcttcgatttcgtcatagtcttcaaaatcatagtcttccggaaggtctttttcggcatcatataccttttcccacagatccgaatgagaattataaattctgaaatattcttcctccagagaatccatttcggctgctgtttcaggatctatgttttcgtcttcgaaaagcatatccctgtcgagcatcggcattacttcttcatatagtctgtccatctcctctgaaagcctgtcaagcttctctatatctgcaataagtgtatctttttcggcttctgtcattgtcttgagactgcgtataaacgtgttttcgtcaaaatcctcaaaatcgtaatccgcttcaagactgttatatgcatcatacagcttgtcccacaggtcgatatgagaatcatatatcctgttgtactcatctgcaagagcatcaatttctgacagaagcttatcctgactcacctctgccatctgcgccggaggtatatctccaccggtcttttctcctgcgaacacagccgttgatgaccctataacggaagtcaccataattgctgcaagggttatcccccaaatttttttctttttcataatccgtatatctccttttcacattttagcaatcatttacgattgcacttaaatgatagcagatagcagatctcatttcctacttgaaactgtatgaaaagtgtcataaaagtgtcacagaaaaccacaaaaaacagatggacaaaagcaagtccatctgtaaaaagctaatctatgtaggtttcaccctgaaacccaatggagatcggtttatttaattaagcgtttgcctttctgtatgcatcagcatctgctacgaattcaggatctgcgaattcaggtctctgtaatggcttcttaaccataagagtaccagtaccatatgcgcaaagttcaggtgggttgatcatttctgcgcctgatccgttgattacgttgccgtcagcatcctttgaatccttcatccatttgtaagcgaagaatttgcaagtaagtgaagtgttaccaaccttttcgatatatccgccgtattccatccagtcgcctgcgaatactggagcagtgtatctaacttctgagtaacctacgaataatgattcgtcaccgtgaagtctgatagcgagttctgttccaacgtctccccatgcagttacgatgtgtgcgccttctacaagttcaccagcatagtgagcatcgccagctgacattcttgtctttaagtttacatatgaaccgatcatcttagggttgttttctctctccattatgcattctaaaactgtcttaatcttagccattttaaatcctcctaaattttataaattattatgttgtgcattcattctcacaaccgtttttctttacaattaaataatactattttgaacctttactgtcaatgggtttgttaatattttatctaaatttaaagcgaaaaaattcaacaaaaaagactatcaacatttataaaaaaacagtaacaaaaacacagcaactttgtatttttttctgaaaattgctgtgtttaaaatcctttattttttaggcttctgaggtacatagtgacgtccggaataatcatatttaatgtcaatcatacatatagcattggctatatcattctcgtcctttgatttaagcgcattcagtataggctcatcggctttgcaggtattttcgagataatctatgtagcctgcaacactgtcaaagtcctccggtttctctccgtttaccgcaaagatttcaaacgactcgttaaaaacaaatgcatacatttcatcaagattatttgtagtctctattgtcagcttaaggccgttttcgtgaaacatctcacctgtaagctctctgaatgaaatcgatgcaggattctcttcatctgccgccctttcaagcttctcgtgaaactctctgatgctctgacccagaacctctttgttaggctcataccacgacttcataacatctataatcataagagcaagattctttgtctctgagccgtaccacagcgagtcaaggtggtatccccagtcattctccactactatattcacaagatatatctggctgtatttaactccttcagtcataaattcattctccttttgtatgtatatgtaccattatacactaatccaaagtcaaaagaaacagaaacaaagctgtgacatttaaatcggtttaaaaacgtctatcagttactttctgttccactctttcatgctgctgccctgctgttctacaaatcctcgatgcccatatacagtaatctgtgcaagagcatcttccagtgcggcaaactcctcctctataagcgatatattccatgctcccagattttcaagaatgcgctgctggtttttatagcccggaataggcacaacattaggatatttatgaagcatccagctcaaagaaatctgtgccattgtcacattcttgcgctctgcatagcttcccaaaagttcaagaacaggctgatttgcttccatattctctttgcgcagctgcggtacaaattttctcacatcatcactgtgggaaaaatccgagtttacagttactttaccggataaaaagccgctggcaatcggggaaaaaggtacaacaccgatattgtgttcaatgcagtatggaataacctcctcctctactccgcgttccagcatggaatatatattctgaactgccgaaagcggcgttactttatgcgcacgattgattacatcaacatctacctgagacagcccccagccgcgtatcagtccctcacaaatgagttttcccattacctctgccacatcctctaccggaatatcaggatttatacgatgcagatagtaaatgtctgcataatctgtctttagtctttccagtgaagctgttaagtgctcccgcatggcagcttcaagcccctttgaacgatagaaagctgtctaatgcatataccgaaaacattaacagccaattgcgcacatacctttctgtttcaagaggaataagcaacttctcacgcttcagaaaaagagtcatatatgcactttctcctgatatccgttatgctctcacctcaactctatccgactgcaggcagaacaggcgaaagcgcggttcataccataaagtaaaagattaaaataatcaaaacagcacttaaaacaactattttgcggttgttttaagtgcctgattttgatttgaacccacacgataatttacagttgatgagaaacctcacccacacgatagtttatagctcgatttctctaaccaacacgataatttacagtactgaaataattacggcagttattatcacaattctctttttcatatctctttcctctttcaagtatatttaattacctgcttcttaaatcatattgtatcattgttctaaccggattaaaagacacaaaaagagagcagaaacaggtctgctctctcaaaagacattaattatttatatgtttcgaatacaaactgaacgattgtgcaaagcttaggttcaggaagtacgtctattgagcttgggaactcagggttttcaggaaggtcgatgtacttgaagtttctaacttcaacttcaatcttatctcctacaaccttgttgattcttgcatggtattcaaggtagtcacctgcgaagcaaggttcatataatcttaccttgtttactgcagttacatgtcccatgttgccgaattctctagccataagtcttttagctgtatcttccataagagtgatgtttcttgctccgtttacaacgccgccaagatagaaaacgtctctgtctgacattctgtatctgaaagtgatgtcttcagggtgagcaggatcaaaagcagctccagggaaatcttcgttgtcagcccaaggctctacaactgttccgtcaggctgttcgcctctctgaaggtgttttttaacaacaagtctaacattaccttctgtgcagagcagaggttcgtcaaaccataccatatcagcagtcttagggttttcaacgcctgctcttgatgcaggagttgcaagcttgaatacttcgatgtggcagtctcttgatgtattgccgatgttagtaagagtggctttgtattccatcatatcgcctacatatacatcttcgtagcactgtacacctgtgtatccaaggcaaagtgattcgtcaccatctactaaaatcatttcttctgtttcaacgtcgccgatgaagtcaaactgtcttcctacaggaactataccgtcaggattgtttgcatctgctgttgtcatgttgtagcttaaatatgatacttttctcataataatgcctccttatatatttacactatattatgaatttaagcaataactccttcttctctcagctgcttttcttcttcttcagtaagtccgaagatttctctgttgtgctgtcccttgagcggtgcagcaaactcaaccttacccggagtctctgataatttgattacgcagccctggaagtactgatctccagctgtagggtgttcgcagtgaaccatcatttctcttgcctgagtctgagggtgctcgatgatttccttaacattcattacaggtccgcaaggtattcctgcttcgtccataataatttcaagttctttctttgtgtacttaccgcagtactcctgaattgctccctttaagtcaggaatatagtttgtctgtcttaaatcgttggttgcaaatctaggatcctcaagcagatcttctctgttcattgtcttgcagaatttgtcgaataatctgtcgtttccaacgcctatagctacgaaaccgtctttacaattatatacgtcaaacggtgaaattgaagggtcgatgttaccgtttctttcaggaatttccccgcctacagtgtagtttacgatagcgttttcaaggatactgaagataacgtccatcatagctacgtcaacgtgctgtccgattcctgtcttttcacgatagtaaagtgccatcataacgcctactgcaaggtatatacctgcaacatggtcacctactgaaggtccaacctttacaggatctgtctctttgaagcctgtaaggtaaagcataccgcccattgcctgtgatactacatcgtagcaaggtctgtgggagataggtccgtactgaccgaagcctgaacctgatgcatagatgatgctagggttgatttttttaactgtgtcatagtcgatcttgagcttctttgtaactccgcctttgtagttttctactaaaacgtctgcatcctttacaagatcatagaacatctgtctgcccttttctgacttaaggttaagagttgtactcttcttgttacggttaacagaagtgaagaatgcgctctctcctgacttttcatcaaaaggtccccattcacgacactggtcgcctccaagcggttcaactttaattacatctgcaccatagtcagcaaggaacattgtgcaaaacggtccattaagtgctgatgacaggtctactacttttaatccttcaaataactttttcactcttctaaaattcctttccgtttaactaattaactaattttaatctacagcttatttagcttcttttgcctctttaattgcctctatcataagaggaactactttgaacaggtctccgttgataccgtagtctgcgatttcaaatataggagctgttgcgtctttgttaactgcaattatcagttctgattcctgcatgcctgctttgtgctggatagcgcctgaaatacctaatgcaacgtatactttaggatgaacagtcttaccagtctgtcctacctggtggtctgctgaaagccagcctgagtcgataactgctcttgagccacctacaacgccgccgcctaatgcttcaacaagctcttctgcaagcttgataccgccttcaacgtccttgctgatacctctgccgactgatacgataatgtctgcaccgataaggtcaacgattttctttgttgctttaactacttcttctacttttgtttttaaatctgcttctgttaatgttacagggtatgattcaacaacgcatgcatcagccttagcctgatcgaaaggagccttcttcataacgcctggacgaactgttgacatgcaaggacggaatctagggcagatgattgttgccataaggtgtccgccgaatgcaggtcttgtcatcttgaggttaacgtcttccatattgaatttcttgcttgcaatatctaatgttgaagctttttcgaggaattcaacatagttgtccatatctatgtcaaggtgtgtgcagtctgctgtaagacctgtgcataatcttgctgcgcatcttggagcaaggtcacgaccgtagtttgttgcaccgaataatacaacttccggttttttgtccatgcagatgtcacataaaacctttgcgtaagcgtctgtagtgtatacttctaaagcaggatcttcgcatacataaactttatctgcgccgtatccgcctaattctttagctaaatcttttacgttgtgtccgataagaacacctactaactgtgaacctctttcgtcagcaagttttcttgcttctgagataagttcaaaatcagtattcattaatttaccttctctctgctcgcagaatacccagatatccttgaaagcagctaaatctgtactgttaaaagccataacctacctcctatataacgtgtttttctaataacttggcagcaagtgttgctgcagtgtctttgttagcaccttccagcatttcgccgacgcccttctgaggcggagtgaatgatgtgaagatgtttgtaggtgatcctttaagaccgattttgtcaagctcgataagaggctcgtccttgagtgcttcaaagtcaagaactgtaagcggtttgctgtagcagtccataattccgtttaaagtcatatatctagggttcatatcctggtcgttgatgcatgtaacaagacaaggagtctctgttgaaatcatcatgtaaccgtcttctaacattctctttacgagtacttttgaaccttcttttttgatttcagcagcgtatgaaatctgaggaagatttaatttttctgcaatctgaggacctacctgagcagtatctccgtcgatagcctgtcttcctgagaaaatcatatcgtcttcgccaagacctgtatgagtgatggctgctgatataatctgtgatgttgcgaatgtatctgatccgccgaattctcttgctgaaataaggatagcatcgtcagctcccattgcaagaagttctctgagcattccctctgccggaggaggtcccattgtaactgctgttacctgacagcctgttgcatcctttaataaaagcgcctgttccattgcagcaaggtcatctgggttgatgatagtctgcattgaagcacgatttaaagttccgtccggattaactgcaactgtaccggatgtatccggaacctgttttacacaaacataaattctcatatgatactccctcctatttaccgcttaatactgctcttgaaataactactttgtggatttctgaagtaccttcgtagatttcagtaatcttggcatctctgtacatacgttcaagaggataatccttcatgtatccgtatccaccgtgaatctgaagtgcaaggtttgttacgaaacgagcgttttctgctgcgtttaatttgcacattgccgcttcctttgtgaaaggctgcttgttgtctgcaaggtatgcagcatagtaaacaagtgtctttgcagcttctgtctttgtagccatatctgcaagataccactggataccctgaagatttgcaataggcttgccaaactgttcacgttcgtgagcatatttaacagcaagatcaagagcgccctctgcgcagccgataccctgagctcctacaccgattcttgctccgtcaagagccatcattgcgattttgaagcctttgccaggtttgccgagtatgttctttgcaggaactctgcagtcttcaaatacaagctctgctgtttctgatccgcaaagacccattttgttttcgattttaccaactgagaaaccaggatagctgctttcaactataaatgcagtcattcccttagttcccttttcaggttctgtaagtgcgaatattacaagaacgcctgcacggcttccgcctgtaatgaagcacttagttccgttaagtacatattcatctgtagcttcgtcataaactgctgtagtcttaacgcctgctgcatctgaacctgcatttggttctgttaatgcaaatgcaccgagaactccgccctttgtgagcataggaaggtatttctgcttctgttcttctgttccgtgtgcaactattgcatgcggtgcaataagatgaattgaaaggcatgctgctgatgtcatgcatttcttggcaaattctgatacagcgattactttttcaagtgctccgccgccgcatccgccgtattcctttggaacgcctattccggtgaatccaaccttagccattttggcaaagttttctaccggaaaagtatgttcttcgtcgacctgtgctgcaaccggttctaattcctgttcagcaaactgagccgctaactttttaagcattttctgttctctagttaacgaaaaatccatattctccacctctcttaaatatatgttaataaaatttaaaactaagtaatgaaattgttaaaaaaatatcttaattttcataacatttgtatatatcagacaacttgcggttacttatacaacactctattattccctgtcagaaataatatataccgatgtcccgattccctgaagcaattcaatttgcactgtttcagggggcttgtccgctgcgcctgagtaactgaatacatcctctgcagcctgccggaacattgcctgataccatatttttaaaaataaatgtaaccagtatcatttgttaaaaatttatttgattcgatttgattataccatttaggtacaaaaagtaaagacattctgacagttttcgtaatgtatacataatacttttacttttctttcttaatcacaaaaaatcagcccgtaaaaagctgattttctatgtaaattattctaattcttctttcattcgcgcctcgcgctgctcaagtgtcatatccgcatctggaagtgaattgtaaagcggtgcgtcacccacatgtcctgcgtacggcatagggaaattaaacagcttgtactgtctcataagctgctctgtaaggcacgtaccatatcttcttgaatctgagattttgttaaggtcaagtgaaaccgtaagcgccgtaggactgctgcctgcctcatatatgcaggttccgtcaggccccgcaataaccgaatgtccataggcatatccgtcaagccatgctcccgccatatttactgaaatgaaatatgcctgattttcaaaggcccttgtatacggtatcgacttgcatacgctgtaaagaccctcagggtctattgcaggccttatcagcacctccgctcccataagagcaaggtttcttgatatttcagggaagcaccagtcatggcagttaagcactcctatgactgtctttttttctttgatttcaaaggtcacatattcagttcccggtgtgaagtttccctctaccggtgtatacggacacatttttctgtataccctgataagctcaccctgcggattgaaaatagggacggagttatacagttttttggtgccgtcctcaaatctctgaacctcaagcatacttccgaccatgagatatattccgtgcttttttgcaagctcgccgagtatgtctgtaacacggcccggaattgtatcgcccgatctttcgcccttccatctcagccctatattcatttcgggtcctacgatgatatcaggcctgttcatacctgtcatcagattgtttacgctttcttctattctcttcaggctctcatcgaagctgctgtccttagattcactctgcagtattccgacattaagatatctgcccattgttcctcctatattgtttttatcacataaaaacatctgtcacatttctgtgacagatgaatagctttttagatttactgagctgctttgtactttgtaagagcgtcaataagtttaggtatgataaccttaacgtcgccaacgattccaaggtctgatacatcaaagatagctgctgtatcgttcttgttgatagcgattacgcattctgagttttccatacctgcgatgtgctggattgctcctgaaataccgcaagccatgtaaagctcaggtcttactgtcttaccagtctgtccaacctgtcttgacttttcaatccagccggcatcaacgtttgctcttgatgatgagatttctccgccaagtaagtcagcaaccttctgtaattccttgtagaaatcagctgatccgattcctcttccgcctgatacgagaacttttgtgtctgtaatatctacagccttgtgagtctgcttgattacttccttgatagttacgttcatatcagcatctgtgaattctaccttgaattcttctactgttccctgcttgccagtctgtggagcgattttcttcattactccaggtcttactgttgccatctgcggtctgtagtcagcacatctgattgttgccattacgtttccgccgaatgcaggtcttgtcatctttaatgttacatcgtccattccaagcttcttttcgattgaatctgtatcagctgttgatgtagcctttaagaattcgaagtacttgttcatgtcgatgtcaaggtgtgtacagtcagctgttaatcctgtgtgtactcttgctgctactcttggtgcgatatctctaccgattgatgtagctccgaataatacgatgttaggatcatatttcttaatcatagctgttaatgctttagcatatggttctgttacatattctttaagcattggatcttcaattacgattactccgtcagcacctgcttcgatcagggactgagccttatcctttatctggtctcccagtaaaactgcatacactttttctccaaggtctgcagctaatattgttgcttcgccaagcagttcaagagtgactttagcgatttcgccatctctctgttccgcgattacatataaatctttgctcattttaacaaaactccttccccattaaattatgtgtctttcttccatctttgcgatgatagcagcaactgcttcatctgcgccaacctcaagcttagttccagcacccttagccattttaccaaatgatgttacaacctttgtcggagatccgtttaatccgatgaaatctgggtttaagtcgtcttttaagtcatcaaagcctaatactttaacttctttttcgtaagcgtcgatgattcctcctgcatgcatgtatcttggctctgctaattcctgaagagctgttaacaggcatggaagtttaacatcgataagatgatatctgtcttcgtactgtcttttaactgttactacgtcacctgcgatatctacttcttctgcatatgatacctgtggaattccaaggttttctgcaatctgcggtcctacctgtgcagtatctccgtcgatagcctgtctgcctgtgattacaaggtcatatccaatcttcttgagtgctgttgaaatgataattgctgttgcgcatgtatctgatccgccgaattctcttgctgataacagatatgcatcgtcgcaacccattgccagtgcttctcttaatgctacgtcagcctgtggaggtcccatgcaaactactgttacagtaccgccaactttttctcttaactgaagtgcagcttcgatacctgatttgtcatcgtggttgatgatgctaggtacaccgtctctgattaatctatttgttttaggatccagttttacttcgtttgtgtccggaacctgctttatgcatactactattttcattttgtataatctcctttcacactactactttactttcattgatcctgaaattaccatcttcattacttctgatgttccttcatagatttctgtgatcttagcgtctcttaatgctctttctaccggatattctctgcagtatccgtatccgcccattaactgaacagcttctctgcatacctggttagctacatctgatgcaaataattttgccattgctgcagctggtccgtagttttcgccggcatccttaacgcaagctgctctccaagtaagaagtcttgctgcgtcaatcttagtctgcatatctgcaagcttgaactgagttgtctggaatgctgaaataggtcttccgaactgctttctttcttttacgtaagccatagcttcgtttaatgcaccctgtgcaagaccaactgcctgtgcagcgataccgatacgtccgccgtcaagagccttcattgcgatcttgaagccctgtccttctttgccaagtctgttagctgcaggtactcttacgttttcatatgatacttcacagtttgatgctgctctgatacccattctcttgatgttttcgcttactgttactcctggtgagtgtaagtcaacgataaatgctgagatacctttagttcctaatttcttgtctgttaatgcgaatacgatgcaagtatctgcaaaacctgagtttgttgtgaagatcttaccaccgttgatgatatattcgtcagttgcttcatcataaacagcctgtgtctgctgtcctgctgcgtctgaacctgcgtttggctctgttaagccgtagcaacctgtctttgaaccgtcgattaacggtcttaagtatttctgtttctgttcttcagtaccgaatgaatcgatgcatgagcagcaaagtgaagtgtgtactgaaattgtgattcctgtacttccgtctacttttgatacttcttccatgcataatgcatagcttaagtaatctccgccaactccgccgtattcctttgaataaggtatacccataagtccatatttgtgcatctttgcaagaagctcaagattataaacttctgtttcatccatttcttctgctaatggtttaacttcgttttctgcaaatctgcgatacatttcctgctgaagcaaatgtgtctttgataatttgaaatccatcattttcctcctaagtattaatcgtttcctaattatctatattatctactattccctgtatagtcaagtacaaaaaaataaaagataaaaagaatattgaatacaagcacaagattgtccaataaatgcaatcccctgtgcattgaattcttaactaattaaaacaatgaaaatgcagaaactctacattttcattgtatagtccatattatatattactgtaattatctatattacctgtaatctattagtcagcaaaaagcttcttaggatctggtaattcgatatccagaggatatacagcctttgatacgttgataaggtggatgtagtcaacgtttccagcaaggatgttgttaccccagcttccgcatccttctgatacagctggtgataagttgtttgttgatggtccccaagcgtctggtgtaggctggttgataagtacacgagctacaggaattctttctgcgaagtacttgatgtggtcttcgttgtttgagaatataccagcagtgtggccgattccgcctgattcttccatgttcttgattgcaagatcaacagcatcttcaaacttgtcatagttcttaagaactactacaggtcccatgatttccttgttaagaacgtcagccttaccaacctggtcaagctttaatccgataaccttagttccctttggaaggttgattccagcagcgtctgcgattacgtcagtgtctttaccaactaaaccagggtttgcttttccgtcgatgaataatacttcacggaatttagcgatgtcagcagcatcttcaaatactgcaacgccttctttctttaattctgcgaagaagtcagcttctttctttgcagggtacagaagaaggttgtcgccgtcgcaaaggataccgttgtcacttgcgatagctactactgataattttgcagcttcgtttaagtcgaagtcgtcatcaaggattgctggagggtttccaggaccaacgccgtatgcaggagtacctgattcataagcagcctttgttaatccggatgaaccagttgcaacgataaggtcgcaggcagccattaagtcagctgaaaggtcgattgtaggttcttcgataatctgaacgaggtctgcaggagctccgcaagcttcgatagcctgtctgattaagttaactgtttctgttgaagtcttctttgctcttggtgcagggcagaagatgatagcgttcttgcctttaagtgcgtgcataacgtttcctaaaggagttactgtagggttagttgcaggagtgataccagcgataacgccaacagggtgagctatttcaataagtcctaatttaggatcttcgttgatgattccaactgatttcttatcttttaagtaatcccagaaagctgtaggagtgtcagtgttctttgcgatcttgtcctgtacgcttccgaggcctgtttcttttactgccatttcagctagcggttctgcgttcttgtagatgattttcgcactttcgtatactagcttgtcaatctgttcctgagtgtagttttcaatctgagctaaagctttacgcgctttttcaactctttcctggtttgtcatgttaatttctccttttctaatattaacaaatacttaaactcaaccatatagtacgtatatttcccattactggttgataaacaataataatacggctcaagccgcttcgcacattatgtattctccccgtttcttaacagattatcaatatctgtaccgcagctttccctatcaccaccctttccgtaatacctttaccgttttcaggctattacattgtatcttttaaagaaagccaaataaatctgatgcttatttatatgcggtattaatctgtttcttgctgttaaatatctctactgaagcactgtatgtaccgaaaaaccggaaaacagcaaatcagttaggagtatacagtatatagtcagtcacatactgtaatacacaatctacagcattagtataccacgctaaaaatcaaatttctatagttttgataaaaaatatacattcataaattcaattaacaacattctatatcattatggagcaagatagtgattttagctctcatttcttcgcatttttttaacgtttttgcactgtatataagtcaaaaaaacagaacagacagaataaaataaaaatatgctgtccgttcttataaaatgtactgaagtttttcttcaccttttatgtgatagggcaaaatcaaagcatcgctatcttttctttagataatcctgtaagttctgctatttcatcatccggatacttcttaatcttcatggccttagccatctcaagtttgccctctgcaatgccttcgtttctgcctatttcctcgccctgctctttggcttcctgcatatcgcgcattctttcctcatatgcgttcatatacttcactccaatctcatcatttgccttaatggaagatactatctcattaagcctgattattctctcatatcctgacgataatgccttatcgtcagttgtttcctcaaagtattcaagcatagctataagatcactgcttactccctcaaggtctttacctttggtgttaagatatatgattacctctccgtcatatacctctttgtcaggatagccctcatacattcttcgcactgtatagcggtattttccttctccgcccatatcaaagcctgctattactatcatacacaggtcacttaacctgttatagtctatagttccctcaggcagcagcttgcttgtcattaacgcgccgtaataacgcattcttttatgcatgttattttcgttttctttctgcacttcggcgttgtaaactctattatcgtcacctatggcgcatacatcaagccttgctattttgcccagaagctcctttcgtttctcattctccgcaatggattcccctttaaagttgatttctctttcaaggataatttcaagaattatcttatatgcctctgcgctctcaattacttcactaaacagaaagcgatccataaggtttaaatcctgcagttttttaggtgggtttgtatgcttcatctactgttgcctccttaattatatatcatatacgtcgtatattacaagttcctagttgtcttattgtatataattatatgaggcacatttgcattagtcaaccatattttctataaaatgtatttttacatattttttaggtttttgtatgcaaccttatatttcctgcctattttatcagcgaagctataacatccacaaattcactttcagtcagcccctgacctattatctgaaagccggcgtctttatacataaactgcgcataataatatccgtcagcctcagcaattttcacctctgtaccctctataaccgacctctcctctatttcatcaaaaaacgcatagcagcttacaggcaggcttcccttttcaatctccagatttacacttcttgaaaaatcctcattggagtaattcagaatgactccgtcataatatacatctcctgtgccgccgttttctctgtacacaccctgaatatcatcccattcctcaaggtctttgggaacctcgggaaacagctctgttccgtaatattcagtcagcgaagctttatccatttcaacaaaatcctcaggcttaagtttaaaatcaagcttcctgctgctgtctatcataatgccgtcggtatgtccgattacaattttattcccctgctgcgccatatccgatacagttccgtgtctgatgccgatacccgcaaatacaataaggcatacacagcctaaaaccgcccctgcgcgaataaatatcttctttttctgtttctgcttcgcatcgtactgcgctctgcgttcaaacaggcttgttaccatttcctcactgcttttcataatgaaacccctctctttcaagtattgtcttaagactctgttttgcgcggtagagaagatttttaatctggcgatcgctcttttttaatatcatcccggcctctctgtttgaaaacccctcaaagtaaatgagccagagtatgtttctataatcagccgcaagccttgacaaagctttgtaaacggctattttctgttcttctctgatatatgactcttcaagacagcactcctcgtctctgtagctttccatattctcaatcggagcacttatctgtctggaattgtgcctaataaagtccaccgccgtattgcgccctattgcataaagccacgatttgaatgtgcttttccctgagaatttaggtttcctggtaataagcctgaaaaaagtatcctcagtcagctcctctgcaatatacaggttgttaacataacagtttaagtaaagaataagtccgtccttgtattctctgactatctccgccagcccctcatcatcaccgtcaagaaaacggcgatagttgtctgcaccgctgtccatccgcctcctcctttccaaaaggtattcatccctttcaattattagtcgtatatacctgccaaaagtctcaccttaattatagcattttaagtcaaataaaaagaacaggcataccagcctgtccctcattgctttattaactttaatttatttccccttattcataagcggaattcctgctgaaaatgccttgccgactattttacttgccgcaatgtaattactgcctgccggatcatatgctatagccttgagcttttcaatatctataacacccttttcgttaagcacagcctcatctgccgccacatttacaatttcacctacaatctgaatatggcttcctacagtgttcatactcataaccctgcattccaaagccacagggaattcctctatatacggcgcatctacaaattctgatttaaccgctgtcatatcaacattgtcaaacttgcttacttcgctgcctgatacaagaccgaaataatctgcttccgaaatatgagcctcatccgcaatatttacagt

SEQ ID NO: 3712 - DNA, 11046 bp, Unknown
  16S sequences of unknown bacteria
cggatttaacattgccgtgggctggtcgggacaatggattgccgaattcgaaaagacgaatgacggcgtcaacgttgctttcgggcagaaacggtgcaatctttatttaaagcccggcgaggttttccgcaccccgagggtaaacatcgaaagctatgtcggggatgaggaccatgcccgtaacatatggagaagattttacataaaacacattctgcccaaagacagagacggcagcccccttcaccccaagctttgccttcatctttttgccgagggcggtaaaccggagttttccggcgccaccgagcagggtcagcttaaggctctgcacacctatctcgacaaaggccttcgtcccgacatatggtggcttgacgccggctggtatccctgcgactatcattgggaccacaccggcacatgggaggcaaatcccgtcaactggccgaacggcattgaggtgctcggagaagaatgtgaaaagcagggaattgattttctgctgtggtttgaacccgaacgggtgcgcccggggacatggcttgaaacaaatcgccccgaatggctgctcaaaaacggcaatcccgacgacgccaaccgcctgctcgacctttcgaacaaggacgccctcgactggcttataaaccatgtggacggccttataaagaaattcaaggtgaaaatctaccgtcaggacttcaatttcgaccccatgccctgttggaaaaacaacgaaaccgaggacaggctcggtgctctcgaaaacttccacattcaagggtactaccgttattgggatgagcttataaaccgcaatcccggcctttggatggactcctgtgcctcgggcggacggagaaacgatcccgaaaccatgcgcaggggcgttccccttcactacaccgacgtgggctacggcgaccatgccataaagcaaaagcagcacagatatatgttcgagtggattccctatttccgcgcccacaaccgcagctgggacgtaaacggcgaaatggtttggttttccgacgatcccttttacaatttccgcgtggacgatttctgctatcagcttgcctgtgcgccggcgctgaccgacataattgttttcgacgccgatgacagcagctttgaaatcgcaaggagaaatcatcccatttggcgcagagcggccgaattcatgacaaattccgactattatcctctgaccgagccccgctttaatcttgaggacttttacgccatggagttttacaatcccgacaccaagaagggatttttccaggtcctctccaacatcaaggtcaaggaaccgtcgtttactgcaaagctcacccttgacggctcgatagactataaggtggaaaattcggccacgggagagacaagaataataagcggaagcgaccttgaaaagggtattgaaattttcttaaagccccgaacgggcataattttcttttttgagcctgcggaaaactaaaaaactcttgacaaaacgggacaaagattatataatgatttttgcctatttggcagggctgtgtttgttcaaagcccgctttaaaggtctttgaagggaggaaatgcgatgttgctggatctttccggcgtctttgccgggagcgagtctctaccattcgagtatgaaatggatctttccgatcttgaattctcgggatactcgtcccttaaaaagccggttaagataaagggtgcggccaaaaaccgcgcgggcgtcgtgtttatcgaacttgttgccgagtatgtgatctctgccccctgtgaccgctgcgccgccgacatcgagcgtaaggaatcgctcccactcacctatgtcgcggttcaggagctggagggagaggacaccgaggatttcgtcgttgcggaggactttaaaatcgatctcgacccccttgtgagggacgacatcattgtccgctatccgtcaaagtttctgtgccgtcccgattgcaagggtctttgcccgagttgcggcaaaaacctcaacgaaggggattgcggctgtaaaaacgaagcgaccgatccgagactcgacgcgctcaaagcctttttcgactaagttttttaaagattatttttataaagggaggtgccggaaatggcagtgccggcaagaagaatttccaaaacaagacgcgataagagacgttccaacgtctggaagcttgacgctcctactctcgtaaagtgccctcagtgcggcgaatacaagcgcccccacagagtatgcctttcctgcggtcagtataacggccgtcaggttatcaaggtagactgattgcgtcaaaaagtgcagttatgcgggtgtattttatacgcccgttttgctgtgtaaaaatttaagcggcggttttcggcaggcaaaccgaaaccgctttttcttttaaggaggtgttaccttgtcggttaaaatttcttcggtcgaaaaacattctcccgccgacagatgcggaataaagagcggcgacgtgctgctttccataaacgggaatgaaattgaggatgttctcgactttcggttttacatgaccgaaaagaaacttaacatagttctcgaccgcggcggcgagcggatagaaacgctgcttaaaaagcgggacgaatatgacgaaaccggcatggaatttgacacctatcttatggataagcagcattcctgcaaaaacaagtgcattttctgtttcatcgaccagctgcccaaaggtcttcggccttcgctgtattttaaggacgacgactcccgtctttccttccttttcggcaactatatcacgctgaccaatctcaccgagcatgaaatcgagagggtcatcaaaatgcacataagccccgtcaacatctcggttcacaccaccaatcccgttcttcggtgccgaatgatgaaaaatcgctttgccggcgaggcgctgtcggctctttaccgttttgcacaggcgggaataaagctcaacacccagcttgtgctctgccccggttttaacgacggcaaggagcttgaaaaaactcttgaggatttgggtgcgctctatccttcggttcaaagcatttgcgccgtgccggtggggctgacgaaataccgcgagggtcttgagcctctcgagccttttaataaggaaaccgcggcggccgttgtggacacaatggagcatttcggcgacgaatttttgaaaaagcacggcacgcggctgtgcttcccttccgacgagttttatctcaccgccgggagagaaattcacgacagttcgttttatgaagattttttacagatcgaaaacggcgtgggaatgtgggcatccttgcgggacgattatcttgccgctcttgaggacgccgaacccgacggcaaaaagcgcagtttttccgttgccacggccgctctcgccgcccctctcatggaatttctcatgaaaaaaaccgccgagaaatttcccgggcttgattataaaatatacaccatacgcaacgactttttcggcgagcgaattaccgttgcggggctgctcaccgggcgcgacataataaatcagcttaaagggcaggatttaaagggcaggctgctgctgcctcccggcgtgctgcgaagcgagggggatctgtttctcgacgacacccacatcgacgatttgcaaaaggcggtgggggttcccgccggctgcgttcccggggacggatatgagctttgcgactatattctgtcgctttaagccacgcgcttgaaaaaaatcgtgttttcccgccccgtgcagaataaacaagcaaaacaaaacctcggttcaaacccatgaaccgaggttttttccgtttaacggcaaattttgtcggcctcaatcgtcaaaaccgttggggttgtttttctgccatctccagctgtcttcgcacatctgctctatgtttctcttggcctcccagccgaaaatctccttggccttggtcgggtcggcatagacctcgtcaaggtcgccgggacggcgggggtcgataacataaggaatttccacacccgaagccttctcaaaggcggcgcgcagctcgagcacgctgacgccctttcccgttccgagattatattctccgcagccctcatgggtcagcagatagtccagcgccttggcgtgaccctcggccaaatccatgacgtgaatataatcacgcacaccggttccgtcgggagtgttgtaatcgtcgccgaaaacgtgcagcttttccagctttccgatggccacctgagtaatatagggcataaggttgttgggaattcccttgggattttcgccgatggttccgctttcgtgggcgccgatgggattgaaatagcgaagcagcgccagcgaccaggtgttatcggccttgtaaaggtcacggagcatctcctcgataaagagcttggtgcggccgtagggatttgtggccccgatgggcataccctccttaagcggcattatcttgttgggtccgtaaacggtggccgacgaactgaacacaagctttttgacgccgtgatctctcatgcattcaagaagcacaagggtgtttatcagattgttgtcgtaatactcaagcggtttcgacaccgattcgcccaccgccttaagccccgcgaaatgtatgacggcgtcgactttgttttgctcaaagattttgtccatggccgcgcggtcgcgaacgtcgtctttataaaattttatgggttttccggttatcttttccacccgcggaagggatttttcgctggaattgtccagattgtccacaacaataacgtcatatcccgcctgctgaagggcaatgcaggtgtggctgccgataaatccggcgccgccggtaatgagaatggttgccataaagtttcctcctatctttcggacgaataaagcgcctcgacggccttaaacgtcatgtaaaggtcaagcttggatattacctcaaagggggcgtgcatggaaagcacgggaacgccgaggtcgataacgtcgacattgagctcggcaacatatttggccaccgttccgccgccgccgaagtcgactttgcccagctctccggtctgccacacgacgtttttaccgtccataatacgggaaatttctcccacaaattccgcgcctgcgtcggaggtggaggactttccgcccgcaccggtgtattttgtcagcacggcgccgtagttaacatagcttgcgttattgcgctcgaagggctcggcaaaggtggggtcaaaggcggcattaacgtcggccgacaggcagcggctgtttgacagcacccatctgcccttgctgcccatgttttcggcaatgtcctcgataaaatatttcatataggccgaatgaaggccggtgtttccgtcggagccgatttcctccttgtcggtgagcacggcgacggcggttcttttgggagccttgcagccgattatcgcctcaagcacgggataggcacagcagcggtcgtcgtggccgtaggcgccgataagcgaacggtcgaagccgatgtcaaccggctttgcggcgggaacggcctcaagctcggcggtgacaaagtccttgtcggttatgccgtatttctcgttgagaatgtttattatattaagcttgacccgctcggattcggggtcgctgttaaagggacggctgccaagcagaatgttaagctcctctccctttatgccctccgaaagaggtcttttggactgctctctgccgaggtggggaagcagatcggtcaccacaaactgcggatcgccttcgttttcgccgatgttgatttccaccttttcgccgtcggcacgcacaataacgccgtggagagacagcggcaccgtcgaccactgatatttctttattccgccgtaataatgggttttaaaaagggcaagctcgccgtcctcataaagaggatgctgctttaaatcgagacggggggagtcgatgtgggcggccgcaatgtcgacgcccttttcgatgtcctcgctgccgataacagcggccatgacggccttgccgcggttgttgacatatattctgtcgcccgccttaagaggtttttttgggtcgaatgcctcaaaccctgcggcaacaagcgccttttcggcaaaggaagtaacctccctttcggttttacaaagggtcataaaatccatatagccctttgcaaagtcaaatattttctgctcgtcctgcttttcaatcctgtcccagccgtttttggcagagggcatgagctgttcttttttttgcgctgctttggttttttccataaagatcacctttcataaaatcccgagacggggagaattatataaatttcatccgttcttcggcagagcggataaggtaaagcaaatcggaatatttttccttatatttttcggcaaactgaaggcttgaaagccgcattgcgtcggggtcggcaatgggaggaaagcccgccgtctggccgtttacggcacagcttatgctgacctcggagacctgcatggcggcgtcggccatggctctgtatgtgtggtgggagacttcgaaaaccgtcgcctctccttccctgctttcgcacatgacccgcaaaattcggtatatggcaagcatgagaaaatcccaaacttccttttgaaactcgtcgcttcccgaattttcgataaggtcaaagataatttcaagagaattcgaaagagcctgcttttcgggcagaacttcgggctcgggctgtttctcgggcagctcgtttttaccgagaagaatgtcgcagggcacctcgtagaattcggaagcctttaaaagaaaatcaagaccgcattccctcacgcccttttcataatgggaaaggagcgcctgggaaacgcccagctcggccgcggcctgtttttgggtaattcccttgcgatgacgcagctcggttatagtttgagcaaatttgtttttcatattcctacgccgaccttcaaagatttttcttgaatttatacaccctgtatattataatacccttgaagacatttgtaaagagggatatttaattgaaaacatataaaattcatctcattcgccacggccttgaaaagcccgagggagtcatcagatatgtgggaaagaccgatttgccgctcaccgcaaggggaaaagagcagataaaggagcttgacgggcagggaatttatccttatgccgaacgacttttttcaagccctcttaaacgctgcgtagaaactcttgaaatcatctatccgaacaaggagataaccgccgttcccgagctttgcgaatgcgacttcggggaatttgaaaacaaaacggccgaggagcttaaaggaaatcccgcctttgcccgctggctttcgggagagtgccctcccggcggagagaccaccgacgcctttgtcaagcgctcggtggtggcctttgccaaaacggtggaggacatcatgaaggagggtgtgaccgattgcgccttttgtctccacggaggaaacattatggcaattctgtcggtctgcgggctgcccgagctgccatttaacgaatgggtatgcgctcccggacggggctataccctgagaattaccccgtcaatttggatgaggggctataaggccgaagtcctcggagaaatttaaaccataaaaagcacaacagccgccaccttccgtgacggctgtttttatttaatttttcgagcggtaaacaaattaaagaacttttgttccgtccacagtcacactgagatgtgcggcatccatgctgtttttgtttgcccacaacttggatccggtgtttttaccgtcggcaaatccgttgacagtcgctctatttacggtcagcgtatatgtggcattataatcgttaccgatttcaatggcagccttgcctgcggcgccgttgtttcggtcgttgaattcgcagttgttgacagcaagattggtgggactgctctcggttgcacgtccgtaaagcaaaattgccttaccgttcgtgttgaatgtacagccgtcaaattttacgtcggtaccgccccatgtccaaattgaatattgattttccatggtgttatcgaaagtgcaatttataaattccgcctcaccgtaaagggtaagctttccttttatggtgcagtttttataaaccaatctgtcacacacaacgccgtcgaaattgcccgttcccgcctgtatagtgagattttcaaaggtaaaggaagaaccgcgctgataattaagctcaccgccctcggcactaacggcatttgtgataacatcaaccgtctgagtgccgttgccgacaaaagtgatgtcacgggatttactgctctcgtttgcaattccgttgtcaagagcaattgtcttttgcgaaggaagtgaaattgcaacctttttgccggctgcatctgtaatagccttatttacatcctcttggctgtttgcaaaaaccgggtatgcggcatccttatcatattcgtggccgtagctgtcgttttcgacggtgtcctgagttgcaacaacggtgaccgaaatgccgtcaatcgacttgttcatatagtcgtttccggcggtctcctgcatatgaccctttatgacaaactcatttgcggcgcccgcggcaaggtgctgctccgttccgagggcaacgtcgcctatggcccagtcgatagccgtgtttaacatggcgtcgccctttattccggtgatctgcaccttatatttaagggcaagattgccgccgtttgtcacgcgaagggcaggaagctcgtatgtacagcccggttcccaaagaatgggcgcataggtgccgtcgtccttttgcgggggtatttggccgttgacgagaaattgcagaagcttgccttcggccgactcccaaactatttgcccgtcggtttttccggcggcatactcgagggtcacgtccaagttgcccgactgaattttgctgaccgaggtgcttgccgtgtcggtgaaccatgcaaaggtggtgccgataagcaaagctacgcaaacaagcatagcaagagcgcttgacacaagtgctcttttggtgtttttgctgttcataaaaaatctcctctcttttttcgcaaatcctaatttgatatataatttgcacatatattttatatcagcgctgctgttttgtcaagtattggcaatgtaaaattcgaattcagcaatttgtataaaaccgaacaatgtgtaattttgatttattgtaaaaaagaaccgtttttcctttcccgcggcacaggaaaaaaatcgacaaacgtcaaaaaagcggttttaaacaaaaccgcaaaaatttttattgctccgacgaaagccaaatcgcatgggcgattgacggaatgggctttttttgaaaaacggtgatcggcgagtgaagggcgccggtagcacaaaaaagcacgtttttatattttttctcgtaaagctcacggagtattcgcgaacaaagcacacttgccgagcagccgcagcccgaaccgcccgactttacgtcctgacggtcgagatagtaaatgttaagtccgcagtcggagtgaatttcgtcaatgtctcgcttttcctccttcatgagtgtgagcagcagctcgcttcccacctttccgagatcaccggtcagtatcaaatcaaaatccgacggcgctttgccggtatcgtcaaagaaaccgcaaagagtttcggcagctgcgggagccatggccgcccccatgttgttgacgtcggtaatgtcgtaatcggtgattttaccgaaggttgccgactttattttgacttttcccctgcctctcgccaccagcagggctcccgcccccgtgaccgtccattgggtggagccggcccgctgtccgccgtattcaaggggaaggcgaaactgacgttcgctggcgcaaaaatgggaggacgtcaccgccgccgcataatttgcaaagcccccgtcggcaaaacaggcggcaagccccaatgtcagcgccatggtggagcaggcgccgtacacccccacatggggaatcccgaagctttcggctccgaaggttgagccggcgcactgattaagcaaatctcccccaaacaaaatgtcaatgtcccccgccgaaactcccgttttgttaagcagcgtttccaccgccgtcgccacaagacggctttcggcctgctcaaaggtcgtctcgcccgaatattcgtcctctattataacgtcaaaatcctttccgcaggggccgtccttttcggtttttccggccaccgacgcaaatccgcaaattcgcgggtcatttgaaaaaacaattgtacctttcccgattctgtttaacataaaaacacctcttgtcggttgtattcttcccgacgggaggtgtttttataatcatattatgtttttaaattcaaacgtttctgtgcgtaaccttcacgcttgtaattatatctcttatggtcacatcctctatcggatagtcaagagtctcctcgacagttttataagacttttcattttcctcaccgccgagtgcagacacatagaataaaccttcgaaccaaaatactccgtattctctctctttatacttaaatgtaacctccgttcctcttgcggccgaatccaaatattcggctattgttgcaaaatcatagtctgtacgctcgtgatgataattctcgtttttcatatatgctttttctcctttgccggaatcaaatgtttctgttggtaatctccacctcttttgtggttattatatcttttatggtcacgtttcctatcggatagtcaagtgtttcctcggcggttttgtaaatcctttcgttttctatgccgcttagtgccgatacactaatgccaccgtcgcagaagaaaatcccgtattcaacacctttatatataaacataacctctccgcccctgagcaccacttggacaaactcgtctaaggtcttgaaactcaaatcggaattcccgctgcaataatgtactgtcaccttatcagcttttggtaaagatttaattaacttggtcacagtctcaaaattaagctcgt

SEQ ID NO: 3713 - DNA, 5319 bp, Unknown
  16S sequences of unknown bacteria
ctatacagctcccgccgttatacatatttctgttctttggtaacgaatgccagcggacggaattccttctcattgatcacacgggcaagtcctcttaccacgcacatttccggatcttcatccactttcacactgatacctgtcttcttctgaagcagcagatccagattacggatccgtgcagaaccgccggtcagataaataccatttgcaataatatcaacacctaattctggtggtgtacgctccaggatcgtcttgatggcatcagtaatgattccaagctgctctttgatcgcatcatatacaaatgcagaggacaattccagcatctgcggcagaccgactaccatattacgtccgcagatctgcatggtcttctcttccggatctatcgcatatgccagctcttttttgatattttctgctgtcttgcttccaataaagaaactgtattccttacggatcgcactctggatcgcatcgtcgatagaacgtccaccggtctggatcagacggctgatcacggttccaccaagagaaagtacggatatttccgtagtctcagctccgatatctacaatcagaactccctgtgcctcttttacattgatgccaagaccaagacctgctgctactggcttgtcaaccagatatacggtctttggcttcatggcagaatcctggatcagcatggtaaagttccgctcctgcatatctgtgggaagtgccacgaaaaagtctgcacctttcagctgtcccttaatattctcttccagcagttttttcagaaatgcctgcatattgctgatgctcgccagattaccataagacataggtgcacctacatgaatgttggccggtgctttttcatacatagcgtatgcctcatctccgcatgccagcagtgtattcttgtcctgaactgctaccatattatgctgcatcaaatatccatctgcatctctgttgtatattttcagatgataagatccaaaatcgcagccaaaactatgattattcatggtatatttttccctctttctctgtgtctacatataatttttttctcgaaaactgatataggagtgacctcctataataatgtgatccgtcaatgtaattccaatcagttctccggcctcctgtactcttctggtcacttccagatcctctctgctcggccgcggatctccgcttggatggttgtgcagaagaatgatctgtaccgctctggctgacagagcttccagaaagatctctctgggtgagatcaccgatgcattcacggttccctgaaacaggtaagtctcctttaacaaccgtccccgctgattgagcatcaggaccagaagcacttcctgttctctgtggcgcagatcttccatataatatcctgccacagcttctgccgaagtaaatgcagtcccttcgccggcttcttctctcgccatccgtctcgctatttccagaatacatttaagctgtactgctttcacttttccgattccatgaaccgctgaaagctcggtcatgctcaaccgccggatcccggtaaacccttccctctccggcacaagattcagcagctctcctgccagatcaagaacatgttttccctttgctcctgtcctcaggatcactgcaagcagttccctgttggtcagtgcctgcactccatagcgaatacatttttcatagggtctgtcttcttcaggcagacagtcaaactgtttgttcatatgcgataacctccgttggtgttcagacatcccttcggttatcttattataactagatccagcgatagataaggatcgccagtgcaatgccgataataccggcaatcgtgatcttgatagtcagaccaaatgtaagtaccacaagtcccatagataaaaccagtggattctcaagtccgaatgcctgcccgtaattcagccagtccagtcctggcacactcgatgcaatgcttccgataaatccgccgattaccacaccggccagcatcagcagaagtaatgtccatccgttcttcgttcctctcatttgtatcttacctccaaaaccagttcatttaatcataacacggcaaatatttttttgcaattgcttctgcaatctttaatccgtccatggccgcagatgtgatcccacctgcatatccggctccctctccgcagggataaagtcccctgatctcactttcaaaggtctcatcccgcatgatccgcaccggcgaagaagtccggctctccacaccggataacactgcatccggccggtcgaatccacggatcagcttctcacatccatggattccttcttccagtgcactggacagctctgccgggaaaatattcctcacattggcaaacgtgtactgtcccttgatgcaaggctccacctctcccagcgtggttgtcggtatattctgacaaaaatctccgaacaactgcaccggaacttttccgccgcccaattcataagccgcccgctccagctttctctgaaattccacacccgccagaatatcatcacttccaaaatcctccggcgtcacagtcacgatcatggcactgttggcattccggctgtcacgcgcatgataactcattccattgacagccagatgacctttttctgacgatgcgttgaccacatagccgcctggacacatacagaaggaatatacacctcttcctgcacctgtctgccgggttactttataagctgctgacggcagaaatgatggataatcagctccatactggctgatattgatcatctcctgcggatgttccatacgtacgcccaccgcaaaaggctttgcccgcatagggatctgcctggtcttcagcatagaaaaggtatctctggcactatgtcccactgccagcactacctgtccggaaacgatctcttccatctctccggtcttcagatctgtggcctgtacaccatggatctgtccattctggatcatcagatctgtcatctgacaatgaaaccgtacctctcctcccagacgctcaatctcttttcggatataggtcacaattccgatcagttcatctgttcccagatgaggcttctgctcatataagatctcttcatcggctccggcttccacaaacagttccagtactttccggttgcgtcccaccgggtcttttaccagtgtattcagttttccatcagaaaatgtacctgctccgccttctccaaactgtacattagaccgctcattcagttctcccgtcagccagaaatgctccaccgttctggcacgatcctctgccttctcgcctctctctaaaaccagcggtgcatagcctgcttttgcaagcatccaaccgcagaacagtcctgcaggtcctgcaccgatgatgaccggtcttgcctgtattttttttgcatctgcggacgctttcggaaactgataccaggttttcaccgctttttccgcatgaccattgcaatgcttcagcacggttggttcccgtttcacctctgcatcgatcatataaacatattttaattccccgcctctggcatccagcgaacggcggatcagttcataacggatcagttcctccggtcgaatacgcagagtcttgatgattttctgttccagatcccggcggctgtgttccaccggaagcttcaactgtctgattctaagcatgtacttctatacctttctgttcctgtgccgctgctctgcctgccagatatccgctggtccatgcccactgaagattatagcctccgcaggctccatctacatcgatcagctctccagtgagataaagtcctggcacgcgcctggattccatggtcgtatgatccagttctgtcaaagggactcctcctgtacagatctgtgcctgttcatagccgcggcaccggctgatggtaaagtgaagtcctttgatctgtgcggcaagccgctcacagtcctcgtctgtccagtctccgccttgcttcttcagtgagattcctgcgcgctccagaagaagactgcacagtttatccggaaacatgccaagaagcacggctgcacctcttcgctcctgggtatatgctctccgatcctttaatcttgtaagcacctgatcccgcttccggagaggacaaagatccaaggtcacactgcattcgattccctggttcagggctctcgccgcatatcggctgatctgaaataccggaatacctgacagtccatacgaagtaaactgtagttccccggattcacagtatttctcttctccgatctgtaaggtcactgctccgtctgcccggacgcctgctgccttacctccatctttttctgccacacacagacctgttagagcgggcagtggatccaccaccgtatgtcccatactttctgcaaatgtataaccatccccgtcagaacctgtctccggcgctgctttggagccacaggcaaggatcagggcatctgcctcataagtccagccttctgtctccactgcgaatctgtcattgatttttttcactgccagtgctttcgtatcgcaggcgatcttgactccttctttcaccgcagtcagccgaagcacatctgcaatagaagaagcctgtccgctgcccgggtagagatagccatttctctctttggtaaggatgcccagactttcaaaaaaatctaccgtatcgtccaccgaaaagctctccagtgcttctttcaccagatccggccggtctgtccgataattggataattcctgattccggttggtaaaattacatcgcccgttcccagtgaccaacagttttttgccagtctgtctgttcttttccagaagagtcacctttgccccgtttctggccgctgtaatcgctgccatcagtccagaagctcctcctcctataatcaatacttgtttcaacgctctatcacctcgtcaattctgtctctcaccggcgcaagctctcccatctgtccgtaagcctgttccatctgttcttctgcggcctttgcctgctccctgtctccttttctgaggctcacctgtctttgaatagctgcttcataatatctagctactctgtagcactccagcatctcttcatcaggctttatccccagagcctcatttttataataacgctccacacagtacgcatattcttctctgctgatatatgtgaggaaggtcaccgtccgggttccgtccggcagaaatccaatggcattgtctgcaacggcaatcagttcaatgctcataaggactgtcagaatgacgatcaccagacttaataactttttcattctgcctgtcccct

SEQ ID NO: 3714 - DNA, 6709 bp, Unknown
  16S sequences of unknown bacteria
ctgggcagcgcgcttcacatacttgtacgcgctcatgcccttgccggacagaatcacgagcttgttgagcttgtcgggatctacctgtcccgtgaagggctcgaccgacgaataggtcccgacgcagttgacgagcaccgtgccctcgtccgtgcgcacgaaccccttcacgcgatacgtctggtcgagaaacgtcgcgatgatgtgctcgagcgtggcgcgcgagacgccatcggcaagctcgaggtacagcgtgcgcgacgtcaggtctgccgtgagcggcgcctcctcgccatcgtcgtgctggtgcttcgcgagcacatcgagcacgtcgaagtcgatggcgccaaagctcgtctccacgatcgggatgtcggggcgttgccccacgatgagctcgcgcgttgcggcgatctgctcgggggtcgccttgtccaccttgttgacaagggcgatatcgctcgacgccagctgcctgaccgcgttttgcgccttcgcgtacaccttggggaagcggatcgcgtcgatcaggcagatggcgccctcgtacgagatccccggaaagcggtccgtttgggagagcagcttgcgcacgcccgtggggttcgaaagccccgacgcctcgacgagcacgacatcgctgtcttccttgacgaaacgctgcagcgcgcgctcgaactcgtcgatgcggcacgagcagaacaccgagccccctgcaatctcgtcaagttccgcgccgagctcggcaaggagggtgccgtcgacaccctccctgccgaagtcgttgatgatgagctgcaccttttgccctgcgaacaggcggatgaagttcttgaggaaggtcgatttgcctgcccccagaaaacccgttaccagatacagcttcgtcatcttgcttgctcctttgcgctctgttacgcgcccatcttctcgagggcctcgtcgattgcggccttgagctcctcgttggaagggataatcgacttccacttgagctcgccgttcaggtacatcgacggcaggttgggtacgcccatcttgacgcagcgggcgacgttctccttgtagatgtacttgtactcgaccatgtcgatcttgtcgccgtacagctcttttgcccagttggcggcgttcatcatgtagccgcacgccgcgcactgtgccgagtcgagggtgaagacctcgagaagcggcttctcgagatgctcgtagtcgggcagctcgacgccggaggtgtcgacctctgcggcctggtagttcttgaccatctcgcggacgttgtcggtctcgatggccgcctgcgagcagccgatgcagttctcgatcggcacgtcgtagggcatgtcgcagccgggggcgatgatgaagttgtgcttggagtcgacgctgtcgaggatgtcgacgacgcacttcatgttgtcttgctggttgcccaggcgcatgaccgtggtcagcgggatgttgccgccaatcgtgacgtcgtagcggtcggtgatttccttggccttgacgatgtcgacgttctcgtcgacggagatggaatcgggcttggtcttgcacatgccctcgatgttacgggaggcatcgccgcagacgaagaaggaggagaaggcgcccttctcgcggatgtggttgaagatctcggtgtagggctcgatcatatactggtcgaaatcgtccgcggaaatctgggagatcagcgggtcgaccagcgcgatgacgtccatgccggcctcgatgtagtagtcggccatcttcatagcggtgcgggcgcagaacgcgaacagctcggagatctcgtcctcgaagtcgtacatgtcggtgaagacctcgttgccgcgcaggtgggatgcgagcgtgaacgggccgcagatcaggccgtacagcgcggtcgtgtcgccgacctcttccttcatgcggcgcatgacctcgagcacgtacgggatgcggccggattccttggtcgggatcttgcagtcgcacggcgtctcaggcggctcctcatcatcttcggtctcgagcgggtggctggtgaccgaaggcgggttgtcgtctgcccaagccagatcgcagccgaagcactccgcttcgatctgcaggtcgaagatgaccggctgaccgtcgggacggtacagcttgttgacctcgagcagcgactcgactgccgcatcggggtcggtcaggaacttggttgcagggtatcccttgaggtgacctgcatggacgccgcagaacggcacccacggggcacgctcgacttcctcgtgcttcagcgcgcggaacagaagttccttgctcatagtttgacctcctaagacagggggcgcttctcgcccctcgaaccgattggctcttcttgccagatggtaccttgcatactagtgaggggtaccccgcctcgcatcggaacaaatgtacaaaagcccgccggggcgactgtgttccggtcgctaaaggcaacttgagtatagtggtgtatgtctactagtcagcgcacaataccggttcgcgcatttcttgcacctcgcacgaggcgcttcccccatgcaccgtgcaccggaaacgtggcactgcctcacatctcacgttgggcgcaccggaaacgtggcactgccacacatctcgcgttcctcgcacgggaaacgtggcagtgccccacctttgccgcaagccgtgcgcgcggggctctactcccccgccacaacaccaagcgcatgcttggcggccgccaggaagcgctcgatgtcctcgtcgctgtgggcgaccgagaggaacagcgcctcgaactggctcggcgcgatcaggaagcccgcatcgagcatctcgcggaagtacacggcaaactggtcggtatcgcacctcgacgcggaatcccagtccgtgaccggacccccgttgaagaagagcgtcgcgacgctgccgaactggttgacgcacgccgtaacgcccgtctcggcaatcgcgctgcgcagccccgcggcaagcttctcgcccttcgcgtcgagcgcctcgtacagccccggctcgcagagcttcgtgagctgcgcatagcccgcctccatggcaacgggattgcccgagagcgtgcccgcctggtacacgggaccggtcggggcgagcttctccatgacctctgccctgccggcgacggcacccaccgggaaacccgcgccgatgatctttccgaacgtgacgatatcggccgcgacgccgaacttctcctgggcaccgcccaatgccacgcggaaccccgtgatgacctcgtcgaagatgagcagcgcgccgaactcgtcgcagagctcgcgcagcccctgcagaaagcccggtgctggcgggaccacgcccatgttgccgctgaccggctcgacgatgacgcaggcaacctggtcgggtgcgctctcgaacagcgcgcgcacgctcgccaggtcgttgtaggcggcgaccatcgtatcgctcgcggtctttgcggtgacgccaggcgtgtcgggaatgccgagcgtcgccacgcccgaccccgcactcacgagcagcgagtcgctgtgaccgtgatagttgccggcaaacttgatgaacttgtcgcgccccgtgtagccgcgcgccaggcggatggcggtcatcgtggcctcggtgcccgacgagaccatccgcacctcctcgatgttcggcacgacctcgcacatcttctgagcgagcttgatctcggcctcgcacggcgcaccgtacgagacgccacggtcaagctgcgcgcgcacggcgttcatgacgtcctcgtcgccgtgcccgaagatcatcggcccccagctgcagatgaagtcgaggtactcgttgccgtcgacatcccagacgtgcgagccggatgcgtggtcgtagaacacggggtcgcagccgaccttgccaaacgcgcgcaccggcgagttgacgccgccggggatgagggttttggccttggaaaagtcggactctgatgcagcatgattgagtgccatcgcgattgttctcctttgatgcagatgtgagtgtccccatactagcgcaccggcaaccccgccggccgtcgtgcaaagtgcccgttcctactcctcgaaatagcgcatcgagaccttcttgtactccttcgtagacacgagcacgagcggctcggcctgcgcgatgtccgcgagctcggccacgtagccgtcgagctcgtcttgcgtctgcgcatgcgtcatcgcgtagatcttgtagggccaggtcggctgggccaggcgggtgtagcagtgcgacacgtacggctttccggcaaacgcggcgccgacctcatcaagacgcccatcgtcgacgttccacaccgtcatgccgttgaacgcaaagcccatcttctggtgcttgaccatcgcgccaaagcggcggatcaccttgagcgccttgagctcgaggatgcggtcgatgacctcgtcttcagtcacctcgcgcccgatttgccgagcgatgagcgcagccccctgctcgaacggtcgctccacaagggtcccgtccgcgtcgaagaccacgtcgtcttgcgcccagcgcacgagcgccacgtcgaacgcatcgtcgccgtcgaaggcgcgggcatcggcgtccgccggcacccttcggcttggtctgcgctcccgcagccttcttgccatgtcccttgccaaagtccacgcggatcttgtacatcttggtcgcgggcatgtcgagcaggtcgtcgcagccggacttctccacgatcttgcccaggatgcgcgcgcggtcctccgcagagcgcgtgatgagcgtgaaccagatgttgtagcggttctcacgcaggtagttgtgcgtgacgccgggataggcgttgatgattgccgccacctcatcggcacgctcgggcggcacggcgagcgcgcacaacgtggaggaatacccgaggcgcttcgagtcgaacgatgctccgatgcggcgcacgagcccctcttcgcgcaggtcgagcagcgctttttcgacctcgtcgcgctcgaacccaagctggtcggcaagcgttccgtatgggtcgggggcaatgggaaagcccgactggatcgtccccaggaccgtctctttaaccttggcgttcaccctcgcgtcccttctcgtagccccggggcacgtacgcgcagtacggctcctcctccagataatcgcccgtcagcgagagcgcgcgggcgcggcagccgccgcatacccccttgaactcgcaggcgccgcacttgcccttgagccggtcgtaatgacgcaggtcgtcgaagaccggcgacgtcgtccagatctcggaaaacggcttgtcgagcacgttgcccagttgcatgtcgaagtacccgcacggctgcacgtcgcccgtgtggctgatgaacacgaagcggatgccgcccaggcagccgcggctgtgcgcgagcgggccggtgagcttgatgccgtcggcggcggcacgctggtgcaggatgcggaagtacatgggcgcatcggtgggtttgaagttcatcggtgaggtcttctggcgctcgtaggcccaggtcaggacctcctcgtactcctcgggagagagctccacgtcgacaaggtcttcgccgcgtcccgtcgggacgagcaagaaggggtggaagtcgcttgcgccaagctcctgcgccaggtcgtgcatctcgtccatcatatcgccgttcatcttggtgaccgtcgtgttgacctgcaccttcacaccgtacttctcgaggtttctgatcccttgcacggtgctgtcgaaagcgccgccctcgccgcgaaactcatcttggccggcggccgtgggaaagtcgagcgacacgctcaccttggggatgccgtgcgcggcgatctgctgcgccgtgacatcgtcgatcatggtgccgttcgtgccgatgacgggccggcagcccttctcgcgcgcatagtcgatgatctcccagatgtcggcgcgcatgagcggctcgccgccggtcaggatgaggatcgggtcggtgatgctcgcgatgtcgtcgatgacctctttgcactgcgcgaggctcagctcgccagggtacggctcgcagtgcgccgcggcgggtgatctcccacgcgatgatgctcggtgccttgatgccggtacgcgcctcgtaggcctgcgccgcccgaccgcagccgggacggtgcgctccggggtgcgcgccgccatgtcctgcggggcgggagccgggatgtgaaccaggatggggcatgtctctcctcgtggtcgctcgtgtgttctgtggaatggcgctgcagggccgccgcttagagggccgccccgcgcgcgtgcacgcttatgcgcggtcttgcgcaagccagcgcgcggcttcctttgcgtggtacgtgatgatcatgtcggcgccggcgcgtttgatgctcgtgagcagctcgagcacgacgcgtttctcgtcgatccagccgttttgcgccgcggccttgaccatcgagtactcgcccgacacgttgtaggccaccgtcgggaactgcgtctcgcgcttgacggcggacagcacgtccagatacggcaaggcgggcttgaccatgacaaggtctgccccctcggcgatgtcgtacatcgcctcgcgcacgccctcgagcgcgtttgccgggtccatctggtaggcgcgcctgtcgccgaatgccggtgtggaatcggccgcgtcgcggaacggcccgtagaagccgctcg

SEQ ID NO: 3715 - DNA, 10221 bp, Unknown
  16S sequences of unknown bacteria
agaagatcagccgcaaatgcaccaagtgcggcggacgcggctatgagcataagcgcgtcaagctggacatcaagatcccggccggcatccagagcggccagcaggtccgcgtcagcggaaagggcgagcgcggcatcaacggcggaccaaacggcgacctgtatatcgagatcctggtcacgccgcataaggtcttccagcgtgagggcaacgacatccacatcagcgtgccggtgagcgcgattgacgcgacgctgggctgcaaggtggatgtgcctacggtatacggcgatgtctcgctgagcatcccggccggcacgcagcatggcaccaagttccgcctgaaaggcaagggcgtaaagtccgcgcgcagccagggcgatgagtatgtcgaggtgcagatcgagatcccgaccaagctcaatcatgaggagcgggagctctatgaaaagatccgcagcaagaaggggtacgactctcctttcgagcggttcaagcgcgcatttaaatgatcaagaaaatgaggatgccagtttggtgcatcctcatttttgtcgtgtgcttgaacatcagtgaaaagcagtcatgaaaaaagcgggatgcgctcccgctgtgtgtcgttcatatcagctgcgtccgataaaacgcagcgtatagcgttcgcctggaacgaggtcgaagagcatgagggaatcatcctcaaaacgctctccttcgctcagtccgctgagcatcacgatgccattgtccaccagctgctcatcactgtcgtagagcttgtagtcaaagctgtcgtatgtcccgctgccgcggatcttttcgccctgcagcacgatcaccgcttgatctggcagatattcgtcctggatgacgctgacctcatcgatccggatcgtcgaatgagatgcgctgccgtagtcctggatgttcagctcgacgggcagctgatcggtccggatatcgatcgctttcagcggcagatcgtccaggatctcgatgctgcattcgtcaaaggcaaaggatgagccgctgacggtgaagaacaccgttccttccgacgatgtcccctgactgatgtcagacgcggggatcttcacattggccaaaagccgttctccttcgctctggttcgtgtataggccgaaatcttctgcgtggatgtcgtgtgagccggtgtagaccgtttcctcatcgccgttgacgatgcggacatccacctgcgcatcggcgctgatgtttctgccggcgctgtcgcagagcgcgaagaacaggctgtaggtctcgctcgtctcatcgtattggaaggaccagtcttccagcgtttccgcccggctgggcgtacaggcgcaaagcgcaaccatcagcaagcatgccaggaaagcaggccatcgtttcacgcggattacctcctgttcagcatgcaggacactcggctgcagcagtcgcccaggtaacagttgtcacagcaggagagctccatccgctgtgcgcgaagctctttttcgctcggcagtgcataaggcgcgcatctgcggatgccgcatgggctgcgcaggccgaaagcgagctgcttgccgtttccggtcttcagatagcggtagacttccgcatagaagctgacgctgtcaccgaccgcaaacgaggcaaagtctgccccatccatccagacgtgatcttcgatggcatcggccgtcatcccatccggatacatataggcgaagaagatgcggttgaaacagatccgtttcttgtccttgctgcgccttgcgatcgtgccgtaaaaatcgctgatcggcgtatagatggcgcagatgaacagcgatcccttgtcgtttggggaacgcatctggatgtcgatatactcgtcataggtgagcttttccccgccgacgatgtcatttttgctgtccggatcaaagttgacgaaccggtcatcatagatgagcagttgcttctttccatagtactgttgcttgatccgttctctcgcttgttcttccagctgcagttcgtcgttttcttgttcttgcacattcatttttcccctccgctaaataagtgccgccattgacggcctgacatatttacggatgatgaatgagacaagctggcgctgtttatccctctgccttgggcgcgtcttgcttcttcttgtgatagcggtcctgatccaggaagaacatggtaaacgtcgcgcgacagagcaggacctccttgtcgttgaagatgaagatctcatagacgccggtcgtgcggccgcgggagatttcctgggcaattgcgatcagctttccgccgatgcccggtttgatgtaattgatggaagcggacagcgtgacgctgtctcttccggtcgcgaagctggccgcgccggcagccgtatcgcccagagagaacaatgcgccgccatggacgaagccatgtccgttgaggatctgctcatcgatgaccatctccaccttggcatatccttcatggacgtcgatgacgcgcatgtcattgctctgcagatatttcgaagagctgttgagccgctctttcagctgttccatcgtttcattttccaaaatcatcgcctcacttcatctgtattatacctgattttaccgttgctttccatcccgatgaatgcagttgtgaccatgtttgatgcgatatgctataatgagacaagatcaggatatgcctgaagagatgaggatggaaagatgatgagacggaaaatgatcagcgcaggcctttgcctggcgctgctgtggatgagcgggtgcgggcagaaaggcgagccggagaagttcacttacttcctgttcgccacgccgctgaaggaacatgagacatggctgaaggccaagacgggctttcaggcggcatgcagcgactatgggctgaaatgcgcctgggaggggcctgcggggatcgatacggaaatgatggaggaagtgatggagaccggcatcctgcagaaagcagacgccatcatcactcagggcgtggtcgaccctgatatggttcgcgaggcacaggcacagggcatcccggtcgttctggtggacagcgatatcccggaatctgccagctttgcctacatcggcaaaaacttccggcagcaggcagagatgctgctggaggatatcgaatcccgctatggagaggatgagcatctggtcgtggccattcaggtcgccgagctgggctttcagattgcgaaggatcagatcgctgccgtggaggaagtgttctctgcgcatcgaggcggttatgagatcgtctcggtcagtcagtccaagtcagacaatgttcgggcaaagcaggaatgggacggcgtgatggccgaacatgcggacatcaatgtcgccatcaactttgccggagagtccgctgcttcttgttataaggcggcggaaaaatatgacctgcgcgatcagatgctgatctatggcgtggatgaggtgccggaagtgatggagatgatccgtcagggcaaggtggacggcagcatcgtggcgtcattctatgagtacggctatcgcagcgtagagatgctgtatgcgtacatcaccgaagggaagaagccggaagagcgggtgcaggatgtcgtgatgatcatggtcacgaaagagaacatcgacacctatcagaaggagctttccgcatgaagaagccatggacgctgcgcaagcgtgtctttctgtcttcagtggccatcatgggcatcgtcacgttcttgctgagcgtattcaatgtcatggagatctatctgaccgaacggaatacgactgcgtttgagacatacatgaacctgagcacgttttttgacagcctcagcgaagcaggcggctatctggaagaatatctatatacggaaaatgaagattcgttgacggattatgatgaagcgatccaaaccgcggagcagagcatcgaaaatctggatccagctttcctgaaagatcagatgtggcattttcagctgctggagaacatgctgtacagttatgaggatctgggcgcagagctgatcgcggatccgctggatgatgcgatgtatgcgaagacggtcaatgcgcaggatctgatccaggcgacttccggcgactattatcagcggctgaccaaccgggtggagcatcatgtggagcagctgcagctggtcaatcgagcgatcgtgatcggctccctcgccgtcatcgccatcctgctgttctggatcatctatgtcgcgttcatcatgctgcgttccttcatccgcccgctgtatgaggtgctggacaacatcgagaagatcaatgagggaacttatgattttggtgctgtcgcggccaacggcatcgagatgcagacgctttgccagacgctgcagacgatggcggacacggtgcaccagcggatccaggagaccaaggaaaaggcgcatctgaagcagctgctgctggagaaggagaacgagagcctgcataaggatgagctgctggcccgcagcgaattcaagatgctgcagaatcagatcaatccgcattttttgttcaacaccttgaacatgatccatcgtctgtgcgcatgcggagaaagcgacaaggcggcggagaccgtgctgaagacgagccagctgctgcgctacagcctggacaatcagaatcaatacagcagcatccgcaaggagctggcggcgatccgctcttatatcgacattcagaagctgcgcttcggtgagcgcatccgctttttgatcttgaacgatcatgcggagggctgtctggacatggcctttcccgggatgatcctgcagccgctggtggaaaacgcggtcaagcacggactgaagaatgtgaccagggacggcgaggtggagatctatctgggcgcggatgcccaacggctgacgatatcggtatcggataatggagaagggatgccgaaggaagaggctgaggcgctcttgcagcgctgttcccgggcggaagagtccgcgcagctaggattgttcaatgtcgtgcagcggctgaagatgttcttcaaggaacgcgcggacattcagatcgaaagcgatcgtgactgtggcttcagctttgccgtcatcatctcgctgcaagatgaacatgaaggaggggaaggacatgatcaagatattgatcgcagaggatgagcagatcgaacgggagttcatcgccaatatcgtcaagacgtctcagccggagatcttgctgctgcaggcggaaaacggggaggaggcgcttcggctgtatcaggagcatcagccggagatcgtcttcctcgacatcaatatgccggtatacaacggcctggaggtgctgcagcggatccgcgccatttccgggacggccagcaaggtgttcatcttgaccgcatatgattatttctcttatgcgcaggaggcgatccatctgggcgtggaggagtttctgctgaagccggccgaagcgcagaagatcgcggctgtgctgagcagcgccgtggagaagctgaagcatgaacgcaatcaccgtcagcagacgagccggctggtggagcgctatcatcatttgcggccgctgatggaacaggactgtatctccatgatcctcagcggagcgaaggaggacgagctgctggaacagctgaagctgctgaacatccatttcgtgtctggctgctgctttctgcttgacccgcttgcggatcaggagatcgaggatatctgccgcatggcggaggatatcgggttctcctgtctcgcgtgccagatcgaccgatccacgatcctctatgtcctggcagggttttcgatggaaaaagaggatgtgcgcgcgatcgagcagatgatcaagagccgcgcgggcatcggagcacgtgcgggcacgatcgaaaacgagctgccggcgctgcatcagtcgtatttccatgcgctgaacgctgcctgtgcccaagaagagccggatgatgatgatgaacgcttctgtcagatctgggtgcagaagctcttcgaagccggcgccagtgaggaggatgagctgctgcggcagaccgtgcatggctatgtgctggctttgttataccgcaagcatggggagccagaggaagtcagcgcgatgtatggccatgtggccgacatgctgtgcaaaaagatcaatgcggaagagcatgaggaattcatgcaggcgcaggagatcgcggcgggcatcaatttcagcgtgccggccaaagaggcagagctgcggatgacgctggcgctcatgcgttcgctgaagctgtggcggctgatgcgctatcagcggctggatcacatgacgcgcaaggcggtggaatatatcaaagccaattatcagcatcagatcagcctgcatgatgtggcggagagcctgcagatctctgattctcatctcagccgcctgctgagcaagagcaaccgcggcttttctgatctgctcaacgaataccgcatccagcaggccaagcatcagatccgcagcggtgagatgatcaagcaggtcgcagatcagtgcggattccgctcacagagctatttcacccagatcttcagaaagttcgtcggcatgtccccgaaggagtatcgggatctgttcatccagtgagcgaaaaagcgaaagggatggcaggatgcgctttccatcggcgtgatcctggtatataattttgcatgataagaaacaaggggatgatcatatgcgtgcaagaggggcattttttactgtgctgtcagcggtattgtccggggtgacgccggcctttgccaagctgatctatgcggatggggtgaatacggagatcctggtgttcttccgcaatttctttgcgatcctcccgctgctgctgatctgtctgtggcagaagtgttcgttccgcttgtcggcgcgtcagggcgtgcagctgctgctgagcggcgtgttagggcagacgctgacggtgctgatgctgtatgcgagctatcattatgttccgatcgcgacggcgacgaccttgcacttcatgtatccgatcttcatcacgctgatctgcgcgctggtgttccatgagcatatgacctggtttcgtctggtggcgcttggcgcggcgacgctgggcgtgggctgcttcgtcgatctgggcgcaggaagcgacatgagcgggatgagcctggccctgctctcagccctgaccttcgcttactatatggtctcggtggaaaagaccgggctgaaccgcctgcatcccttcgtcatcacgctgtactttgccgtgatcatcagcgtgacgatcttcgcgtacggcatggcgcgcggagagctgcaatttgcgttcccgccgcagacatatggcaagatgctgctgttctcgctgctgacttccgtggcggcgctggggctgctgcagctgggcatccgcctgcttggcgcggctgatgcggcgatcctgtgcatgtttgagccgctgacctcgtttgtcgccggggtgctgctgcttggagaagagctttccctgctcaaggcggccggcagcgtcctgatccttggcgccgtgctcttcatgatcctgatgaaccgcttttcgttaagcaaagggaggcaatgatgaaaaagatcaaatttgaaaaatggcagctcatcctgctttcggtgttttatatcgtattcggcatcatatcggccgctgttccccgggaaaactttctgacgttcttcaatgtgctcggcttgctcatcatggtggtcggcgcgttttccatcctggtctggttcttgcggcgcggagcgcatgccgcgcacagcaatcaggtggcgtggggcacgctgtacatcatcgcgggcatcctcgtctggatgcgcccgcagatcatcgtatcgaattacccgatggtgttcgccggctgtgtctgcatagacagcgcgctgcgtctgcaatatggaatggatctgcagggcatgcgcgtcaggggatggcagctgatcgccgccagcgcgctgctcacgatcatcctggcgctggtgatcctgctggcagacctgcaaggcagcgcgctcgtcgtcttgttcaccatcctgctgtgtctggacggcgccagcaatctcgcggtgctggtctatggcaggatgctgcggaaggcgcgttcggcagtgcgcagcccggcccgcgtcgaggaagaagaatgaaaccggtccgccggtttttttcttttgtgcatgtgaattgacatcaggcgggaaatggcgtatcctgatgatgaacaccccccacccagggggtatgggaggaagacgatgaatcagaatcaacagaaggtcatgcggctgctgctgacggcgcgcggacagatggacgcggtgatccggatgatggaggaaggccgctactgtgtggatatttctaatcagctgctggcgatcgacgcgctgatccgcaaggcgaacgcagatgtcctcagcaatcatctgcgcacctgcgtcaaagacagcatcgagcatcatgaagacagtgagaaaaagctgcaggaggtcgaagcgctcctgcataagatcgccaggtaaggagggatgagcatgatcgaaacattcaaggtgaagggcatgcactgcgcgtcgtgcgccagtgcggtcgagcgcatcctgaaaaaacaggagggggtgcaggacgccagcgtcaacctgctcagcgaacaggtcagcatcacgtcagacacctatctgcaggatatccgcgtgatgcagcaggcgttggaaaaggccggcttcgaactggagcgcatccaggagagcagcgagatgaccatgcatgtgtcaggcatgcattgcgcggcctgcagcgcggccgtcgagcggatcctcaagaagcagcccaatgtcacggatgcgcaggtgaacctgctcagcgagcaggtgcgcgtctgctatctgggcagtccagatgtggcgcattgggaagaggcggtgagcaaaggcggctatcatctcgaggaaaagcagccgcagacgatgcgggaggtccgcttccatatcggcggcatgcactgcgccagctgcagcagcgcatgcgagcgcatattgtcacgcatggacggcgtgcaggaggcgagcgtgaacctggtcaatgaacaggcacaggtcacctatgatccttcagtggtcaagctcagcgagatgttcgccgccatcaacaaggccggctatcaggccgaggcgctgaaggcggaaacgatcgaggagaagaaggagagcaatgcgccgatgatcatcatgctcgtgctgggcgcgatcctgctgtatatcggcatgtcgcatatgctgcctttcccgctgccgctgccggatatcatcgacgatcagacgcatccgttcaatttcgcgatgatccagctcatcctgaccacgatcctgctgatcatgggcaaggatttctatgtgcgcggcatccctgcgctcttgcatcgggtgcccaatatggatacgctggtgtccatcggcacactgagcgcttatctgtattcggtgtattccacgatccagatcggcatgggaaatgtgcatgccgtgcatgcgctttattttgaaggcgcgggcgtcgtggtggcgctggtgcgtttcggcaagcacctggaggccatcagcaagcgcaagtcgatgggagcgatccgcgcgctgctgcagcttcgcccggatacggtcacgctgttcaaggatggcaaagagatcgagatcggggtggaagaagtgtgtgtaggtgatgtgctcgtggtcaagccgggagatcatatcccgatcgacgccgaggtcatcgagggcagcgccaatgtcgatgagagcatgctcagcggcgagagcatgccggtgaagaagaaacaaggagatgaggtcatcggcggcacgatcgacctggatggcaggcttttggtgcgctgcagccgcgcgctggaggatacgacgctttcgcacatcatttccatggtcgaggaggcgcaaggcaagaaggcgccgatcgcacgcatcgcggaccgcatctcgctgatcttcgtgccggcggtcatgagcatcgcgctcatcgcgggcatcatctggtatctcgtcagccgtgatgcgggactggccatccagatcttcgtgagcgtgctggtcatcgcctgcccttgtgcgcttggtctggcgacgccgaccgccatcatggtcggcagcggaaaggcggcgcagctgggcatattcatgaagagcggcgaggcgctgggggatgccgggg

SEQ ID NO: 3716 - DNA, 1658 bp, Unknown
  16S sequences of unknown bacteria
ctggtaatctgctcgtgttcctcgcagtagcgcagggtcttttccagctcctcgccgtcgttcatgccggggcacaacacgatctgcgcgtgaatctctatgccggcggccatgatggcctcgagcacgtccatgccgcgctgggcgttgcggcccatcatgcggcggcggacgtcagggcttacggcatggaccgacacgttcatggggctcatgttgcggtcgatgacgttttgcacgtcctcgtcggtgaggttcgtgagcgtgacaaagttgccctgtaaaaagctcaggcgatagtcatcgtcgcgaatgtagagcgtggaacgaccgcccttggggagcatcgtcataaagcagaacacgcaggcgttcacacaggtgcgcatgccgtcgaagatgggaccatcgaactcaaggccccagtcctctcctgggaagcggtcgagctcgacggaagtgacggtgttgtcgcgcggatcgaaaacctccaggtcgacggtatcatcgtcggcctcccagagccacacaatcatgtcggtaagctgctcaccgttgaccgtgaacacgcgcatgcccggctcgatacccacatcccacgcgggcgattcgggacgcacgttctttacgagcgcgccctcacccggctcggggtcgcggctgcgcccgtaatcggccacctcggcggcgtatgcgggtacggtctggtccatggttagcggcaaagctccttgatgcgctcgacggcgcgctcgatgtgttcttgcggggtggaggctccagcggtgatgccgatgtgatgagcgtcggtaaaccccgcggccagaagctcggaagcttcctcgatgtgatgcgtgtgctcgcaggcgtctgcgcaaatctgagccaggcggcgggtgttgcccgagttcttgccacccacgacgaccatgcaatcacagcgtttggcaagtgatgcggctgcctgctggcgctcgctcgtggcggcgcagatggtgttgatcacgcgcagctcctgcacgcgcggggtgatggcagccacgacctcggcgaggttctgcgcggtctgagtggtctgcacaacgaggcccaccttgcccttgagcgacagggcatcggcgtcggcggcacagctcacgacctgcgcatcattgccagcgtggcccagaatgccctcgacctcgggatgacccggctccccggccacatggaccttcttcacgtaggggcacgtggcgtcgacgacgttaaggccgcgctcgcgagcggaatcgatgacctgcggcaccacgccgtgggcgcggatgatcacggtgccggatgtggcgtcgtccaaggtgtcggccagaccgacgcctgcctcggcgagctcgcgcaccacgatggggttatggatgagcggacccaaggtatggacctgagtgcactcccctgcctgcggcgctgcacgccgtagcaggtgccggcgtgggcggcgatctcgatggtaggcgcgattgcctggtcggacgcagtcgcggaggtgttcgtcacgttctcgctcatggctagaacctgcccggatgctcggcgcacaggtcgtctcgcatggcgtagacgcggctcatggcctcggactcaaaccattccaggcgctccgtgcgcttaagcccagccgg

SEQ ID NO: 3717 - DNA, 2302 bp, Unknown
  16S sequences of unknown bacteria
ctgcgtccccgcgcgggcgcccgcaacctgaacctcttcgataggagcttttcccacatggcagacatcgcattcgagaaggacctctccgtcgccgagaccggcatcgggggcctgaaggtcgtcgacctcgccgtccacggcgactcgcgcggctggttcaaggagaactggcagcgcgccaagatgaccgccctgggcatcccggatctcagggtcgtccagaacaacatctcctacaacgacagccgcggcgtcacccgcggcatccacgccgagccctgggacaagttcatctccgtggcgcgcggcagcgtattcggcgcctgggtggacctgcgcgagggcagcgccacctacgggaaggtgttcacctgcacgctcgacccgtccaaggccatctacgtcccgcgcggcgtgggcaactccttccaggccctggaggacggcaccgcctacacctacctggtggacgcccactggtcgctggagctcaagaggacctacaccttcgtgaacctcgccgaccccgagctcgccatccagtggccgatcccgctcgacgaggccaccgtctccgaggccgacctcaaccacccgatgctgagggacgtcgtccccatggcgcccaagaggacgctcgtcaccggctgcaacggccagctgggccacgcggtgcgcgcgctggcggaggagcgcggcgtggcgaaggacttcgacttctgcgacatcgacaccttcgacatgtccgacccggcggcctacgcgcagtacgactggtcgctctacggcaccgtgatcaactgcggcgcctacacggccgtggataaagcagagacccccgagggacgaaccatcgcctggaaggccaacgcgaccggcccggccctgctcgcccgcacctgcgccgagcacgggattacgctcgtccacgtgtcctccgactacgtcttcgacggcaccgccgaggtgcacgacgaggaggagcccctcagcccgctgtccgtctacggccagaccaaggccgccggcgacatcgccgtggcaggctgcccgcgccactacatcatgcgctccagctgggtcatcggcgaggggcacaacttcgtcaagaccatgaaggcgctgtccgaccgcgtcgccgaccccgaggacgggctcgagcgcatcaccgtggtcgacgaccagctgggccgactgaccttcacgtgcgacatggcggaggccatcttccacgtgcttgatttgaaggccccctacggtacctacgactgcaccggctccggctccgttaagagctgggcggacatcgcgcgcgccgtcttcgaggccgccaacggcaacggcgacagggtcgtgccggtgtcgaccgccgactactacgcgagcgccgcgggccccatcgccccgcgcccggtccactccgcgctcgacctgtccaagctcgagtcggtcgggttccacatgcccgactgggaggaagagctgggggagtacctcaagacgctctagccgctattaacttttcgagagcaaaagccgccgcttgttaacggtggcttttcttgttggtggctatctgcgcagtggtgccaatagtattctgcggaagatctacctctcgcttgtctcggtggcggacttgccgggctggtcatcgtaggcgtatttgctgtacacgttgacctcccactgctttttttcgacctttgccacagaatccaggatgaatccggttgcaaggctcagaccacagaggaacataaacgatgcagcaagcatggcagtggggaaacgcgggaccaggccggtctgaaagtactcaacaaagataggaatgcccaaaaccaggccgataatcgcgaatagaagcgcgacgaggctgaagaacttcagcgggcggtagtccttgaacagcgtgccgatcatcgcaacgactttaatgccgtcgctcacggtattgagcttggactcggagccttccggacggtcgcggtactcgatgggcacgtctttgatgcgccagcggtggtcgacggcgtggatcgagagctcggtttcgatctggaagccctcggaaagcacagggaaggttttaacgaacggacggctcatggcgcggtagccggtcatgacgtcatcgaagctgtagccatagatccacttgatcatggcgcgaactaggttgttgccaaaaccatggaaggcgcgcttgttctcctcggagtaggtgccgttggaaaggcggtcgcctacggtcatgtcggccgtgccgttaaggatgggctcgcagagggccttg

SEQ ID NO: 3718 - DNA, 32759 bp, Unknown
  16S sequences of unknown bacteria
gtatccatgcccagggactgcatcgtactgcgcgccagatggccaaacgcgtcgcggccgattttggtgaccatcgtcacatcgccgcccgccttgtgcgccgccacgccctggttaaaccccttgccgcccggccccatctgaaacagcgagcacagcaccgtttcgcccgggctgggcaggtgcggcccgcggctcatcaggtccgccacaaagctgccaaagaccaagattttctttttcataaaaggatgcctccctattgctgcctcacaccattgtgtgaacggttctcattgcttcccattataccgtaccccaggggggaaggcaaagaaaaaagggccgtttagccctttaccacaagcccgaacagcgtgcacagccctacggcctgctgcggggacaccaccgcgcccgccaattccggcgcgccctggctgacggtaagcccttccagccggcaggcggtaaaatccatgccggacagcgccgtgccggtaaagtttacaccggtaaaatccacgccctccggccgggtgcggcgaaagcgcgcatgggtgaaaaacgcatgggccagcgagcagcgctctatctgcgtgcgctccagcgcggcattgtcaaaattggcataggccagctggctgtgcgccaggcgggtatcgcgccagagggtatggcgggcgtccagccctacggccttgcactcttcaaagcagcagccgccaaagtatgcgtccatggcgtgcgcgccggaaaaatcgcagcaaaggaacaggcagtctcgcgcgtccagctgagtaagattggcggcagcaaagcggcagcctacaaacgcgcagccgtgcacgctaagcccggacagatccgcgccggaaaggtctgcccgctcacatcgaacgccggaaagcggcagctcctctatggcggcggctttcagcgcgtccgccgggcgcgccagcgggggcagggcatgggggtctggcgtaggcatggcaatcctcccttttccatacgcgcccgccgcttatcgcggcagcaggcgcaggtccttgccctggaagcccaatacatcgcacagcgccgggcttaaaagccgggaggcgatgcgttcgccgtagcgctcggccagctggccgggggccaggttggtggaaatgccggtatggcggccgcgccgcaggcgttcttcgacgagggtgtttaggtattcgatggtgatattgcgcagcatgggctcggtgccaagatcgtccacggccaaaaacggcacgcggatcagcgcggagagcgcatccggcccgccgaaatgctgggcgcggaaatcgcaattcagctgataggccgtgacaaaccgcaccggcgtccgcttttccctgagcgcagaagccacgcaggaaagcagaaacgttttgcccagccccgtcggccccagcagcaggaaattcggcttttccgtttggggaaactgttccgcatagcgctgcaaaagcgcgcggtgccgcaaggcggtttcgcgctgcgggcccgcggggaataccatggcgtcgaagtcggcaaaggagcaaagcagcacgccggcatttttcctgtccgcatgctgcacagcctggcatacgcagcgcacccgccgcccgtcctcggatagggtataccccttgtcttggcagagcgggcagcggtaatgcgggcggtaatcctccggcgaaagcccggcggccaaaagcacggcggtaatgtccgcctccatgccgcttacaaaggcgcggcgggcgttttccgcttcttccagcccggcccctgcggccgcggcgcgggcggaggcggccaaaagccggttgtattggcaaaatatggcgtccagccggggcagggtgcgccgaagcggctgtaacgcgtcccaggaatattgcatgctgttctccttaatattggatcaggctgtccagatcgccgcgctcttcctcgctgcgctgggcatagtgcagagcttggttgtccttggccttcggcccggcgccggaggccttaaatgcgatgcgcgcagcggatacggaatcgatgtgctgatcgtgccactgctctaacaggcgctttatcatgcggtaggggctgcgcgcgccgtggctgcattccgccgcatacagcacgacctcctctggcagctgccaggtgcggacccacaattcggccagctgcaggtccgcctcgtcgatcttgcggcgggtctcccccatgcgcgcaaagcactgggccatcaggctgcgcaattccgcccgctttttttcaaaattgcggatggattttacgccgcgcagcttatgcgcctgccaggaggacagcgtagcgtccacgtcggaaaagcgcagggtcttgtgctgcttacagatttcgcaggccaagaggatgcgctcgtgtgaattgcctgccgccgcccactcgcggtagctggccagctggccggccgtgggcgtggtgcgcgaaagccccagcgcctgcagcacctcgcggcacagcgcatgggtctggtccccctcgatggcctccgcctcgtgcaggccctgggcatcaaaatccatgaggatgccgtccagcgtatcaaagctggggttgcgcacggagacggtgcgcccggcggccgccagcaccgccgcctgcgtaaacccggcggccagccatttttggtacagctcgcgctccggctgggtggcgctgcggaatagccccagccgctgtaacacggcggccagcccgctgtcctgctcggcctgggcggccagccatgccttggcgtcctcctgggtgcgcacgccctcttcattccattggcgggcgatcttatcgatatagctgacctggcggcgggcggtggccttgtccaggtcctttaattttttctgcccgtattcgatcaaaagcggcacggcgctgcggtcgatcaaaaacacatccgtccaatcgtatacgcgggccagctcggcaggctggatggccttgggcgcaaacagcgcctggatttcgcggttgtaggctgcgtcggcgtatacgccggcatcttgcggcagggcgttgtggatatccagataaaacacggcgaacatcggctttgtctgcaccagtaccaggcccttttcctgccaataggcaaaggcgtcctgcacctctgtttcgctgagggccacatcgcgcgcaaatgcggacagcgaccccgcgcccgtgccttgctggcactgcatcaagccgtagagatacgccttgactgcgccctccggcgctgcgggcataaattcgcgaagaaagatattttcaacaacggtgcggtcgttgcggtccggcgcttgttggtatgagcacagcggcatacagagggccccctttacaaattggcgcggcaaaggcgctttgtggattttatcataacatatctactgcggattttgtataaagtataaggaagacacggcggatggaaatttctgccaaaaggaggaaacaagcgcatgcgtgtctaccataacggcgtaaaaaaacgcctggcgctgcttttggcgctggcaatgctggcgctttcgctgtgcggctgcggcaaagcggggcccatcgacgagggcttttggcagcagccttcccagcacagctaccgtgccgagctctccttggacgaggcggcaaaggccgtcagcgggcgcatgacggtgacgtataaaaacccgacgggtgcacagatggccagcttgccgtttatgctgtaccccaacgcctacgcccaagtgcagaccgcgccgtttcaaaacgacgagatgggcaaggcgtaccccggcggcttttccgaaggcggcatcgtgctcacggaggttacggccgacgggcagcctgtgcagacccgcctgaaaaacgacgacgagacgctgctggaaatcgatttgccgcagccgcttgccgcagacggcacggcggaagtttcctttgcctttaccgtgcagctgccacactgcctgggaaggttcggctatggcgacagcacgtataacctgtgcaactttttgcccgtggcctgcgcgtgggacggcacgcagtttttaacccatccctacggcgcggtgggcgatccgtttgtcagcgacgccagcgactacagcgtctccctttccgtgccggaggggatggtggcggcgtataccggcacggccgaaaaagagcccgttacggaaaacgggcgcaccacctacagcatccgcgccgcgcatgcacgggattttgccgccgttgtcagccgcgattttgccgtggagaccacgcatgtcaacagcggcgggcagcgggttacggtgcggtcgttttacgatgcggactgcccggagggcgggcgcttggccgccaacaccgccaagcaggccttgcaggtctttggcgaaatgtacggcccttacccgtacggggaattcaacgccgtgcagacggattttttcatcggcggcatggaataccccggcctcgtgctgctggatagatcgctctataccggccagggcctggcggatctggagcgcgttacggcgcacgaaaccgcgcaccagtggtggtatgccgtggtgggcaacgaccaggccatagagccttggctggatgaggcgctgacggattattccacgctgctgtatatgggccgcgtccacggccaagcggcggagcaggatttctacgatacctatgtcagcatgctcagcgaggtgatgggccccatgtacaaccgcgaagcgtacaatgtgacggtgggcagccctgccgccgattttcccaacaaccaggtgtatagcctggtggtgtataccgagggcaccatgatgctacgcgatgtggaaaacctcatcggccgcgacgccatgatacgcggcctggccgcctattaccaaaagtatgccggcaaattggccaacggggaaaacctgatccaaaccctggaggaatccgccgggcagaatgtgcgcatggcctttgacgagtgcctgtaacgcacgccctggttgtaaactagaatcggaaagaaaagcagacggccctggcccgcctgctttttccattttgcgcctttttatctaaaaatcggcagccggattttcgacatgttcattgactttcccagtatgaaatactatactttttcatgagacgacaatgcgctggaaaagcgttggaattacaacgaaaatggcccaaaagggcggcgtttttgccagggtttggcaaagatgcctgcttttgaaatggtatagttttccaaaattgagcgttttttctggcgaatatccagtcaaagaggaggaaaattcatgaaaaagcatgcgaagaaatggcttgccatggcgcttagcctgtcggttgcgtgcatgatgctgccggcggtgggctttgctgcgggcaatgtggcgtcggtagatggcacggaatacgctaccgtacagcaagcggtggacaatgccaacggcaaaaccgttgttctgctggatagtgtgacggaaagcatcaccatcgcaaagggccagaccatcaagctggatcttggcggctatacgctgaccaatacggctaagcagcacaccatcaccaacaacggcacgctgaccatccagggcagcggcaaggtggacaatgtagaccacggcaagggcgcgcttgtcaacaatggcgaggctacgattgccggcggtacgctgacccgttcacaggaaaagggaacggacgctgccaccagcggcggcaactcttggtatgtggtggacaaccacggcaccatcaccatgacgggcggccaaatcatcaacacctcgggctttagctcgttggtacgcaatatcggcgccacgtttaacctgaaaaacggcacgctgcaaaataccttcatcgtattgaaaaacgacgacaacggcgtattcaatatgacgggcggcaaggtggttaccaccggcagccagggcagcgccctgcaaaactggggcaaggccaccatttccggcggcacgctgagcgccacgggcggcggggttgccctccaggcgctggaatgggacaagaagtatcaatccgtcacggaagtgaaggcgggcgctacggtggacggcgatgtgctcgtgcgccaggacccggactataacaccggcgaaatcgaatttaccgtaaccggcggcaccatcaacggcaacgtcaccgcgggcgcaggcgcagaggttgcgcttgagggcggctctgtttccggcgcgctcggcaccatcgcggacagcggcaagctcgtagtttccggcggcagctatgcccagtccccggccaaatacctggcggcggatgcggcggcggctggcatcggcaagcagggcggcagcgccacctattatgtagggacgccggcgcagattgagcagcgcgtggaaaaagccgctgcgggcgatgcggtagaggtgctgcagggcgatttgaacgtgaccctgccggacggcgttgccgtcatcaacagcggcagcggcgaagtcatcgtcaacgaccagcccgtaaccggcgagggcgttgttacccatacgcacaaagcggtaaaggtagaggccaaggacgctaccgaaaccgaagcgggcaacatcgcctactggtactgtgaaggctgcggcaaatactttgccgacgaggcgctgaccaaggagatcacaaaggacgataccgtcgtcccggccaagggccaggcagcccagcagcccacggccaccccgggcgtaaatccccagaccggagacaacagcaacgcctccgtttgggcggctatgttgagcttggcggccatcggcgcggcgggcacggcctgcgctgcctatcgcaagcgcaaagcacaataacacaacccagcaaaggaccggctcttttcaaaaagggccggccttttttcatgcggcggaggggcccagctgcgttaaaaacccgcaaaacgtgcacaataggctcatagcatgccgccctgccccttgtaggaatgcgggttatcatgtaaaataataagaatcattggaacgagcctggagggacaagccaaatgaattttgagcctgaagctgccaacaactttatcgaagagatcgttgcgcgcgatttggaaagcggcaaacacaaaaagatcgttacgcgctttccgccagagcccaacggatacctgcacatcggccatgccaaagcctttttgctggatttcggcatcgcggaaaaataccatggccagtgcaacctccgttttgacgataccaaccccgtgaaagaggataccgagtatgtggacaacatcatgcaggatatccgctttttgggctgcgattggggcgacggcctgcactatgcctcggattatttcgatcagctgtacgcctatgcagaaaccatcatccaaaaagggctggcgtatgtggattttcaaacggcggagcaaatgcgcgaaagccgcggcacgttgacccagcccgggcaaaacagcccctaccgcgataccccgccggaggaaaacttgcggctgttccgcgcaatgaaggcgggtgcatataaggaaggcgaatgctgccttagggccaagatcgatatggcgtcccccaatatgaatcttagggacccggccatgtaccgtatcatgtataccccgcaccaccgcacgggcacagcatggtgcatctacccgatgtacgattttgcccaccccgtgtccgacgccatcgagggcgtgacgcatagcatctgcacgctggaatttgaggaccaccgcccgctgtacgattggttcttgcaggccatcggctttgacaacccgccgcaccagtacgagtttgcgcggctgaatatagaaggcaccatcatgagcaagcgctacttaaagcgcatggtggacgaaggctatgtctcgggctgggacgatccgcgcatgcccacgatctgcgggctcaggcgcaagggctataccaagggcgccatccgccggttctgctccacggtgggcgtggccaagagcaacagcaccgtagagcccggcgtattggagcattgcctaagggaggacctaaagcccgccgccccgcgccgcatggccgtgctggatcctgtcgagcttgtcattgaaaattatcccgaagggcagagcgaaaaagtgaccatcgccaacaacgcggaaaacgaggcgctgggcacgcgagagatgaccttttccaagcatgtgtacatcgaacgggaggattttgccatcgtcccgccgccgaaatacaagcgcctttcgccggataaagaggtgcggctgatgggcgcatacatcgtcaaatgcaccgggtacgaaaccgacgacagcggccgcgttacccttgtaaggggcacgtatgaccccgattcgctctccggcaccggcgggcgaaaggtcaagggcgtgctgcattgggtggataaggccaccgcggtggacgcggaggtgcgcctgtacgagaacctggtcttggatggcgagggagactttacccagcgcatcaaccccaattcgctgtccgtgcgccatgccaaggtggaaaaaagcctggcgggcgcccagcccggcgatgcgttccagttcatccgcatcggctatttctgcgccgacccggacggcacggcggataggccggtattcaaccgcagcgtagggctgaaggattcctgggccaagcaggtgaaaaagcaatgaacgatgcgctttccgaaaccattttgcacgaggataccgtgtaccgcggccggctgctgcatgttacatgcgcggaggtatcgctgccaaacgggcgtaccagcaagcgtgatttggtgcgccatcccggcggcgtggtggtcgtggccgtcacggacgacggccgggtctatctggagcgccaatttcgcacggcgctgggctgcgttatcacagagctgcccgctggcaagcgcgagcctggcgaggaccccgatttgaccgcccaccgggagctgaaagaggaaaccggccttgtggcacagcgctgggaaaagctgggcgaactcgtcaccacaccgggattttccgatgaaacgctgcatatctacctggccaccggcctagcccagcaggagacagagcgcgatgaggatgagtttatcgagctgtttaccctgccgctggaagaggcctatcaacaggcgatgcgcggcgccctgccggacgccaagaccatcgcgggcctggccatggcgcacgccagatggacggcagagcatacgaaaggggaatgaatatgagcgaggtacgcacacggtttgcgcccagcccgacgggctatctgcacatcggcgggctgagaacggcgctgtacggttggctgtttgcaaaaaaccacggcggcaagtttgttttgcgcgtggaggataccgaccagcagcgctatgtggagggcgcaaccgatttgatctaccggacgatgaagcaaaccggccttacctatgacgaggggccggacgtaggcggcccctatggcccgtatatccagagccagcggcgcgagatctaccaaaaatacgccgacgagctggtggaaaggggcggggcgtactactgcttttgcaccaaagaggagatagagcagcgccgcaaggccgcagggcacgaagagggtgcgtataaatacgatcggaaatgcgcggatatcccgctggaacaggcgcgccgccgcattgcaaacggcgaaccgtatgtggtgcgccagcgtatcccggacagcggcaccgcctcgtttgacgatctggtctatggccatattgaggtggatgttcacgaattggaggatggcatcctattgaaaagcgacggcctgccgacgtacaattttgccaacgtcgtggacgacagcttgatgcatatcacccatatcatccgcggcacggaatacctttccagcacgccgaaatacaatttgatctaccaggcgttcgggtgggaaattccgcagtatctgcatctgccgcccgtaatgaaggatgcgcacagaaagctgtccaaacggtatggcgacgccagctatgaggattttatccgccgcggctttttaaaggaagcgattttaaactacatcgcgcttttgggctggaaccccggcaccaaccaagaactgtttaccatggaagagctggccgaggcgtttgatgtcaagggcatttccaaatcgcccgccatctttgatgaaaacaagctgcgctggatgaatgccgagtacatccgccatatggatgaggccgcgtttaccgcgcacgccgccccgtattacgaccaggtgctgcccaccaacgacagccaaaagcaggtgctgtgccagattttacagcagcggctggaaacctttgccgagatcccggacaagatcgcgtttttgcgcgcgctgccggattacgatctggcgatgtattgccataaaaagatgaagaccgatttggaaaaatccaaaatcgcgctggaaaaggcgcagcaggtgctgggcacgctgacggattggcagcagcaggccatccacgatgcgctgcttggcgcagccgccgagctgggcctgaaaaacgggcagatgctctggccggtgcgcgtggccgttaccggcacgcaggtaacccccggcggcgcggtggaggcggcggtgctcttgggcaaagaggaaaccctgcgccgcatacaaatcggcttggaaaggatcggacaaaacgcatgaaacgattgaaaacaacgctctcgctgctgctagcgtcgctgatgctggcgggctgcggcggggtggccacgcagcaggtggacgccggcaactacgttgtggaaatgccgggcgaggtcaacaagaccacccagagcatccccatcgaaatcgaggaaatcaacctttcctccagctttacgctgaccaccaccgaaaccgtggactataccgaaggcgccacctataccgccgtggaggcagattgggcccagctggtgcaggattacaaaacggcgtgggaggctgccgggcatacctatgaccaggacaagctgtttaccgcgctgctgcaaaatatgctgaataccctcttggccggcgccatttacgagccggcagtcaacgataccatccaagaccgcgcctgtatccggtacaagtttaccctgccgccggatgaggacgaggcggagccgctgcccagcaaaacgcggcgcggcgaatatgtcgtattcataaacgagcagtccgcctatgtgctggtgtatgtcgcggaggaggatggctacaacgagcataccatggaaaactttttccaatccatccgcttcaaatgatgcgcaaacagggccgaaaggccctgttttttttatgcgcatcgggcatgtgcgcatggtatactatgctatgatagatagcagggaaaaggagaggatacagcaatgaaccataccaaaaagatggcggccggtcttttggcgctgttgctggcaggcggggtgctggcaggctgcggcgggcaaagccgcgaagatgccatcggtgcgctgacgaacaccgaaacgcccacagccgccgccaaggcaacgcctaccgccaacgcagaggacgagtttgaagcgggcgtctgtacggatacggaatacaccaatgcctggatcggcttaaagtttaccgcaacggacgacatgaccatgcagaccaaagagcagatccaagattcccaagaggcgggggcggagcttttgcaggtggaacagagcagcaacgccaacgtggttacggaaatggcggcggttacgccggaggggaacaacatcaatatttccgccgttaaagaccaaagcggggtcataaccccctcgatgtacgtccgccagatggaaaatgcgctggaagcacagaccggcgaaaacgtatcttacgagtttggcgatccttcgcagcgcaccgtggccggcgtggagtttgaaacgctggatcttcgctgtacgatagagcaaaacggacaggaatttaccatgaaccagaccatgctggtgtgtaaaaagggaaattggctgtaccaaatggtcatcagctattttgaggacgacgcgctggaaaccttcctggcatgcttttcagccgtttgacggcaaagaaaaagagcggaacttccgctctttttttgctttacggcttttgcgcacagacgatgagcatcatggggcggcgcagctcgtcgcgcatgccgggcatatccagcatctcttcgggcgactgcggctccaccacatggcgcagcgcaaacccgcagcagaggagcccctccagatatgcggtcagcgtgcggtggtattttcgtaccggctcgcccaaaaacacggcgttgcgcggcccctggcaaaagtaatggtctacgggaaaatgccggatgcgcccggattcgtcgtagtcccaatcctgcgggccctgggcggtaaagatgggatgctcggcggaaaagacaaaccacccgcccggcgcaaccatggcgtatacccgccgcgccaccgcatcaaaatccgccacataatgcagcgccagcgagctgagcaccacatcaaagctgccatccggaaacgcagcgtcctctatggcgccctgttggtactgcacctgcgggcgggcatttttctgccgcgcggtttccagcattttggcggatagatccaccccaatgacggatgccgcgccctggtcggcggcataggcgcagtgccacccgtagccgcagccgagatccagcacgcgcttgcccgcaaacgctggcagcagcggggccagggtgggccattcgcccgcgccttggagcccctgctccgaacggctcatgtggctgtacttttcaaaaaaacgcgggtcgtcatacttgttttccttcatccaaagcctcctatgcgctaggccaattttgccttttcatcctgccagatatagaggaataggcccaaaagcacgatgagcccgccgatgatcacctgaagattgggcacttcgcccaggaaaaaatagcaggtgatggcagaggccagcggattggccagcgaaatgatgctgaccgttgcaggctttagcgtgcccagcgcccaaatggggatgatgagccccaaaaacgtattgcaaaacgtgatgcccaacaccagtgcccacaatttcggcgtatacgggaacagcggcgcgccggttaccaggcaaaagccgatgaagatcacggtacataccgcaaactgcacgcccatcaacagcgcagtgggcacgggatgcgcgccggtgcgcagatcgcggctgatgaacagcgatacggtataatccagcgcggcggtgagcatcagcacgatgctcagcgggttggcgccgccgctgccgccggacagcgagacgatgagcagcccgcacagcgtaacccccagcccgcaggccaccttgaacggcaccttttcatggtagatcagcacgctggccgccagcacgaacagcggggaggagttgcccaggatattgacgacaaaggtgttggtgccgcgcagcgcatacgaccatagcaatagctcgatcgagcgcagcacacccaagaccaccatgcgccctaaaacatttttctgctttaaaaacccgcagctttccgcccgtcggggcttggtggaaaaggaaaagagcagcagccccgcgcccacgatgagaaagcgcaccatcatcgtggtgatgggctgcatgcccgccgccaggcagggcttatacatcggggaaagaagggagctgcaaaccacatacagcgccatggccgcatacgccatggcatggcttttgggaacggacaagaaaaaaacctcctatttgctgccgcagccatcgcagacacggcaaaatttataaaaatccaatcatattttaaaacaaacccgactgagtgaaaaaaaccatcggcaagcgccgcaaaaaagtgaaaaaaacgttacccctagcataccaggaaaggggggaaaattcaatgaaaaaagcggcccaagggccgcaaaaaagccgcttagcccagcgccgcatacagcccgatcaggcgcagcgttgccatcagcgcatcgatgtgggtgcgctccatgccatgggaggcatgcacgcccgggccgatgagcgcgcagcgcgtatcgcaccccgcagcaagcgccaccgacgcatccgaactgtaatgcggataaatatccaccgcaaagggcagctggtgctgggtggccaggtctatcagccgccccgtcatctcatagtcgtaagggccggaggtatccttggcgcagatggaaacctgccgctccgtacaggcaagatcctctcctacgcagcccatatccacacataaaagctcattgtaaccggcaaacgccgccgcgccatggcccacttcctcatggacggtaaagatgatgtcggtatcatactgcggatagatctcctgctgcaccatgtggcgcaataaggccatcaggcaggcggcgctggctttatcatccaaaaagcgggatttgatatagccgctgtccgtcaccacggttttggggtccaggcagagataatcgcccgtcatgatgccgagcgctgccgcgtcctccgggctgtgcaccgcctcatccaggcgcacggccatgttcttttcatcgcgcgggcgggtggcggcgtcatcaaacacatgggtggcaggggatagcgacagcaccgtgccggtatacgccttttggctgcgggtatacagcgtgcagtaggcgccatccagcgtgggcagcagcgggccgccgatgcgcgcaaagcgcagcaggccgtcctcggccacagagcgcaccatcagccctagggtgtcgatatgcgcacacatcgatacatgcttttcgctgctgcgccccttgacgggcacgatgacgttgcccttgttgcttctgtgcggaatatagccgaagcgctcagcttcccgggccaccagctgcgccgcattttcggtgtagccgctggggctgtgggtgcgcaaaagccgcactaggaaatccagtagataggtttggtctgccatatgatccatagcaaagatccccccctttcaaagcgtacccccatcataccgcaaaccagagcaaaaaaacagagccgcgccaaaaaagcgcggcccagggggcgcgcttttttggaaattcaacgatggttgggggtaggacagggccgatccgtacggcacagccaggccaacgaagcgtccatggcgatgcggcaggcgttggtattgtccaacgcgttgagcatgacaaaatcgtggatcgtgccgctgacaaccagccgggtgacgctgacgcccgcctggcaaaggcgcttggcataggccgcgccgtcgtcccttagcacatccgcttcgccgttgacgatcatggtgcggggcaggccagacagcaggcccagcggcgcacgcagcggggaggcggtgtacaataggccttggctgggcgtggcaagatattgccgccaaaaccactgcatgcccgcccggtagagcgaatagccgcaggcaaaggcatggtaggaaggcgtatcaaaggcaaagtttgtaacgggataatacagcagctggccgtcgatggcagggccgccgcgctgcaaagccagcagggccagcgccgtagccaggttgccgccggcgctatcccccgccaccgccaaggggccgggcttgcagccaaggcccgcctgctgcaagagcaggggcagctggcacagcacggtatagcattgctccagcgcggtggggtatttggcctcgggcgaaagggtgtattccggaaataccaccacgcggccggtgcgcgcggccaattcacacaccagctttttatgcgtgtgcaggctgccgaatacccagccgcccccgtgtatgtagaggatgacgccgccgggccggcatggggctttgggggcgattagcgccgtagggactctgccccagcgcccggtatccaccgtaacatgagaaatatcggccgggtacaggcacacgggcgcatcctgcgcggcgctgagcgctgcgcgccccagcgcaggcggcagctggaagggcaagggcggccgggcgttttccgctgagatttgccgggcctccttttccaaaaaaatgcattggttcatagggcttcccctttctgtattaggcatatatacattggttcgtatcgttccgcctataccctatgcgcacctgccgcagggggtgaaaggcaaacaaaaaggccgcgcatcatcgatgcgcagccttttgcatgctgggatgcttatggcagataggtcatcgggtttttcgccgatccgttgtagcggatctcaaagtgcacatgcggcccggtgctccgccccgtgttgccggacagcgcaatggtttggcctttggaaaccttttggcctaccttcaccttcacgctgctgttgtgtgcatagcgggtaacccacccgttgccgtggttgatctccaccaaaatgccatagtcgccggcgctgcccgcgcgcgtcaccgtgccggccgccgaggccttcacggcgctgccgatgggcttgccgatgtctatgccggcatgcagcctgccatcccgcgtgccgtacggggaggtgatgcggccgctgaccggccagccaaacgagggcgcgcccttgatggcgctgccgttgttattgttgctgctggtcttttttttcgttcccaccagcacgaccttgtccaccggctctttcacggtcttaaattcgccctctttgcgtgccgtttcctgcccgtttaggtaggtgatggtcgtggtcttgcggcgcaggccctcttcgccctgcgttttggtcttggtggagcctttgaccaggctgctgtcgtttttcttcaccgtttcaaaggggatggcttcctcctccgtcttttccaccgtgcatttgacattcagcgccttttcggtgcaaagcaccatcgtggcctcctcctgccccagcacggaggacccttcggcatacggcgttacctctaccttgtccacaaattccgccttgccgttttccacggtctgggaggagagcacgtttgtcagcacggtctgcgcggcctgctcgttggccacggataccgcgggcgtgccgttgacggtgatggtcacctggccctcggccgtgccggccgaagcggagatgggcgccatcgcctttgccacctcttccgcgttgggatctatgatttccagctggccctgggcgatgccctcatccgcattggcggccgggcgcagcgcgatcaaaagccctgtacttgccacaaagcaacaagcaagcccgctggccacccagagcagtaagcggttcttccggccgggggccggggctgtgcgagccgggcgctgggccgtctgcctgcgggaaggaaacgccgcaggcggggtttgtttgcaatccttcatctgtaaaaaacacctcgtgaagatattgtgacatttttttgcggcaaaatcaagcaaatattacgaatttatgaagaataaacgaattttaagggggatttctgtgcattatggcgcatatttgtccaaagcaagggggaaaaagggcgctttgcggcagcaaaaagcgccggggcgcagaaaaggtaggctatgcgcccaaagggcggcaaaaggcatttctttttttccgcggatggggtataataagaatacaaaaacagagaatacttccgtataaaagggaggcagattgtatgagcatgaaattggtcattgccattgtgcaaaacgaagataaccaaaagctgaacaatgccctggtcaaggagggcttccggtccacgcgcctggccacaagcggcggctttttgcgcacgggcaatacgacggtgatgatcggcgtagaggaatctaagcttgaagaggtgctgggcatcatcgaatcggtctgcaaagcgcgcaagcaaacggtgtccgcggtggcgccgtcggtggataccaccgggttttacattccctatcccgtcgaggtctcggtgggcggggccacggtgtttatcctggatgtagagcagtttagaagaatgtaaaaagcacacagaaagggagccggcacggctcccttttttctttgcgccgtttttcggcagcgccaaagggccaacgccgggcagggcggacaaatcgatgcgctgcatgcccaagaatatggtaaaatgagtacggctataaggatacaagggaacatacggagaaccctgctgccatgcggggtgaaaggagcgaaacgatgaaccaatgcgtcattggcattgatattggcacatccggcaccaagaccatcgccgtagaccaggacggcaggattttggccagcgcgctggtaagctatccgctttacacaccaaagccgggctggaacgagcaggcgccggaggattggtggcaggcggcggcagaaacgctaaaaaaggtgacaagccgcctggagcataccgagatcgtgggcatcggcctgtccggccagatgcacggcatggtggcgctggatgaaaacggtgccgtggtgcgccgcgcgcttttgtggaacgaccagcgcaccgcagcgcagtgcgaggagatcacccgcgctgccggcgggctttcggggctgctttccatgacaaacaaccgcatgctcaccgggtttaccggcggcaagatcctctggatgcgggaaaatgagcccgaaaactttgccaaaacggtaaagatcttaaatcccaaggactatatcggctatcagctgaccggcgagatggcaacggaagtgtcggacgcttcgggcaccggcctgtttgatgtaaaaaacagaaaattccacgatgggctgctggcaaagctcggcctatccaaagacctgttcggccggtgcatcgaatccacagagatccgcggcacagtcaccgaagctgcggcagcgcagaccggcgtgccggcgggcgtgcctgtggtgggcggcggcggggacgcggtgatctctaccaccgccatgggcctaacagagcccggacgcctgggcctggtgctgggcaccagcggcgtagtggctaccgggctgccctcgtttatggaaaacccggagggcaaattgcaggtcttttgtaacaacgcgcccggcatgtggcatgcggccggcatcacgctggcggcggcgggcagcctggcctggttccaaaacaccttcgggcaggacaagcagcgccaggcgcaaagcaagggcaccacgccctttgccctgtgggatctggcggccgaggcggcggggcccggcgcgcacgggctgctgtttttgccgtatctgtccggcgagcggtgcccggtcaacgaccccgatgcccgcggcgcgtttgtcggcatcacggcgctcaataccgacggcgattttgcccgggccgtgttggagggcgtggcgtactcgctcaggcaggtggcagaattgatggagcagatgcccagctataaaaagccgacggagatcgtcatttccggcggcggcagcaagagcgccttgtggcggcgcatcatcgcggacgtgttccgcctgccggtcttacagacctacggcgcggccgagggcggcgcatttggcgcggcgctggtggcgggcgcgggctgcgggctgtgggaaagcctgccgcaggcgctggaaattctgcgcgtgcaggatgtgacagacccctccgccgatgcagagcgctatgaagcgccctaccagacctataccaagctataccaagccttgcagacaatacaagcaaaataaggaggcacaagacaatgatcaacattcccaaagtgaaattaggcgtggtcgcagtcagccgtgactgtttccctatcgacctgtccgagcgcaggcgcacgacgctgatgcaggcgctggcagcgcgcggggtagaggcggtggagatccaggccaccgtggaaaatgagctggacgccaaaaaggcgctggaggagctggcgcaaaaggaatgcaatgcgctggtgatgtatctgggcaacttcggcccggaaggcccggaaacgctggtggcccagcattttgacggcccggtgatgtttgtggcggcggccgaagaggatatcgcggtcttggcttccagccgcggcgacgcgtactgtgggcttttgaacgccagctataacctcgggatccgcggcgtaaaggcctttattccggaagagcccgtcggcatgccggaggaattggccgctgtgatccaggacgaatttttgccggtggcatgtgcgctcatcggggtgaaaaagctcaaaatctttggctttggcccgcgcccgacggattttgtggcgtgcaacgcgcccattgccccgctgtttgacctgggcgtggaaatccaggaaaacagcgagctggacctgtttatgagctttaacgcccatgaaaacgacccgcgtatcccggaagtggtcaaggatatggaagcagagctgggcgacggcaataaaatgccggaaattctgccgaaattggcgcagtatgaactcaccttgctggattgggtggaaaacaaccgcggcatgagtgaatacgtggccatcgcgggcaaatgctggccggcgttccaggaagcgttcggctttgtgccctgctatgtcaactcccgcttgacgggccggggcatcccggtatcctgcgaggtggatatttacggcgcgctttcggaattcatcgcccagtgcgtcaccggccagagcgtcacgctgctggatatcaacaacaccgtgcccaaagagatgtaccaaaagcacatccaacagcagaccggcttggccggcgatgaggtgttcatgggcttccactgcggcaacacctgcaaggagcgcctggtaaacgccgagatgaaatatcagctcatcatgaaccgcaacttggaaaactgtggcgaacccgtcattacccgcggcaccatcgagggagccatcgcgccgtccgacattacgctgttccgtttgcagggcgatgcccggtgcgtattgcgcggctatgtggcagagggcagcgtgttggatgtagacccatgctcgtttggcggcatcggcgtcatcgccatcccggaaatgcgccgcttctaccgccatgtgctggtggcgggcaggttcccgcaccacggcgtgctggcgtttgaaaaggcgggcaaaaacctctatactgtgctcagcctattgggcgccaaggcggatttcaaccgccccaaaaccatgctctatgagggagaaaatccgttttccctttaatggatagagaatgcaaccgtttgatgataatgagaggagacagaccatgagtcaaaaagtacgtgaagtgtttgaacagggacagggcatttttcgcatgatgcccaactttgtcccgcgttgtttttccaagccgggccaccgcctgcgcctgcacccggacgattattttgccctgggcatgaagcgcggcgcgatgaaggagcgctggttcagctctacgatcgtggccaacaacggcccgtatgccgctgaggacgaagggctgagctatatcgccttgaaccaggacggctcggaaaaggtggcgttgcgcgacgcgattcaggaactgggcgcggaaatcatcggccaagagctgatggatacctacggcggctggccgatgtacagcaaattctttgacaacaacgtgccgctgttccatcatctgcatttggacaacgaagcggccgcccgggtgggccgtctcggcaagccggaagcgtattatttcccgccgcagctgaataaccacctcggcgaattccccgccacctatttcggttttgacccggacgtgaaaaaagaggaagtgcgcgcctgcctggaatgctttgaggacagggataaccgcatcaccgagctgtcccgcgcgtaccgcatcgagctgggcaccggctggtataccccggcgggcgtggtgcatgcgcccggctctgtgctgacctacgaaccgcagtggaacagcgacgtcaacagcgtctatgaaaatgttacggcggacgaggtaaacagcattacctcgctcaacgaaaactgcccggacgataaaaaggatgatatcgattacatcatgagcctgatggattgggatgccaacgtggacccgcactaccgcaagaaatatttccgcccgccggttgaaaccgacgcgccggaaggggccattgaaaagtgggtcgtgtacgccaacccgtgggtaggcgccaaggagctgaccgtattgcccggccagaccgtgaccatcaaggacgcggccgcctacggctgtatcaccgtacagggccacggcacctttggcccgcacgactgcgaagccgccatcatgctgcgctacggccagatgtccgccgacgagttcttcgtttcggaaaaggccgccaaagagggcgttgtgatctccaaccacagcaaggtggagccgcttgttatcctgaagcactttgcgcccaacaacaaggagatcccgcagaaatcgcctttgtgggaggactaaaatgaaacttcaaaactacgaagtaaaaaatgagaacatcaggcaggcctttgaaaagctcaaagccgagcacccggaaaagctgcaaaggcggctcaacctttcctggagcaactggggctttggcctggagccgctgcaggattcctgtaagcgcctaaaggatgccggcatcgactacatcgagctgcacggcaaccactacggcccggaccttggctatgacgtaaacgagaccaaaaagatcctttcggattacggcctgaaatgcagcggcgtgtgcggcatgttttccgcggacaacgatttggccagcaaccgccccatgcagcgccaggctgccatcgactatatcaagcgcgaggtggcgtttaccgccgagatgggcggcagctatctattgactgtgcccggcgcggtaggccgcccgcaaaagtatgacgacagcgaaatctaccgcagcgtagaggcgctgcgcaaggtggcggacctgtacgaaaagtatgacgtccgctgcgccatcgaggccatccgcagcgcagaggtgagcatcgtgcatacctttgaggatgccaaggcgtacatcaaagcggtggaccgccccggcatcggccatatcaacggcgatctttaccatatgctggtggaggaaagccacatcggccaggccattttggacgccggcgaaatgctgaccaatctgcacctggcggataccaaccgctgtgccctgggcgatgggtttatggatatcgacaccgtcatccgcgcgctgtacttgatcggctacaacaacgaccggtgctttgttacgccagagccgctcggccccggcggggatccgtacccggcacagaacagcatccccgaccctgccaagctgaaaaagctggtggaggataccgcgcgctacttccgcgaacgcgaagaggaattgctggcctaacacaaagaaaaagcccctagaaaggggctttttttgatgcatcctgccggaatttctggtatgctgaaaaggaaaaacgcaaaaggtgggaatatggcatggtacgggcaacaagcggccctctgccgctgcgccggcacccggcgctggcggaaatggcggcggcatggttcagcgaaaaatggggcttgccgcagcaaagctatcgcgaaagcatccgggcttgccgggcagcgggcgtgccgcagtggtatgtggtgccagatggcaaaggcggcattgcggcgggcgccgggctgattgaaaacgattttcacaaccggccggatctttgccccaacgtctgtgcgctgtttgtggaacaggcctatcgccgccgcggcctggcgcgggcgctgctgcgctatatccgggaggatgctgcccgcatgggcataacgacgctgtatttggtcacggagcataccgatttttatgaaaagtgcggttggcagcactgcgccatgtgcaaagatgacgacggcctgccgctgcgcgtatacaaagcggagacgcgcgcatgaccgcgggtatgcaccgggaaaagagagggaagaggatggaacagcaaaacacagatcaaaacgccgtgcccggcgcggcgccaaagaaaaaaggagcctttttcaaaaaatattgggtcgccatcgcgacggtggcggcgcttgtcatcatcgccggcgtttggcttttgatgggcaatgcgcgggcctataaggacgcggaggatctgctggccaagggccggtatgaagaagcggtgcagcgctttgaagcgctgggcagctaccgggatgcgccggagcgcgtaaagcaggccagctatgacaacgccatggcctattatgaggacggggcctatgacgacgccatcgcctggtttgaaaaggcgggggattacagcgacgcggccgagcagaaaaaccgcagcatctatgcccgtggcgaccagctgtttgcccagggcgcatatgaggaggccgaggcgtattttggccggctgggcgatgcgctggaaacctacggcgtgctgcattttgccaccctggaggatgccagggacaccatcgtggaaaaggcgctgtccggcgaggaaaccattacggtggccatcggcgatttggaaacgtgcatggcgcaaacaaacggccgccgcggcctgatccacctggcgcaggccgagctcggcgaggtggaggcggatggcaaaacgctgaccatacggccggtagcctatcctggggtgcgcattgtggcggcctggaaggcggacagattggattcgctctcggaagaggaacgcagaacctatgaaaaggcccagggcgtggtgcagcaggccaaggcaaagacggaaaatgcgctggagctggaggcatttttgcataactggctgtgccaaaacgtaacatacgacaataccaacgccggcctatggacgggcggcggcacgcttcagccggaatggacggccacctccgcgcttttaaagggcaaggccaactgccagggctttagcgatgcattttacctattgggccagctggcggggtttgaggtgcgctttcaatacggcaccgtcggcggcgaggcgcactgctggaacgccataaagctggacgacgcccagtggtattacgtggatgtaacgtatgacaacgacattgaacgctttctgccggagggccaaacctacgcctacttaaattttggcgaagaccacgagctgcgcaccctatgacccaacagccgcagcgccgaggtagctgaaagcgacaacgccgcctatgacctttaccggcataacggcaccgcgtttgacaccctggacagcgctgcccgctactgcatcgaccagcgcgaaacgcacaaccaggcgcaggcagccgtgatggtggcctccggcgggctggatcataacgatctgtccaacgccttggcagagatcttgaacggccggggcattgccgccaactggacggtattcagcatctctacccccggcgccacctatctcaacgtgcgctgggacagctttggcggataagccggcagcgctatgccgccgaatatagacacagcataggggcggccatggccgccctgtctgttttgcagcctgaatgcggcaaaaaccccgcaaaacgttgaaaagaacggggttttggggtatgataaactgattcaagggaaaatcaaccaaagcaggagacagcggtggcggacgtaacagtgatcttcatcaatttcaataccaaagagatggtgctgcgcgccgtggagcgggccagggcctcagcgcagcgcgtgcagctggaggtcatcgtggtggacaattccacccgcccggaggaaaagctggggcaaagccttttataccgcctcatcgaaacggaaaaccacggctttgggcacgcctgcaatttgggcgcgcgccaggcgctgtcgcccttgctgctgtttgtcaattccgacggctttttggctgatggcgccatcgaggcgctggcggataccctggcggaggatgggcgcatcggcgctgtgggcccgcgcatttatctggaaaacggcacgctggatcatggctgcaagcgcggctttcccacgccgtggaacgcgttctgctatttttccggccttagccgccgcatgaaaaagcacccggaaaagtacgacggctacgcccttagatatttggacgaatggcagcgccatgaggtggacgccatctccggctcgtgcatgatgatcccaaagcatgtatttgaacaggttggcgggtttgacgagcgctatttcatgtacgcagaggatctggatctttgctatgccatccggcaggcaggttatgccattgtatatcagcccaaggcccagatgctgcacctaaagggccaaagcggccttcatacctacaaccgcagggtcacggatgcgttttacgattccatgaagctgttttaccaaaaaaattaccaggaaacgtacagcgcgtttacgcgccgcctggtgttttgggggatagatttgaaaaaatggctggcgcacagagcgcataaggggcggtgagcatggcgcagacacagatccttttggcatgttataatggacgcagctacctggatgcgcagatccgttcggttgtatcgcagagcgaggcggattggcagcttctcatgcgcgacgacggctcgtttgacggcaccaacgccatcctgcgcgcctgggcgcaaagggatgcgcgcatccgccttttggcagaccataaagccaccggcggcgcgatgacgaattttcgcctgctggcggccgcggccacagcgccgtatgtcatgttttgcgatcaggacgatgtttggcacccggacaagctgcaaaaaacgcagcggaaaatgcgcgccatggagcggcagttcggcacggatacgccgattttggtgcacagcgatctgcgcgtggtggatcaagacgggcgggagatcgccccttcgatggcagcctaccaaaagctggatcttatgcgcacctcgttttgccagcttttgagccaaaacgtcgttacgggctgcacggtgatggtcaaccgggcgcttatggatcttgcgggtccttggccggatcaggccgtcatgcacgattggtatctggcgcttgtggccgcctgctttggaaagatcggcctggtggaggaagccacgatagactaccgccagcatgggcataaccaggtgggcagcaaaaacgccgcatcggcgcagtatgtggcaaagcgggccacggagaccaaaaagagccggcaggtgctgctggatacctatgcccaggccggggcgtttgttgcgcagtatggcgaaaagatgccgccggcgtattatgaggcggcctgcgcgtttgccgctatgccgcaaaagcataagctggcgcggctgtatacgctggcaaaataccgcctgtggaagggcggcctggtgcgcaaaatcggccagtgcttatatagttgaaaggatacgggcacaaagcccggatatgatagaaaacagatctcgaaagcgaaaaaaggagtgttgttttgatgaaaggcattatcttggcggggggcgccggtacgcggctgtatccgtctaccattgcagtgtccaagcagatgctcaccgtatacgacaagccgatgatctactacccgatgtccaccctgatgctggcgggcatccgcgagatactgatcatctccaccccgcgcgatatcgtgggcttcgagcagctctttggcgacggctcgcagctgggcctgaaaatcgagtacgccgtgcaggaaaagccgcgggggctggcggatgcgttcatcgttggcgaagcattcatcggcgatgacaacgtatgcctggtcttgggcgataatatcttctacggctacggctttaccgagcggctaaagcgcgcggccgcgcgcgaaaagggcgccacgatctttggctaccatgtggccaaccccaaggccttcggcgtggtggattttgataaggacggcaacgtattgtccatcgaggaaaagccggccgagcccaagagcaattacgccgtgcccggactgtatttctatgacaaccgcgtggtggacatcgccaaacacgtaaagccctctgccaggggggaaattgaaatcaccgccgtcaacaacgcctatctggagctgggcgaattgaaggtggagctgtttggcaggggcatggcctggctggataccggcacgcaccgttccatgctggacgccgccaatttcgtagaggccgtgcagacgcgccagggcctatgcatcgcctgcctggaggaaatcgcctacaacagcgggtttatcagccgcgagcagctgctttcccaggcggaaaagttgaaaacgacggactatggccaatacctgttccaggtagcgggcaaggaaaaataaggagagtgcggcatgaagatcctcatcaccggcgcccatgggcagctgggcaatgaactgaaaagcatgctggaaagcgggcgcgcggaaatcggccccatcgacccggcctaccagcatgcagaggtgttttataaggacatggatacggtggatttttccgacctggccggggcccgggcgtgcgtggaggcgataaagccggatcttgtcatcaactgcgcggccatgaccaacgtaaacgcctgcgaaacagagctggacgccgccctaaaggccaacgccattttgccgatgaacctggcagcactgtgccaggaattgggcgcaaaattcgtgcatacgtcgacggactatgtctttgccggcgatgaagcttccccgcgctgggagtgggaccataccgcacccgtgaccgcctacggcaaaagcaaagagctgggcgagcaatacgtccgccaagcctgcgccaagagctttatcgtgcgcacagcctggctgtatggctatgtgggcaacaattttgtgaaaaccatgtgccgcctggccagggaaaacggcaaggtcacggtggtcaacgaccaattcggcaaccctaccagcgccaacgacctggcataccacatcttaaagctggcgcgcacggagtattacggcacctatcactgcaccaacgagggcacctgcagctggtatgagtttgccaaacgcatcatcgagctggccgggatagaggcagaggtgcgcccctgcaccaccgcggaataccccacgcccgccaagcgcccggcctattcgtcgctggataacgccatgctgcgcaataccgtgggcaaccagatgcgcccgtgggaggatgcgcttgtcatgtatatggaaaacgccaagcagcgcggcatcatcgagtaaaggagactaccaatgaaaacctatctggtcacaggaggagcagggtttatcggctccaactttatcctgtatatgatgaaaaagcacaaggacattcgcatcatcaatgtggacaagctgacctatgccggcaacctggaaaacctgaaaagcgtagaccaggacccgcgctaccgctttgtgcaggcagacatctgcgacgccaaagcgatccaagcggtgtttgaaagcgagccggtggattacttggtcaactttgccgccgaaagccatgtggaccgcagcatcaccgacccggaggcgtttgtcaaggccaatgtcaacggcacggtcaatttgttgaacatcgccaaaaaatattgggccgagggcgacggctttaagcccggtgtaaaatatctccaggtttctaccgacgaggtatacggctctttgggcgaaacggggtactttaccgagaccacgccgcttgatccgcacagcccgtacagcgcggccaaggcgtctgcggactttttcgtgcaggcgttccacgatacctttggcctgccggtgaatatcacccgctgttccaacaactacgggccgtaccagttcccggaaaagctcattccgctgatgatcaacaacgccctgcagcataaggatctgcccgtgtatggcgacggcatgaacgtgcgcgactggctgtatgtagaggaccattgcaaggccatcgacatggtcatctcctccggcaagatcggcgaggtgtacaacgtcggcgggcacaacgagcgccccaacatcttcatcgttaaaaccatcttgcaatatatccacgacaatgtggacaaagaggtgggcgaacagctcatccaatatgtagaggatagaaagggccacgaccgccgctatggcatcgacccggagaagatcaaaaccgacttgggctggtatcccgaaacgccgtttgaaaagggcatcgtgctcaccatcgattggtatttgaaccataaagagtggatggagcgcgtcaccagcggcgcgtatcaggaatactacgcaaagatgtatcaagggaagtaagcgatatgggaaaattcaaattcatcgaaaccggcatcgaagggctgaccatcgtagagcctaccgtttttggcgacgaccgcggctattttatggaaacgtacagcgaacgcgaatttgccgacgccggcctgcccacctgctttgtgcaggataaccagagcaaaagccgccagggcgtgctgcgcggcctgcatttccaaattaagcatccgcaggggaaattggtgcgcgcgctgtccggcgctgtgctggatgtggcggtggatatccgaaagaacagccccacgtttggccaatggcgcagctgtttgctgacagaagaaaacaagcggcagttttatgtgccggaaggctttgcccacggcttttccgtattaagccaagaggcggtgtttgcctataaatgcacagcgctgtacgaccccaccgacgaaggcggcatcatgtacaacgacccgcagctaaacatcgactggcagatcccagagggggtagaggtgctcctttccgaaaaggacaaaaatcatccagggctggatgcctggaggtaatcgcttgagagacaccataaaagtattcaaacggtacaggtaccttttgggcaaccttatcagccgggacctaaaggtaaaataccggcgcagcgtgctgggcgtggtgtggagcgtattgaacccgctgttgaccatggtggtcatcgccacggtgtttgcgcacctgttccgtttccagatcgaaaactaccacctgtattttttggtgggcaacgtattgtggacctttttcagcgaagccaccaacggggccatgggctccgtattggaaaattcacagctcttgaaaaaggtgtatatccccaaatacatgtttccgctggaaaaatgcctgtttgcctgcgtaaacctattgttttccatggtggcggtgctcatcgttatggcgttttccggcgtatggccgacggttacatttttcctgtttccgtttgtggtgctgctctgcttggtgtttgccatcggtatggggctgctgctcagttcgctgacggtgtttttccgcgatattatgcacctctacggcgtggtgctgacggcctggatgtatgccacccccatcatctatccgctggacctggccaacctgccgggcatcatcgtggcagtcatgcagtttaacccgatgtattattttgtcaccatgctgcgcgatgtgctgctgtacaataccgtgcctgccctttcgatgtggctgtgctctgcggcgtttgcgttcgggtttttgctgctggggctgtggtgctttaagaaaaagcaggatcgctttgtgctgtatgtgtaaaaggaggaaagagcgatggaacaaccggtcgtcgtggatgtgcagcatgtgacgatgaaattcaatctttccaccgaaaaagtggataaccttaaagaatactttatccgtaccatcaagcgcaatatcatgtacaatgaatttaccgcgctggatgatgtcagctttcaggtgcgaaagggcgaggtattcggcctggtaggcctaaacggctccggcaagagcacaatgctaaagctggtcagcggcatctacaagccgacgagcggcaccatccgtgtggacggcgtgctggccccgctgatagagctgggcgctggctttgatatgaacctgacagcccgggaaaacgtgtatttgaacggctctgtgatgggctattccaaaaaatttttacaggaaaaattcgatgagatcatcgattttgccgagctgcgcgattttgtcgacgtgcctctgaaaaactattcctctggcatggtggcccgcctgggctttgccatcgccacggtgatagagccggatatcctcatctgtgatgagatcctggccgtcggcgatttccagtttcagcaaaagtgcgaggaacgcatcaaccagatgcgtgcccatggggtgacgattttgtttgtttcgcactccatcgagcaggtgcagcgcatctgccaccgcgccctgtggctggatcacggccacctgaaaatgatagggccggtggatgaggtatgcccggcgtatatcagccagcatgcaccggcataaacaacagacggcgggcccaaagcccgctgtttttactgtaaaaggagcaactgccatgcaggaaaataccccgacgctgcatacagatcgcctgattctccgcaggtttgccttgcacgatgacaaggccctgttcgccctgctgcgcgatgaggaggtc

SEQ ID NO: 3719 - DNA, 10443 bp, Unknown
  16S sequences of unknown bacteria
atcggcgggattttctttgacggcggggcgcgtcgggctgagaaggtgactctgaattacgcgggcggcgagccggttgataatgtcagtggaagacggttttatgggttccggagtcttgaggaggatctgacgttctggcatgacctcggcgggcggataagcatcggcgaggacgagatgtgctcgggcgaggacgacgaggggcgcgggtatgtgtatctgtgctctgagcgcgatccgtccgagaggttttcggagatagagtttctgccgcggaggaatgtcgttcaggtctgcggggacgacgttcatatcgataacctgacgatacgttacggcggcgcgcacggcgtcgggagcggaaccgctaaggggctcagtgtcacaaactgcgtcattgagtatataggcggttcggtgcagtattataccgagggcagaccggtcaggttcggtaacggcgtcgagatatggggcgggtgcgaggattacaccgtcgaccactgcattatccgcgagatatacgacgcgggggtcacgcatcagtacaagggcgggaccgacgagtgcttcatgcgccggataaggtatacggataacgtgataacgaactgtacctacgccgtcgagtatttcctcggcgctccggagaacgacgcggctacaaggtatatggaggatgtccttataaaggggaatttcctcggatattccggttacggtttcggaaacggacggccggataaatcaactccggcgctcatcaagagctgggacagcaggaacacggcgctgtccgacagcttcgtcattgaggacaatacgctctgcctctcggcatataagctgatacatatctgcgccgcggaggagggctggcttccggtactgagcgggaatacgttcattcagaatgtcggcggcgagctcggtatgtacggaaagtccccggcgccgtcgagaattatgtccgcgggcacgaccgtgcgtgaggagttcgcggggaacgagttctatattattgatgacgattgatcatacggctgccgcttccgagcggcggctctttttttatctgccgggaattccgccgtttagcgctggtccgagaagacggttcagcgcggcgcagaaatcctcttcggtgacgtcgattccgctttcctgccaccagcgcatcgtgtagatgagcccgccggaatagaacgcggcggtcatctcacagtcggcgcgcttaggcttttcgccgcggcggcggtattcgtcgaggatcagctcggtcaggtcgcgctttataagatcgtacaggaggtcgaggagggaggagagcatattgctttccatgacgttcacgacgaattttttgtgatctgaaataaagttgtagagctccctgcccatgtttatgaagtagctgtcggcgtggtacgcggcgatgtccggcgcgagggagctctcgaagctctcccgcatttcctttatatagaatgtaaagtactcgtatttgtcggcgaagtgcttgtagaaggtcgtgcggcggatcatagcccgctcgcagagctccccgactgttatgtcctcaaagcgcttctcttccatcagtccggtgaaagcctcattcagtgaacggtaggtgcgcagtatcctgaggtctgttttttgttccatattttttctccggttcggaaacacataatggtcaagtgtctcttatctcacagaaatcgtgaaactgactcttgcaaaattcctggatatagtttatcatatataacgtcatttgtcaacaaagaatttattaagaaaggtctgagatcttggaaaggcaatacacctacagactcgagatgagcgttccgcacggcgtgcgccatggtgagctcaccctcgacgtcggggacaagggcgtcggcgggactctcatgatgttcgcccacacgacggatatcctgtccggcaggttcgagcacggacttgtcgagttcagcgggctgatgcgcacgctcgggtactcgatgagctacacggcgaagggaaagattgacaaaaaaagcgccgatctcgatttcgtcaccgagaagggcacataccacgcggtcggaaagccggggctctgcctcatcggaaagataagaaacggagtgaagggaggaatgaagaatggctgaggaaaacaagaaggaaaacggcggtatgatgaaggtagccggtttcatcgtcgacaagcggaacctgatattcctcatcttcgttattctcacggtgttctcggcggtctcgagaaactgggtcgaggtcgagaatgacctcacgttctacctgccggacgactccgagacaaagcagggtctgacgctgatggacgacgagttcgtcacgttcggcaccgcgaaggtcatgctcgcgaacataacatacgacgacgcgaagacgctttcggaaaaggtgtcggagataaagggcgtgcagagcctgtccttcgacgacacggcacagcactacgcgaactcgtcggcgctgtttgacataaccttcgattacccggaggacgacgagcagtgcgtaaagaagctcgacgaggtgaaggaagcgctttccggtcaggatatcttcatttcctcgacaatcgggcaggacgactcggtgaccatcgcgaacgagatgaaggtcatcatcgtcatagtcgcgattgtcgtcgtgtcggtgctgatactgacctccgagaccttcgccgaggtgccggtgctgataatcactttcctttcggcggcgataatcaatatgggcacgaactatatgtgcggcaagatctcgttcatctcgaactcggtcacgatcgtgcttcagctcgcgctgtcggtcgactacgccataatctactgcaaccgcttcaaggtcgagcacagaaccctgtcgatacgcgacgcggcggtcgtcgcgctcagcaaggctatcccggaaatctgcgcgagcagcctgaccaccatcggcggacttgtcgcgatgatgttcatgaagttcaagatcggcggcgacatgggtctctgcctcatcaagtcgatctttttctcgctgttctcggttttccttcttatgccgggactgctgattctcttcggaaacgctatggacaaaacgaagcacaagagcttcgtgccgaagatcaatttcgtcggtaaatgggactacttctcgagattcgtggttccaccggtgttcctcgttctcgtcatcgtggcttacggtttttcgagcgactgcccttatgcctacggaatgagcagcatcgagacacctctccacaacgaaacgcagatcgcgcagcagatgatagacgacaccttcgagagcactaacatggtggctctcgtcgtcccgggtcatgactcggaaaaggaaggaaagctgctcgcggagcttgagacctatgacgaggtcgactccactctgggtcttgcgggcgtcgaggcgatgggcggttatatgctgactgacaggctgacgccgagacagttctcggagcttctcgatatcgactatgaggtcgcggagctgctctacggcgcttacgcggtcgacggcgcggcttacggtaagatcgtcggcggactttcgaactacagcgtcgcgctgattgatatgttcatgttcctctacgacgaggttcaggagggctatgtcacgctcgacgacgagctgatggacacccttgacaacgcctatatacagatgagcgccgcgaagaagcagctcaggggcgagaactacgaccgtatgctcgtctacctgaccctgccggagagcggcgacaagacctatgagttcctcgacaagatacatgagatcgcggacaaatattatccggatgacacagacgatatctatgtcgtcggcaactcgacgaacgagtacgacttcaagaagtccttcgcggaggacaacgtggttgtcagcgtcctctcgatactgatagttctcgtcgttctgctcggaaccttcaagtcggtaggtatgccgatactccttatcatcgtcattcagggaagtatatggataaacttcgcggtgccgaccatcatggactcgcctctgttcttcctgtcctacctgattgtcagctcgattcagatgggcgctaacatcgactacgctatcgtcatctcgagccggttcctcgaggtcaaggacacgatgccgaagcgcgacgccataatcgacacgctgaacttcgcgttcccgacgataatcacgtccggctcgatgatggcggcggcgggaatactcatcggtcagatgacctcgaacgcggctatcgtcggcatcggtcagagcctcgggcgcggaaccatcatttcgatattcatcgtcatgttcatcctgccgcagctgctgctcatcggcgagaggataatcgacaagacgtcattctcggtgaagaacccgataccgagacacgagtcgaccggaagaaaggtcgtcgtcagcggcatcgtgcgcggcgagattcacggcacgatcaacggcgtggtgaacgccgtcgtcgacggagacgttgatctcagtgtgatctccggcaacgtccgcgacgccgacagcggggataccgtgtcatcggcaccgcagcagataaccggaagcgtcgtggaatcaacagccgacgagacatcggcggacgatacggatgacggaaacaacgataacaaagataacaataatgataacggcggagaaggaggagaagaataatgaaaaaagcatatcttgacaggacactgagtctgcttctcgcctgccttatcgcgtttccggcggggctcacggttttagctgacgacaccggaacggcggatacgtcgtcggacgtcgtcatgtcgtcggacagctcacatttcgacaccgagggcaggttcatcgtcgacagcgcggaggcgctcatggcgctctccgaatactgctcgctcgacagccgatctgagggacttcaggtcgtcgtcacgaaggatatctcgctcgtcggggcggacttcgagccgataccgtatttcgccggcggcttcgacggcggggagcacaccataagcgggcttgtcatagacgacggatactccccggcggggctgttcagccgtgtcgccgagggagcgtcggtcaaggacataaacgtccgcggagtcgtgacccccagcgggcagcgcgagaatgtcggcggagtcgtcggacagaacgacggcctcgtcctgcgctgcaccttcaccggaaacgtccgcgcgaagaccgcggttggcggcgtcgtcggcaagaacgggacgaacggcgaggtttacggctgctcctccgacggaaaagtcaccggagagagcatgaccggcggcgtcatcggaaacaacgccggaagcgcggtcgactgcgtgaaccgcgcggaggtcaacaccgacagcgtcgactggaagctgaagctcgacgacatcgagatcggctcgatacgcgacatctcaagctcgaagctgctcgggacgatgaatatctcgaccgacaccggcggcatcgcgggctattcggacggaatgatcctgtcctgccgcaacgaggggaacataggttacagccacatcggatacaatgtcggaggaatcgccggaaggctcaccggatacgccgcgaactgcgtgaacgccggaaaggtcgacggacgcaaggacaccggcggcatcgtcggacagttcgagcctaacgtcacgctgaacctctctgaggacaacatttctaaactggggacgcagctcgacgagctctcgaacctcgtcgacaaggcgataagtgacgcgtcggacggctccgacaggatactcaacgagctgtcaagtgtgaacgggaccgtctcgagcacgaagaattcagtgcagaagctgacaaatgacgccggaaagctcgcggacgacgctgtgtccgaggtcaaccgcctctccggcgtcgcgaccgacgcggcgggcaggctcgcgaacatatcggacagcttcggcggcgtctgtgacgctgtgaccggcgctctcgacagcctcgagggcgcggtggacagcatggaggaggctacggctctcggctcggacgctctgagaaccctcgaggacgcgagcgccgccgcgaccgacgccgttgacagaatatcgtccggcgcgaagacgatggtcagcggcgtcgaggacctcaggaactcggtctcgattgacgagaaggcgatgagaaacgcgctcgacaagatatcctccggcgcgaaggagctgtccacggcgtccgaagtgctcgctgattctgttcagcagatgatacgcgtcttcaggaacgcgggctggacagacgacgccgtctcggacatgaaccgtctcggcgaggagataagcgcgctcggacgcgagttttccgcgataaacaaggctctgagagacatttccgacgcgatcatcgccgacccggacgggtttcagaaggcgatagacgacatcacctcggcgctcgacggcatttcctccgcgatgagcggattctcggaggcggcggacaccgcgaaggccggtatgaagaagattcacgacggtctctcgatgctgaccccgtcgatcggcgtcgacaaggacgcggcgaacaaggctgtgacgaccatctccgacggcttcgcacagttctcgacggctatgaaggcgatgggcaaggcggcgggcgacgttctcgcggcgctgccggacgcgtggacgccggacgggcacgaggctcttaagagcgcgctttccgacatgaagtcctccgcgtcggacgcgggcgactctttgtcgatgatagcggacggcttcggaaagctcgccggctcgctgaccttcacaccggcggatataaagggtggggtaaagctgaccctcgagggcttcgatgatctcagaaaatcgacaggcctcctgcgcgcctcgaacgacaagctgtcggcggcgctgaagctgctcggcgacggaatcgacgagctgtaccgctcggtcgcgataaaggacaccgcgaagatacgcgcggcgctccagcgtatcagcgacgcgcttaacaatatcgcgtcgatcataaccgagatcgggcacaccgtcagcgatatgtcaaagaccctcgacagaatgttcatctggggcgacagagtggcggcggctgtctcggacgtcgcgtcggcggtctccgggctgtcctccggaatatcgaggatagcgaagggcgtcgacgagctcagagagagcgtgtcggtcgacaccgggctctcgcggaagggtctcgacgagctgatagccgggatgaagaagatactcaccgcggacagctcgataaagaccgccgtaaacgaaataggcgacgcctgcggcaccctcgcgtcggcgggcgacaagctcaccgaggcttcgggtaagctctcggattcggtgaacgggttcagaaaggcatccgacctcatgagcgggtgcttcgacgagatgaacgacctgttcgcgtatctcgcgggcgtcgagccgatacaggtgaagtcgcccggaacggcgctcaaggcgtcgacaaacaacgtctatgcgaacctgacctctctcacaaatcagctccagagccttgtcagcgaggcgaagagcgtttccggaacgcttgcagaggacctgcggaatataaacgcgaagttcagcgagctctcagacacggtcgcggacatattcaacagcacgcgcgacgcgtcgctcgacaacatctacagcgacgtgtccgacgaggagatcgattccacgaccgacggcaagctcgagaaaaacacgaacgagggcgagatacgcggcgatctcaacgtcggcggaatcgtcggttctatggcgatagagttcgatctcgacccggaggatgacctgacgagcggcggctcggtgctgaaccgcgtctatgagacgagggcggtcgtgcgcgagtgcgtgaaccgcggcgaggtcatctctaagaaggacaacgcgggcggcgtctgcggacgcatggatctcggcgtcatcatatcgtgtgaaaactacggcgatatctcgagcgagagcggagactacgtcggcggcatcgccgggatgtcaagctcgaagatacgcgattccttcacgaagtgcacgctttccggaagctcatatgtcggcggcgtcgtcggctctggaaacacgaacgacctcaccggctccgacctcgtcgtgaccggctgccgcacgatcgtcgcgatcggcggtgaaacgcccttctcgggcgctgtggcaggctgtgacgcgggaacgttcaccgacaacagatatgtgtcggataccctccgcgggctcgacaggctcagcgaggacggcaaggctgagggtatagcttacgccgatctcctgaaggagaagaacatccccgaggatttccgttccttcacgctgaaattcacggcggacggcgagacgctcaggactgtcgcttttaactacggcgattccttcggcgacgatatcttcccggagatacccgcaaaggacggctgcctcgcgtactggagcgtcaccgatctttcagacctcgtcttcgacacgaacgtcgaggcggtatatgtcggctacacgacgtcggttccgagcaccgagaagcgctcggagcgtccgattttcttcgtcgagggcgacttcgactcgtccgacacgcttgacgcgcagcctatggcgtccgatcggtcggggttcgacaggcttgtggacaactatatcgaagtcatcggagagtttttcggttccttcacacgcggcgagcttcctcccgcgtacttcgcgcgcgagctgcttgagcagtggagcgtcaccctgccggacgacggcgcggacacgcacaccgttcgctacctcattccggaggggaaggaaaatctccgtctctacatccgtgagagcggggcgcggagctgggagcgtctcgacacgacaaccgagggcagctacatgaagttctcgaccggagagagctcgttcgagctcgccgtcgcgacgactatcgccgcgtggtggatctgggtcgtgatcggcgcgctggcgctcgtcgttctaatcctgataatctcgatcgcgaagcgctcgaagaagcgccgccgcgacagggcggaggagatgcgccggataggaatgtccggcggaggattcaccgacggaaccgcgggatccggaaccggcggcggaacggctgacaaggaaacactgatttaaggttgttttcgcgggaaaaagcccataaatccaagacttttcccgcgaaaacccgatttgttcagtgtttcccaagaactgacacaagcaaaagaccgatgagacatggttcccatcggtctttgtttcagtcgtgaactatcgaatgcttgcagacaaggcaattcttcgcgtcccgcgggttgtcgcacccgcagaacgggcagatcagcgtcggctttccgacgacgagcggataggggagcccgcgatagtggcggacgatgtcgccctcgtttatcgggagggtgagacgaacgttgtcgagctttattttcatcgagcgcagtctgccgcttttctcctcgaccgtcagctcgacgaaatgcttccgcaccattaccatgctgtagttgaacttcgtgtccgtctcgaccgcggacgtgtaatcgaccttcagcaccttcccctcgaacggtgtgtcgagcagatacctgtgcccgccgagggcgaagaacggccagaccgacaggattatccagataagcacggcgttcacctcgccgagacgtccgacaaagtaccggtacatgacggtgatttcaagcgccgacacaccggcggcgacggcgagggttataaggcaggttttcgcgaatttacggttcagatatttgctgatgtcggagttttctttcggaagccttggtctcatgggatcattcctttcagatatcatataatacgttcagatgactgtaacatcattataccatcaaacgaacgtgttgtcaagatgcgagaccgaaatatctcatcttcggatatatgcacaaattgaggagaaaaaactgtatgatatgacagaggaagcggaacaacggcaaaaattgtatattatgacagttgaaaagcagagcgaaacagtgtataatatgattgtatccatgcgattaccccgaaaggaagacatataaatgagtgtagtgataggaatagacgtcggcgggagcacaacgaagatcgtcggctttgagaacacgatcggcggcaagcggctcatcgacccgatcttcgtccgcgcgaccgacccgataacggcgctctacggcgcgttcggaaaattcaccgaccagaacggaatcgagctctccgacatagaaataataaaagtgaccggcgtcggctcggcgaagat

SEQ ID NO: 3720 - DNA, 32759 bp, Unknown
  16S sequences of unknown bacteria
cgcattgctaaggcgtttcgtttccctttttccctgcttatcttatgcataggggatgcttccgagaggaagcagcccctatgccggcggtctgcccctggctttcgccaggggcagaatgttttttggaaaaattctgttaccggcagcaattgcaaccagtattgcagcccgtgttgcaaccggtattgcagctcgtgttgcagcccgtgttgcaggccctgttgcgcaggcatacgtcgtcgttgttgcacagcgaggcgggcgggaagagaggcagactgaaaaattcatcgcacacattttccgcgaattcctcgcagggcggaatggggcagaagccgtaggaggggatgaggatctccacctgggccaggaccttgaggatgaccgtcacgcaaaccgtcagcttgaacttgttgttgccctcgtaggtgccggcaacgcagatggcgctgaccatgctctccagggagtaaggcacgatggactcgtcggggatggacagcaggacgtctttatccacccttccacagcggcaacgcccctctacaccgccacgcaaaacttacttgcttccagcctccctgccgataccatcgaacagcgcctcaaatacgcccgccttcaggccggtttgagcggcgaggctctcgcacgcctgatgggtatcaataaggattcctactggaagatggaggcccactgtcattctatgagctgccagcacttcctgtccttctgccgggcaacgaactgcgacccgtccttcgtgctatatggtcctctctcccctcccatggtgtcgctcatcgggggtaccattggtgccagacttgctttctttcgcgcttctaccggtctgacccttcgtgccttcaacgtgaaatgcgggttcgccgcccgcaattcatcggtgtcagcatgggaaaaaggccgctaccttccccagctgtccagccttctggccattgcctccgccttcggcatcaatgccgtttccttcttcccataatctcagggtacatgcgcagagaatccatcgcaaaattcgctgcgcatacatcctaaaaaaccgggcgttgcacaccgtccgccctgataatatttggtgattatgtccgttctttcattcgctcctgcgccgatcggaagatggcttcattcagctcaaagcctattgcatcatatccttccagttcagccgccagaagggttgtcccgctgcccatgaatgggtccaggatgcagcctccgggcacacagatccgcacgatctggcgcatcagctccagcggtttctgcgtctgatgacgtctctctttgcccgatacattcgggcaggtgaatacccccggcaggcagggcaccggcctgtcaacgggcaacgctccgtttgagccccacaggatattttccgtctgctgtctgaatcggcctttttggggtctgcagtttcccttgtcccattgggccatgcctcgccacgtccatccggcccactgcatcacatccgatgccacgggcgtttgccgccagtccacgaacatggcgatcacgccgcccggcctggtacgcatgcgcgcctccagcagcacctgcagcatcaggtttgcccagctccgcttatccattgtgtccccttcaaagtctggataggggcagttccctcgcttgttgcttgtgtacttcgtcgacgttttggctgatataccgctttgagtggcagccccggaagcatagggcggatcggttataacagagtcaaacaaggcatcccgcggcatttctcttaggattgtcagggcatggccctgcatcatttgaatcatgataggctcctttcattacgtgccccgcccagcgttttgccgggcagggcgtttcctgttattacgtagcagcttcgggcggtttctccggctcaccaatcccatacacatccttttcccccgcggcgatcatggccatgtccagctgcttccacgcggccttgagcgcgtcgattacctgctggctgtcggtgtaaaagccccggtcggccatcttttgcagcgccagtttccacttgtcctctccgcagtaacgccccagcagcgcctccacggcttccaccacaatttttgccgcgtcggtcagatctcgctgctcaagccacggcttcacatactttacccacacgcgccccagcagcgcggaaagtgccgtgccgattacgccgatgacggccaccatcagcgccgtccagtcgatgggcgcggcgacctccggcatggcaacagtttcttcggccatagcgagcgccggaagcagcgccagcgccatcagcaggcatgcccaacaaagcattttcttcatggtatctcctcgctttcctttttctttggcttgtccggcaaatcaagaatttcctgctcaaaatgctcggacaggtgatttcggtttttcgcgcggtagctcttgtgcatcttgcacagcatcagcttcttggagctggtgcaccacccgcgcgttgtataaaagtcatacgcctgcgacagacgctcgtattgaagatcgccgatgtcgtcggacagagtgcacagcttcgcgttcagctccgcaagcgtctccttcagctctttgcgaaaggccttctgctccgcggcggccttttccttggcggcctttctggccttcagccatcgtttaaccggtgcaaaaaaaataagccccagcagagcaaggatagcggatatggacgcggccacctgtccggcattgtccaaaaactgcatagtcgtcacctccttcccatggatcagccattggtcacggcgtccagcaccgcatccagcgtcctctggataccctccagccggtccagcacttccgcctcaaacgtctcgcccgatggctcgtccggtccgctttccggcacatcctccgtgtcctcaaacgccagaaacttcgtcatcatatagccaacctgcccggatgaaagccgtacctgcgcccacccctgcgcgtcctgcatcacctctaccggcgtgcccacaggcacctttgccagatagggcttgtctgtcgatggcgtagaccgcagcttcaccgggttgccgtccccgctcaccaccaccgcgcgccgtgtctccatggatgtatcgcctccctccgggctatctgtgtccgcggcatacgtcaccaacgcgcaaggcccggcataccgccagtcgccctgacgcgtatccaccgtcacgccgtccacgccgccgcctttggtgcaatgggtgatggccagcggttccacgccggtgactacgcccacatggtaatagtccatcacgtcgccggtgtattcagctccaccggcccggtatttgtcaggcagatcataccacgcatccatcggccccaccgccttgaacaccagccaacccggttcaaggtccgctgcatcgacctgccggaaaagtccgtcaacagcaaaccgcgccgcatagttactgccgtgcgtgcctgtccatctgccaccggcgcgacggacggctccgatcaccagcccgatgcagtcgcatgtcccgtctgatccgtctccgccctcgcgataggtcggggcttccgatttgatctcctgcacgcctctcaaaaaatcatcaactgcaaccatcaatcgtccctcccagatctgcaaattgcgagcatggacaccaccgcaaatgcaccaaacatggccgcaggaatcagccaccacgcgctaatcattccaccacctcccacgcctgcgagtattcttccggcgaatatgccgtatcggacaggcacctgtacgcctctccatctgtccaaatcatgtactctcccgacttgtacatatcatgcgcgccagtaggctgtacccatggcagcgcatgcgccgcgtccgtcgcgtggtagttggcccacaggcttgccgcgacgccaggctcccagccggattccccgtggtgcgtatgcgcctgtacgcatttccatggctggccgttgtacgtccgcacgtctcccgcagcataagccacgggcgagtccattgtccccgctttccatggtgcgagcagcggccccagatcaataacgtcattggctgcagcttcgggtgcttgtttcctcgcctgtcgggcgatcagtctgccaatggctcgcatcgtattcgtatcaagcatccgcgatcccctccatcaaagcattgagcaattcctcagcgctgggttgacttacaggcggcacatagtccgcctccatttcctccggaatgcgctccctccatttgggcgagccgttcggaacgtaggcataacgaggaatgccgttatcgtcatacggcggcttggggaaataattgttttgagcatgatgatagcggtcgcctacaccctcgtcaatttgtgtccagtcgtttgtttcggtcagaaaggcgtcgctattaacatctattattcgttcagcatcgtcccgacgaatgtacactttatatacgtcattcatcttcattccctccccgtaaatcataagtcggcggtcagcccggtgaatccttgcataagataggtatttccgtttgataccgttccgttgacgttgagtctgaccttgtacccatcccccatccacgtcacactagccaccgtggcaaccacccatgcttctgagtcatcgaacactcttatagctccagcctctactgttggcagtatcctcatctcctcagaagacactattgtgtttacaacttctccatacggcttaaagacaattcttccgtagctagttagctctctataataccttagacatttcatatattccatgacatagtctggggttgtccacggcggcaatgtcttcgccgtatacgcccctttaagtagcacgggcattgaaatgattgattgcgctacggtattgaccacaaattggcacaaattcccttctatgttctgaatatacagcgtgccaagcgaatttgatactgctacttgtgtgtcgcttgatacactatcataggtgacagtacctaccaacagttgatttccaacgtatacagccagcgtatagtcttcaccgttaatcagcggttccatacgctggagaaaaaatccgtttggggatacagaaattccaccggattgcaagctgatcgtgccgctaatcacccacctatcaatcgaatagatgaagctgccgctgtacgtggtcaatccgcgttggttgatggggtttgaaaaatccgggttgtccaacaggttggtcctgccctgattgcacccctgccacgcaagcgaaccatcagacgcaaggccaagcgtcacaaccgtctcgttgttggttgcctgcacggccctgtacccctgattgtagatgcccaccaagtcggagctgctcagggcttccagtgcggatgccgtgcaggggtacacctgcccgtcaacaccaatattcttgcgggcctgcactttctgcgcgtcctcaagcgtctgcgttacataccgcacagcgctcagggcgacatttcctccagaatcggaccccacgccgtcaacggtagaaacgtttccagtgcccggcacgccttgagggatcttcagtttaacaacgggcgcttcgggcggtccactctgcgtgatgaccacgtccgtgttgggttcgccggtttcgcccgtgaaagttagcttgggtacaggccccggcacgccctgccgaagcccgaaagcaatgcgcttgtgtccatcaacgtccgtcactgtcgccgtcgcaggctggtcgtaggacacatcagacgcttcaaccgtcaagccctcgatgctctcagaggcctcatttgcccttgcggtggccccattagcattacctgccgccacgttggcatttccagcagcttcatttgcaagcgcggccttttcattcgcgttctgcgcggctgcattcgcgctatccgttgccgcgtccgacctccccagcgacgcctcaagctcggcatatatcctcgctatatcctcatatcccggtatcgtgccggttgggtcaataataggcccatctccgttgctttcgatttgcccggcaagccgcaacattgtacgtgtgaatccatccgcatccagtatcaaactggcgtagtattgcccggcatagagatagcaatcgccaagcagcgttactgatattacattgccggaaacagatccggggcatctaactacatagctgtccccgggacgctgaaacagaacaacggccgtatttccagaaaggtcggtgggcgcgttcccatccatgactgtcagcttgatgatgttcgcattctggtccccacgcgccaaaagtgtggcaggacaaaacgtaataagcggatcgttgatatctcgctcgaacgaaagtatcatgctggcattcatactgtgccctccatctccagcgtaatcagcacattcccattcccaagccttgacgccgcttccagtctcatcggacctgcaaactccctgtccggctgcccgtccggcccgacggtcttggcccactcgatcccgtcaaattcggcgatcagctcaaccagcgtccgcacctccgccatctgtacgaggaaccggccatactttcccacggattccccggcccacatcacttcatattcgattcccttactggtcgacagcttcatcctgctccgcctcctgcttcgcttttcccatcagatcgtcaagggtgttcagcaccgcagccatggtggatatgtctttctgcccgctaacgtgtactgtctccaacctgtcctttacggccttcagccatagatgcatgtctttcatctttgtcacctttaccttcccagataataaatgctatcgctcttgttgtagcccccggcttcatttttggttggtgtaagcactctcatgaacgtgttctctccgttccagtttttatagtatattgtatcctccacatatctgggaaacgttaccgaagtcacaaagtcgccgcttttccacacgccggtccatccttgatactgaaataagctctgcgcatacagcgttttggttgaaaccatgtcggaaaagctgttttctatcgctgctatctcggtagaaagctgtgtcgccgtcacatacccctcaaggttgatcttggcagcttgaattttcacttcttccggcgtcaggttgatagcggcgataacgccatctttattcaccttaagaagtattttggcctcggcgccatccagacggaactccgcacttgatatccgttctccgttttcgtccagctgtttctgctgtgcaaggatagatacctccgcatcacccatgcggagctctgtttcttgtatcttatcaccgttttcttttatttttatggtatgaaggtctatcacctcgcggtcgcggatgatgaactgcttgttctcactgatcccggcgccatgcccgcccacgcggttgctcagctgttccatgctggcgctggccctcgccatctctcgcgcaaggctcggctcgtcatggtcctcgtctcccgttttcagcttcgtaagccaggggtgcacatagtcccgctcgatgcccgtgaccgtgctttccagcgccgtgccgtcacgccgcacgatggccaccgtgtcccatagccgcacctgctgatgctcataccccggcacgaactccatgtcctgcaccgtggccgtagcagtcgcaatcggcttgcacaccttcttaagctgctcccacgtttcccgcagcagcttggcaggatcgtcctggtactggttggtgtatacgtcctctacacgtccatagatggccatggcctccgcgtcgccaatccagtcctgcccggcgggcttgtctgccggatcgccgcccgccgcgctccacattacatccgcaaacgtcagcttctgcgggttgtcgcccgtcgaaacgctgttcccaaggccgtacagcaccgtcacagtccgcccgctgcgcgtaaggtatgcgctttccgcatccaccgccgtgtcgaaaaatcgcccacgaaacatgctttcctttgccagcacgtccagcgccatgcccgtgatgacgttgtccgcaatcccgtatcgcaccaccaggcgcgcgtcatagatcgcccgcgtgtcctgtaccgctttccacgcgttctggtagtagatgtcgatgtccccggtccgccccgtggccgtcaccgtgccaagcgcgcagcccgtgccgttcaggatggcgccgaacgcctccgccgctcctgcgtcctccagcttcacgcttttcacgaccacgcccataaggtcccacacggccgcgtccgtcgcgtcgatcgccgtcacgccgctgcgctcgtcgtcctccgcctcatcaatgccaaacaggcgaaaagccccgtccacgcatgtgaaccccagatattctcccggctgcgccccggccgaaagaggaatctgcgccgtcagccgccactccgcctcatcgtgcaccagctcgtacacgtccggcagcacctgccgcacccgcctgtgcgtgtcaaacagatatacgtctacgcccactcgctgtgccacctcgcctccagcgtgccgccgtcgctgctgccaagcgtgtgcactccgggcgtaaatccgggccgccataccgtgcccgtcacgctcacacgctcctccgcatgcacgccgtccaccgtcagcgccgaccggcctgtgtcaatctccaccgtctgcccggcgttcagctgtccgcgcaccgtgaaaaacgcctttccgtccagcgtcagcacaaggccgcttcgccccgacgccagcacctgccggatcactgggcggcacggcatgctcccgcgcaccagcatgctcacgctgccgctgccgctcgcccggctctccgccacatcatgcgcgacgggacgcggcagaacgaaggtaacgactactttcccgaacccccgcacaaattccggttcggaaatgcttccggcgaccgcgtcatacgcaacgcccggccagtgcgtcggctccagcgccgccgtggcgttcccgctgctcatggcccactgcgccagcagtgcgcgcacgcgccacgcttcttcccgttcccggcaggcgatgttcacgcgcaccacatagctgccgcgccccatcgtcctgcccacgaacgtctcgccgtcccatccctgcgccgtctcgatcgtcatctccggcatgccgggcgggatctccttttccacgctcacggccctgtgcacgtcccggatgtccacgccgttaaaccgcatatcatcccaccttcgtcagccgtccggctgtcttgccaagcgacgcattcaccgtcggcgcaatcgtctctccgaccttctttccgtccagatatacgtcgccgttcccggacggcccatagcgcccgatgacaggcgcgttgtaccccgcgccgatgctcgccagcgccgcgttgatcccgttggccatgtcccacgcctgccgcacagcgtaagacgacgattccgcgataccgttccccacgcccatcgcggcattgctcccgctgatctttgcgttctcgatggcggtgttcatcgacgttttcagtccttcgtcaaatcctgtaccgctctccactccgatggacctcattatctcgtcagcggcggcccggtcctcttcgctcagagccagcgaatcaatccagccctttagcgcatccgccccgcccatgaaataggcttccatcatctcatcgtaggtcggaagattgtcacgcaccgcagcgtccattccctccgcataggctgcaccgtcattccgccccgcttcctctgcggaagcacctccgaatagacccttccatatgttcgaaaacgcatcgccaacatctgtccgaaaaatcccccactgattctcctcatcgttcagcaggccggtgtttcctgttttttttgcccattctctggccagctcatcttcgctcataccaagactggatgctgcttcttcggcattatctgacaaaatcaacttcagtgtggctattccgctggttagtgccttcacatactccgtcgtcttttctgtaattttggtcgaaagcggctccagctcctccgccagctccgcccatgcctgctgcgccttaagctgttcctgctgggcctcgatcagtgcgctgttgcgctccttgaactcctccgtcgtttgcaatagcccgttgttcgacaggaacgtcagcgaaccgatggcccgttcctcctcgctcaacccctccatcgcggcattgtagctttcgacgtcttcgcccagctttgttagtagctcttcatataggcctgtcgccgttccgctcctgatactttcaagcaagtccccagctaggccccctagttcaaacgccccgccaaacagaatattggcgcctgtaaatagatcgatcgcattttgcaagtcctgacctttaagtccagtaagaagcagattgctcattgcctccgccgcgccgtccatgtcgccggtcaggcttgtgatttcaaacacaaaccgctgaacatcctcccagtccatcccggcattacgtgccgattcttccagatacgccatctgccgccggtagtcccggctgctatcaacgaatcctgcaagattgttcaccacatccacgatgcctccggcaatctgcgttgtcaccgtgaaggccgcgcttcccttgatgctgccgatgtcctcctgcatctggcgcatcatatcgctcaggctctcctgcgcctctctcgccccgtcgccgattccatcctcgatctgtcgccccacgcgcgtgctgtcccggcccagctcctcggcctcccggtccgtcgcagcaagctcctgcttcatgcgattaagcgccgccgtggcgttggccagcctgatgcggtatccgtccgtctgattggctgcgtcgccgtatttttggacgctgtcgctcaccgcaccgctcagcgcgttgacgatctgctcctgctgggcaatcgcctgacgcagattgttgcttttctgcgtcaggaactgctgcttgtcgcccgtcacgccaaactcggcgcctatcgccttcagctcggcgttcatcacgcgcatggcgcggctcgcgtcgttcacggcgtcccgaaacgctttttccccgtccagcgatatgctggtcttgatctcccgtaccgccatcagtcgttccactcctccgccgcgcggcgcgttattccgtgcagctggtcgtcatactcccgccgctgcacgtacaggtccatcaccatgcccggggccgacgccagcgcgtcggccagcgtcagccccgcaatcagtccgcatccgatgcactctcttgcccggatgctttttctgtttttttttcgatctcgcgggccaccagatcgacgtcctcgtcgtcatcctccgcatgctcgcgccgcatgccctccgtcagcgccagcttggcccgcgccgtcagcgtggccgcctccttcggcgcaagggacgctcgcagccactccaccgtcgcgtccggcgtgccgcccgcgtgccgctcataagcgttgatctcgatggccgccagcgtcagcgccgcctccatgggccgctcgccctcatccatccggcggatcatcgcttccagactgccgaaggcttcctccgcctccagccacgcctgtacgtcaaagcgaagccccgtctttcgcccggcgatcgtcatctctttcatgcgccgatacccgccttctcgtccacccaggcatacgcctccgcctccgtatcaaatacggcacggtcgcggtagtacgccttcttgtccgcattcgggtaggcggccagaatcgtcccgtctgccgtcggcgtctgccaggtgatgctcttgcccttggtgctcgcgttgtccgtgttcacggccagctgtaccttgtgcagccagtaggccacatagctggttacgccgcgaagcttgcgcacgcgaacatagccgattccgccgtagggcgcggggtcgccaacctcgctgtatacttcgctgccggggtccccggtcttaagcagcccgaacgctgttacctgcgcctcctcttccacgtcgtccagattcaggctgatggtgccgcccgtgatgctgttgtcgctttcggccatcccatcgtccgcatacagcggctcgctgtttcggttgaatgtgatgttcgcgccgatcatccgccccagcaccacgccggtgtcgtacacgatcggcgtgaacggtgtgtcggtcgtaatcggcgcaaacacgcagtatttcagtcccacaaatgccatatcgctttcactcctttatatatttgtccatcacggcttccatggcggatacggcgagtccatcggattcatttacgatttgatctacaaagtgatcgccgatgatttcgccttttccattcacgcctcttcggccataatgcagaatgaatgccttttcagcattcctgacgcccttgcggtctttccccatgggatatacttcgcgcgccacgacctctccgcttcccggaggttttctggcttttaccgtccgaagcattgtcccccagtcaacatgcccgcgctctttaatgacccgcttccaggtttcaacaacgacgtccgttccggcttcaatcatctcttccgccatcggcccggtcagggcgtccatgcggccaagctcgtctatgattctgtcgacgccgctcatctcaaacttcgccacctaccacacctcgcagtcgaagatgtgccggatcagcacgccgccgtcctccagctcgctgtccaccgtgtgctcgaaggcgatttcgtcgctttcctccagcgcggacgcgatcgcggcggccaccgcgtcattttccccgcgggtgtagcggtccacctgcacgcgccatccgccctcgttttctcccccggcccacgcgccgatccgcccgtactcgcgccacaccgtataggccccgcgtccggtgttggcataccgccgcgcctgcgggtcaatggcggcgatcatctgcccgaatccgtccagcgtcacgcctccacctccctcagcgtcaggtccgtgatctcctcgccgctctcgtcgtccgtgccgtggtaggcgcgtgtcacctcaagccgcctgtcgccatcctccggcgcgtccgcttctcgcagaatcacaaaatcgtggttcgtcaccgcgtcgtttcggtggattcgcacccgtaggctcgtttccacgtcctcccggcgctccgtcggataggcgggcgcggtttcaaaggccagcttgccgtaccacccctgatgctttttcaccgacctgtacgccggcatgtttcctccgccgctcacgtccacgcgcccgaataccgtcaggatgccgctgtcaagaatcattctgtccaccgcccctgttcagccaccgctcgcgcctgcgcaggcgcagccagtccggcacgcccgccgccttgtcgcggtttccgtattcccacacggtccagtccaccagcagcatcaggtcgtccgggctttccgcgttcagcgcgatgcccgtgcgctccatctcctgttgtacgccccgcaggcggctttccaggtatccgtccagcgtcgtgtcgcccgccagccggttcagcctcgcctttaccagcggcagcgccagcgcaatgatgtccatgcgccgcctcctctcatccgccccgcgcggcggtcatgtcccgccgcgcagggccttgtgtcaacccgccgcgctcttgttcacggtcacggtatacgcgcgcttcgtggtgccgttttccaccgtcaccgtcagcgtgttttcgccctccgaccatgtggctgtgccgccattctgaacgggcgtttcgccattcatgatcgtcacattcgcaccgctcctcacgggcgtggccgtcactttgctcgtggcgttcgtcgtgtccgccgtgtagctcagcgtatccgggtcaaatgccgggtttagcgtcagcgtccctaccaccagcgattgcagggacgccgtcaagggtttgcgctgtcggtagcgaaggtcacggcgttgcccgtgggcttcgtgccgctgatgccgatggccacaaagccctcagcgatcaccggcatgccgtcatagcgggccgtgcccctgaatacggtctggtcctcgatgaaccgcacgtgctcgctctgggcgattgtcgtgcccgcgcgctccaccatcaggtacaggtcgccgtagccgcccgcgatcacgccgtccggcataaattccagcgtttcaacggcgccgccgatcaccggcatggtcatcccctgtccggacacgatcgcgcccgtcgcgttgatgctcatggcctcggccagcagcttgttccaggtcgtttcattcatggcccagaacttgccgcccgcgctgtacttacccttggccgcgcccgccgccgtcacgatctccttgaacagctccagccccgtcttgccgctgatggccaccacgttgctcgtgctcaggtccacccactcacgcgccgtggtctggtagtcatccggctccacggtctccacaaggcgcggaatgatgccctggggcatctttttgcccgtgccatacaggatcgccttatcgatcgccatgccgatggcgcgccccagcatcgtgatgacctccgccgccagcgccacgttgtccgcgtcctccagcgtcgcgttgcataccggcacgaagccgcctaccttgtacccatcgacttcaacgcccgtgaagtcgatggccagctcgttgagcttggcgcactgctccgtccacaccgcttcgggaatcacgcccgccaccgtctggcgcgccttgccggggacgctgcgaaggcgaacatgcttgagcagcttgctggcctcctctacgcgctcgcgcacgatgtccagcaccaccgtcgggatcagcagttcgccgcccgtcaccgcgcgcttttccgcgcgaagggcgcgcacgcggtcgcagaactctttcacgtcctgccgggcgaagaaggcgtcgcgcgcctccatggtcatgccaaaaaagctccggttgtccatccttttttcatcctttctttcctgtttcgccgcgccatcgcagcggctgttcagctcgtccagctcgctctgcagctcgctgatctgcctctcgatctcctcgcgctcgctgcccgcggctttttcttcctcgtccagcgccgtggcgtcagcctcgaacttgtccagctcgccttcaagcgccgccttgtcctcgtcgctcacgccctcgctcacctcgtcgatggcggcggccagctcctcctcgcgcttctgcatcgcctcccgccgggcggcgatttcctccccgcgccggttaacgcccgccagcttctcgcgcagcgcctccagctttttgccaatgatcagctgtctcaatgccatttcttcatcctcgctttcatcttctcacgccacgcctgtgcccggcgcgcctggatgtcccgatactcctccgcccgcgcggtgatctccgtgtcctgatacgccggaaacgtgcagcatgatacctcgtacagccgcaccttctcgattgtccagtgcacatgccccgtctccgggtcaacgtcggtccgttccttcagaatgtcgaacccgaaggaacactgcgacacgtccccgcgcttcacacgggcgtacaggttcattgcgtccatgtcctcggcgttgatcgatatgcgcccccacaggccgtgcccgtccacgcgcagttccagcgtccccgccttcgtcctgccaagcaccaggcttgtgtcatggttaatcagcgcgcgtacatctccgcccagctctccgtcaaaggcgtgcgggtcgatgctctcgctcgccccgtcgaacagctcgtagttgctgccgaacacggcgaaatagccctcgatataccgcccgtcctcccgttcctccgcccggaacgccgccggcatgccgcgcgtctgcctctcactccgcatcctctccacctcctcccatcagcttcgcctgatctcccagcctgtccgccgggatgtagttttccagcgccagcagctcgtccatatcctcgtccggcggcaggccgatccagtcgcgccactcgttgcgcctgagggccatgcggtccaccatctcgctgcccgccgtcaccagctcgccgatgtcgtagctgagaagtgagcggttgttgaagcgccagtacagatccggagaaaacagcaacttccgcgttagctcctgctcgatgcttttggccaccgaaagcacccgcgtggtcacgaaccagttgaactcttcttttttgaaatcgcccacacccaccagaaacggcggcactcccatgatcgatgccacagcccgcttgtccagctcaagccccgttttgatcgccaggtcgttcagcgtcagcggcttcacctgctccacgctgaacgcctccgccgggatgaaccacggctgcccgttatcgctggaatcgatgtattccgcgcgcagcttcgcccgccccgacgggctggcgaactcgtccgaaagcccgtccaccttcacgatgatcgacggcgccgggcttctcatgatcgcatctttggtggcgtttgtctgccggatgctacgcaccacatccgccaggctcacgccgtaccccatgccccggtacggcgcttccgggtccggccgcaccatgaagtgcagcgcctcatccggccgaaacgccgccccgcccaccatgatgcggtagctcccgccgtccggcacaaagctcacctgcgacggcggcaccggtgtcaggtcctccagatacccgccgctgaacctcggcaccgtcacctgattgccatgcatcatcagcgtccacacgatcaggctcatccacgcgtgccgcgtcatatccccgtgcggcgatatgtccagcttccgcgacagctcgtttcgcacccgcacgtccccgcggtcggtgttgcgcatcaggtgcagcgtcatgctggcgatcaggtccgcgtacacgcccacgcacatctgcacctccgggcaggccgtcagcggcttgtacccgtccgcgcacaggatctcccacgcatttcccgcatccaccagcccggcgccgctccgcctttcgggagcgtcccggctcctctgcgtccccttgaacggctgtttcctctttctactcatcaagccacttcctcgccttctcgcgcttctccagattttccagcatccgcaccaccgcgaacacgtccgcgtcaaacacgtcgattctgcggttctggcccactttttcgtactggatcatgtcgtccgtcttttcaatcgccgatacgttctgcacgcagtattcataggcttcgctgcccaagtagtaaaagcagtcgtttttcgcctgcttttcgatgtgccggaacccctccgacttcttgtagaaatactgcggctggtccaccacacagaatcccgccgacttcatccccacaaaatattcacggcagaatttccggtcgtgccccacttgccggatgtggaatcccatggtccgcattttcttgaaccactccaccacggccgcgtggttgttggtcggcgcgttgcacatgtccagccatccgtcatccatccagccgaacagcggaatgttgtcctcgttggcctttaccgtggcagccaccaccgggaaccacgcgtgcgtaatggcgatgtcgattccctgatactgcccgtgcagcgccgccgccgtcaggtcgtgcagcttcgacaggtccgccccgccgaaccagtccgctttcagcgccgccagtgctttcagcttcctctccagcggccagtccgcaccgatgcccagcctctcgcccgcccgctcgttgcttcttcggaactcgtcgatgttgaagtacgaacgcaccgacgccgtgaacacgttgagcgattttgcgtagaaatcttttcgctgctgcgggtcattcagcgcctgcatggcgtcgttcatgatgtccgccgggcgtatcgtcacgccatagttggggtttgccttctcgtgctgcacggggttggtaaaatccaccgtaccgtcctcatcctcttccgcgcagcagatgaaaatgaaatacccatcatctttcaccgtgcccctgatcaccttgcggcagtattccagcctctgtgcacagaatcccgtgccgtcatcgcccgccgtggttacgccgatcaccagcttgttggtgtaggctttcgtggcctctttcaaaatgttgtagtttttcggcgatttgtaggcatgcagctcgtcggctatcacgatgttgcagttgaagctatcctgcgcgtccgggttgctcgccagcgcgatcaggtccagcgaacctcccgcaaggtcgctgtttcccacgctgtgctccatgttgttgtccagaatgcgccacccgtctgcctgcgccgcctttcggttctcgtacagcacccgctccacgttgtacgtccagttatcgaacgtctccatggcctgcttcagcgccgcgcccaccacgtacaccttggccccggatttccgctcaaggatgcccagcgcccacgccagtgccgaaacaaagatcgtcttgccgttcttcctgggaataaaaatgaacgcctccttgaccaggcgttctttggtccccttgatatagaagatcagcatgccgtaaacgcagaacttttcccacggctccagcaggaacggctttccacgcagcggcgtcccgtccagcttctggccctgcctgtgcttgaacgtcttttcgatcacgccgatcacaaagtcggcgtcccttgtgcggatatcatactcgccgctttcggccatcctcgcaaaccgccggcaggccagcaccctgtcctcgcccgccacgatccgcccatccatcaccgcatctacataccgcatcacctccccggcatatttgcctttaatctccgtcaagatccttcaacacctccgccagcgacgacgtctttttcactctcagcccctgttcgttgatctttttcagcgcgcttgccgtcagccccagctcgcgctcgtgcacgatcagctgcgtatcgacatcgttcaacgccactagaaatggattcttaatgatgttcgtcgctccggccttgttcgtgtgattcacaacggcccgtccgccggtcatctcaaaatcctctgcgaatttatctcgcaaaacgtacagctccgccgtccgctcaatgatctgcataaactctgcccgatatattcctagcttcttcatgttgcgtatgatctttgccttgtattgcttctcatccatcaaatccccccttcccccttttttctctcggagggaagggatgcacctccttccggtccggcaccctcctccctcccgccctcttatgggggggatcagcgctttcttcccttctccgggtgtttccggttgtggcacatggcgcaaagcgcctgcccgttgcttaccacataggcaagttccgggtattcgtcgatgggccttttatgatgcgcgactgttgcccgcaccggcaacccatcggcatccagacggccatatcgccggcactcttcgcacagaccccctgcttttttcaacaccttttcacgccatacaagatggcgctttttcttgtaatggttgaggtttggcatacaatgcaccaaaaaagcgaccttggaaggccgcttcagcaatggattcttataattgtttcagtataactttagctcagttatttcaatttgaaaaggcaaaaaagtgggaaaaaagcgatacttttctgtacccttgttcaactcaagactattttggctgctcatctacgcgaaagttaaacatttcaagttgctgatggacgtattcgttataggtcatcggcaagttcttgatttttagcatcttttctatatccggcataaacagtaacgaatctatgcatattcctttatcaggtatttttataaattttccattataaataatttttcctgctcctacgtttattcttccgtcgccctttgcttccaagaaatactggtattttccttcctgccaaatatactcttttgggtctgtagacaatcgttcaaaattcaaaatactcttatcgtcatttaatccgattattttaaatttcccaagacaagaaatggaacccaatatcatgtctgcttcattgggcctttgatgccggggaaccatcttaatatcgaactcacctttgttttgaaccatcagagcgtcaaataggtcttttgttttatacttcatcgtcagcaaaaacaggtatagttttcgtgcatgaacatgattatattccttcaggaacaggttatgcatcacctgataagctcccaggattcgatcaatatcccgaagtgacaatccaaaatcgtttttttcccgtataaattccattgtaagttcgtcaagataatcctcttcgacaaatccttgaaggatatcccgaatatattcccttgtagagggagcaggcatcacggtgatatagtcaaaaaagcgcagcagatatccctcggcatccattcccatcccatacatggattccacggttttccgcagttgggtgatatccactgcgtacagaaaaacgattcccggtacgcttaacagatgctttgtgatttcaagcgttcgaacggcaaaatccggccggcaacgatccagctcatcaacgatgaccagtagccttccgtttttgccatatatctttattgcatcggctagcatgtccttaaaatcttttatatgagcatcatattcgattagtctttctgccttggcttctcctgcctccttatattcttttgccgcatcaatagccgctgcaaacacgtcgaatggtgcctgtctgcctatcttgagtccggctcctttaagcgccgccacaaattttccaaaacgccgagaggcattgttggctttcagttcatccgccatggcctcttggggcatgatttgctgcaccaaaggttcaaaaggttcatcaaaatagtcgtatttccatgcgtcgtaatacacggctgtgagcggcctgtcgcgtctttcaaattcctttttgattttgctcatcagcattttcagaaaccatgtcttcccgctcccataggctgcgtcaaccgccagcgtgtatccgccctcgcttccctcctgtttttggcaaatttcaagaaggaagtccgcatagggttcccgatgaaatttatcatctttttcaaacgaaagctccggcttgatcattgattgtcctccgtttcatgtttttccttatattggtcattataatcgaagccggcttctctcgcaatactttagcaggctgaatgcgattacctcgctatctcatagatcattttcatcgcccgccgcttgatcttgcgcaggcctccagccgtaatatgaaacccgaaagccgtgtcagacagggcttccaactcactccatgtgagaccatctaacaccttcaactgtaccaccttttgctcgcgtccagtcaatgccccaatccatacctccacatagcgcatcgcctgttttcgctcttgctgctcttttttcatgctttccagttcttctctccattgatggatcagaggcggtttatacccatccaggtattgcagcaccaggtcttccactggttttttcgccgaagatgatttcctgacagttccgtaagtctgcccccgcaacgcatcatgaaggatggcggttttttcctgattgcccagttcagcttccatgcgtgatatctcaatggccagatgctccacacgtgctctgttcttccgatgcgttgccagcagtcggtcaatctcttgcggcttcactcgctttccctccccattatggcatcccttggctttccgtgccgttttctccacccctgcgacatgcagctcaacggcagggccgccgctccggcggcggcccgcgccgtcctgctcgctgctcttcgccctcccggcagctgctcggccacatatgcggcgtagctgtacacataccccagccggtcgcacccgacgtaccagtccggcaaaagccggtatcccttccgggccttcggctctcccggcttcggcggccgggcaatctgccgctttgtttccaccggcctggtcaggtttcgacttgcgtgccagcggcgcgcgcccttcctgcgcggtgttttcgcgttttcggctccttccgccccgcgccggggcttgtgcccgctggtcaggtagcgggccagctcttcgtaggtgtaggtgtcgtccagggtggataccatcaggcggccccgcgtcccccagacggcgcgcagctcgtccagcgtcagcccgccgttgataatcaggtggtgatgccacctgccgctctgacattcggtgatcgcgatatacttcagcgcatccagccccttgcgctcgcgggcgcgggcaatgcgcagcagcacgttccgttcctccttcgcggcctgcgcttcgtccaccggctgcgcgtgggtcaaagtcacgaacaggtctccggccgctccgctgaagttggcgttgatcagccgcatcagcttgcgccgggcattgcgctcgttgagtcgctccatctcctcgctgctctccgcccggttctccccgcgggcgatcctgcgcccgtcgcgggtggcaaagtacctttccacctccagcagccggccggagcgggtgatcttctcgaagtacggcatcttcgattctccttgtggcagttcgcacgttccgccctttgggcggcccgcgctgtgcaggcagccggctcagccgccgctcgctttcgggcggtccccatcccttcccggtcgctcaatcgtcgcggagggcgctgaccgcgcccaccgctcgtttcgctccccgcttgcgggtcgctttgtccgctttgcggccaagtgcccaccgggcacgcgctctccttcagcgcctccgctcgctgtgcctccggctccgccatcctcgtagcgcttgcatatttatgcaggcatgcgaaaagttaatcgctgttacaagggggaaaagcgggccttgcccgcatcctgggtgcggagtgggccgcctttttacggcccactccgcaagtatccggatgaatttccgctcatttctcccgcggctcccacgccccacagcggccgtccttgaccccgtccaccgtgccgaacgccgcgcattccttttcacaaagagcccacagtagcggatggtaatatccgcaggtcaggcaacaagcgggcgtaccttcccgcacggctcgcccgtaggggtcaccgtccctccgcccgttcatccttcccacgctcccgcaccacgcgcgccgcctcgtttgccaggcactccagccattcgttcgccgcctcgctgatccatgccgtgtccgtcatgatcgctgcccgcgcggtcattcccttcatcaccatcagtacggtacgtccgtccctgcttcgcagggcgtaggtgcgttcctttttgatgtcgtccgtcaccttcagcgcgtccacgcgcacgaattgcatccgcgccacacctgcctcgtccatgaccggctgcacgatcacgtcgttcaccgcaagggtcatgggcagcagaatggcggggatgtcgcccggctgccggtcctccagcatccaggacagctccttgcccgtgccctcatccctctcaatccggctgacaaaccatgcgtcccgtttctcctccggcacgtccagcagggcgggaagctggtccccgcttatgacgggcatcccgtccagcggcacgatcatctgcctgcacacaagatgctgccggatgatttccccgctttcgtcgcgggtatagatcagcccggcactcatggcagactgacagtaggtgctaacggatttcagtttcatcggtatcgcactccctctttacatccgggattccggctcgcgccagcgcgtccctgagctgttctgcctgccgggcaatggcgtcttccagccgagtgatctcgctttcgtacatctggcctacaccggtaaacttctccacatcccgcatcagccgctcgttttcttcctccagccgctgcatctcgtccgcgaagctccctagccagctcaattttcggtccccaagcgccagctggcgcagagattcggattttttcattgtttctcgcctccttccatctgatcggccatcaggcgcagagccgtcacaaacgccgcgcggaagcgcggcttgtctacgccgtctccagcgccgtccagcccgtccttcaaccgggcgaaggcgtcccgcagggcattgaaggccgcgcgcagctcgccctccgcctccgtccgcccggcctgcgcgcgaaggcgctccagctcttcccggacgacggacggcacggtttccatggtctgcgctttgttcctgctctcctccagctcctcgctcatgcgggtgagctttcgctccagcgcctccacctgccgctgtttctcatcccgctcctttttcagcttctcacgctcctcatgtccggcctttacctttccagcctcgacttccatcgccgccaaatgccgtttctcggcctcgtgcagctcgctccgggctttggccagctcctccgccgcccgagccgcacgcgattcgctctcctgccggtaacgttccagctcctgttcggcccgctcggcgcggtctgtcatcatgcctacatcgccctgcaaggccacaagctcatccgtcagctcgtcgtcccgtatgccctgcatcagctcgtcgatggtcagctgcatctttttcttttcctcccgcagcgcttcgatctgcgcttgcagctcccgcgtgctcatggaaggcacgtcgttttcggccaggaaggccccgcgctcctccgccggcacgcccagcagcagtaccgcctgcgttacgctcagatccgcaagcgcctgcggatctgtttttccgtactcgtcggcaatgcgcatcatgttctgtgccgtgcgctcagaatagtccacgcttcttcccagccacgctccccactccccgtagggcacaaggctcttggcctccttcagccttcgtccgatctcgatggcgccgctcaccaccgtggcgcgcacctgctccttgatcccgttgatctccgcggcgatggtatcgatggtccgcacgcccggttcgttcatgccgccgcctcctttcgtttctttttccgctttgccgcccgctgacgctccaactggccacgagcctcatcaaacagccgccagaacagcgcgagccttggctcgtcgtccttcctgcgttccctgccctcgtccgtcctgtcgtttttgtatccgcggcactgcttcagctgcccgtcttttccaaactccaccgtgtagagggatctgtccagggcgttgtcctcccgcagcacgcacagcacgcatccgcctccggcgtactggtccacatagctgcccacgcagtggctctggcgcgtgccctcctgtaccacttccgccccgttgaacaggggccgcagcgtcagccccagcgcgccaaaaaaataggcgtccagctcgcctttccggatgcggtcggcaatgcgtttatccttgtcgcgttgctttacatgctggattcgcgtggcgagctccccgtgcgccgcgtaaaagtcgcccggcatcgcgtgctcacgcgggtccatgcccagctcggccagcatgtccagatggtccccgtaatccgccagccgcacgtccttcttccggcagtatttcacggccttcaccgcgtccacggggctttccaccagccttcgcagcgtttccaccccctctctttccgctccgacccatgcgcacagctccatattcatgcgaagccctttctttcgggcgaacgcccttgccgcaagcgtctccctggtcaaacggagcttcttgccctttgcctccgcccactcgtctcccgtcaggcgcagcacttggcgcgcggtgcggccccgcaggttcagcgtttttccgcaggttttgtctatggcctgtctggccagctgcgtcatgcccagccggttcagatattcgatgcaggggtactttgccacgcgcgccgcaaacgtgattcggtcataatagtcaccggcctccgtctcctgaagcaatccttcgtccgccagaatgtgctcaaacggcgttcccgctatggcattgcggtagctttcatcgtccagccgcacctgtatgcccggctgataaagccctcgtcccggcacaaacccgctcacgcattcgcgccggtgcgcccaccgcatctcccagccgtcgcccgtccatgtggcttcccgcacgaagcggtccgcgccctgcccgtagcggaacacgcacagttcgcgtggcgtgatctccatcggcacgtccggctccaggccgtccatgtgcttccatgccacgttgatctccagccccacgcacacgatggcgctccgcggctctatggcgctcttggcgtactcgatcaggaacagcctgtcccacaggctcctgtgccccttgtagatgctgcggaactgcacccacgcgccgcactgcgggcacgcgcccgttgtcaggtggtccgtcgtgccgttgtaccgttcccggaacaggtgctcctgctgcccactgtacagcacgggcaggaacggttcttcgtcgccgtcgaacttctccatgtacgggtcaaacgcggcataacccggcgtcatgcgctccggcttcagccgcatccaccgtttgcaggccgagcaccagcccctgcggtccttacgcgttcccagcgtccacaggtaatgcggcacggccatttccgcgcggtcccacagcctgctgttcacatgacattctccggctatacctcttgcatggcgcagcgcttcctccagctccatgtcacattcctcccagcagcgcgtccagatccagcgccgcatacgtgtggttcgcatgcccgcctgcggtgttcatgctgtgaaggcaaccagcctccccgccgctcgcttgcgcaggcgcgtgcgtttctgcttttttcggcgcttgctccggaatgccgtaatagcggcataccacctcccaggcggtgctgtccgaaacgtagcacataccgcctttctggtgcttcctggcatacgccttgatctcagcgaacgcgccggtcaggctttttccctccgccaggaacgccggggcgatttccgcgtcatcctccagccttcggcacagatattccccgactgcctgcacgccaggatgatcgtgcattttcgccatttcgtcccgcaggcggtccatgctttcgttcatgtgcccgcgccctccctctccccgttttcgcccatccattccccgaaggattcccggcaatcctcgcacaggtggatcatcttcatgccgttcagcccgctggtgcaagtcagcgtcaggcattgcgttctgtcctccctctcaatcaccacgccgcagcgatcgcagatcagtacgcgcatttttttgtacctccttgagatattgggtatttgcccatgattcgggcggatcgcttaggcccgccagcctgtcccataccaccagcgcccactcgccccgcgtttccagcacgatcagccggttccccggtcccaactccatttccacgtcgtaggccagtccgggacctgcacgcaggttcagatagctgccttcctctacacagatctccaccagcattttctccgccagcgcgggtccgcccgtcatcagaacccacaaaccgatagcagatgccacggcaatcagccacaccagcgccgcgcgcttgtccatgctgctcattgcctgttttcctcctgatcgcccagtagcacgtcgtacagcctcgccttgagcttgagaatcgtcagctcgtccgctgccttctccatgcgcatatcggcgttttcgccctccgccgccatcagctttgcgaacatttcttcgttttccgccttcaacgcctccatgatctccagatcggtaggcgctttcagttgttcgcacgttccgtactccgggcggcccgtgctgtgcaggtaagtagccgatttgccgctcgctttcataccgggtcccattcccggtattcgctcgctgtcgcctgaggtctgccgtccttgtgacggttcgcacgttccgtactccgggcgacccgccatgctgttagctgtgcgctctgcttcttgggcgggctgccgcgttttcccggtcctttcgttctcctttggggcctgtcccatcttctgtgcctctcccttcccatgctttatctgccttttcacggccttgccctctgtggttatttcccctgcatccagcagccgcaggaaccggcggccataggcgcaggcactttcgcagctacggcatgcctccgcccggacctccttttggcctgggctgcacgcttcatcacagagatagcgtctcagccgtccagggctgatttccccggcggcatgttccttgacgaatgccattcccgccgtgctcatgccgtccaccagcccacaaccagcgccagaaataccgtccataccgcgattcccgccagcaccaacacccagtcccggctccgcgggagcacttcctccgccattttgcgcagcctgcgcctgtgccgccagcggttcagcgccgtaggcggctgatattcaatgaggtacatggatttatctctcctgttcggcgcttgcgcgctcctttcgtgcctttgcccagggggccagccctcccagtgatcggatataggccaccttcacctcgcgcggcgcgtcgatggcgttcagcgcggccgccagaatatcgctgttcacctcgatcaggcgctcgcgcagccgctccatgccctctttgctcgtgggtaggtgtacggtcacgccgatgggttccttggccggcattgaggaggcctcctttctgtgagggttggcatgttccgtccttttggcggcccaagctgtgtggacaagcggcttggtttccgctcgctttcgggaatatggctgatagagcgtatgtgcttgaggtggcaggtgtgctataatagcagaaaacgtgaattgctgggcccgcatggcttatgcgctcatgcggccgatttcgtacccggccatcatgccggcagccaccagcgtggccgcctgggcttcctcgtcggtcattttattgatcgtcgccatggcctcttgcagcagctcttctctggtcactttttgcacctcctttttctgattacatacgaatattatcatactaaatacgaattgtcaaataattatttgacttagtacgaaaacattgatataattctttttgaaaggaggattcgcatgagcatcaacgaacgaatcatcgaagtaagaaaggctgttggccttaatcagatacgatttggagaaagaatcaatataagttcgtccggcatgtccaaacttgaaaaaggcgacaataatccttcagcgcagacgatatcattgatctgccgcgagtttggcatcagccgcacatggctcgaaaccggcgaaggcgatatgatggacacaagtgtagagcaggacatcgagctgctcacccgtgccatggagggaggcagcagcgcaaaaaagcagctcatccgcattgtcgccgccatgccggatgacctgctcgaatctatggtcagttacctgaaaaccgcaatcaaagagccggaagcgtaatgctcccggctcagttttttatattgtatgctcatttatccatttcaattttgatcgcattgatcaccgggcagtcaaacacaaggcccgtttccgttttgtattctgtgattttttcaagagttccgaaggcagtatagctattcccttccaagtaggtatccttttcagcgcttgtaaaagccacataatcatccccgtttttagcccaagcaacaaaactcggtttttcagaattctcaatttcttctaccttaaaaaccacgcctgatatgctcattttctcaccgattattgtattttctgcatgcaaaatatgctgcacgctcatctcagggtaagatacattatccactacggcagaatgctggacttcgatctttattactttcttcttcccgttttccctgaaaatgattttcccgtttcctgcctttacaggggttattttaaggaacgatacatctaacttttctgaaaaatcgtcacctttaacttgttcagcaacttcatctttttcaacttcatcccactctactacatcgccttcaatatcgtaaaaatatcctccgatgttttcctgataaatcaaaatatacggttcattcttatctatcacgatttcttcttcccgaacatatacgggcggaacagtaatttgaatgcttgcttttttcccggacccatcctctgcttttattgttaatttgcacgtacctgtataaaatgtagtaacaaaggttccatcctcatacagatggaccacgttggaatccgatatttctacagtgaatccaacgtgcgaaacatcttctggctcaaatataaacagatcacgaagcttaaagtaattagccgttggcatttcaattttcttttgcacgggcgttattttctcaacgggagcattcacaacaatcgtgcactttgccgtatattgttcgccgctctcagaagagcctgtacaagtaatttctgtacttccaacgctcacacctgtaaccttgccttttttgtctactttggccacatcaggatcagcactgacccattcatatatgagctcttcatcaacaccttgtgcgataggactaagggttatgcttttcttggggattgtaacatactccaggctctcgaaagcaagtattccttcagctggtgcgttttcgataacgaaagctacaagaagaatcaaaacaagaaagactatgccctttttcatatatacttctcctcttaatccttttccatcatcttccgtatcctgcggatatccttggccatctcggccaccgtcatgatgccggatgctgccagaagtccagccccaagtccgatgcacaaacccagaaatccgaatgtcatggcgccgtatatcgccgctccggccacgccgatccagcccgtggccttcatgaccatcgcccacagacagtcgtcttcggcgtttttcttttgtcctgtctgctgcattggcttgggtgccacttcgggcctgtcctcttccacacgcgtatattcaggctgcgtgttttctctctggatgagtcctgcatctgcggcgttcgtccttccgtcctccttcgcagtctgcggtttttcttcccgtaccgaatcttcacccgcggcattcagattttccgcgccctccaccaccagctctgccccgcacttccaacacttgggatgcagtataggtatagtcagttcgtatcgcttcccgcagtccgggcatatgtatggatatttttcaggcatgattctaccccctttttcctgcattatacagatcatcccgatattcgtcaatcagctttcggaaagcccgccggtttgccttatctttcgcgccataccttaagcagcgcattcgcatatgcgcataccttccggatgtccattaccgaaagtttccatgctgtcgtcaccagcgtccgtatccattttttcttttcgtccacttgcaagcccccttatatacatatcatccacgcctatatcttcgcttgcgtcgtggcactattatacgaacatatgtttgcattgtcaatggcagttgaccgaaaatgtcctttgataccttttcctgtaccctctcctagaaatggtttacactttatgctctatgcggtatactgaaataactctataaatgttgcttgattgtcaggaggccttcccatgcccgacttcaccgccctgtcccgcaaaagcggcattcccgtccccgtgcttcaggccatcgcctccgccgggcagcgccacgcccagcgcgtggtgctctacggttcccgcgcacgaggggaccaacagcccgaaagcgatatcgacatcgccttctttggcagcaatgagggctttttccgctttgaaacctgcatggagcagcttcccaccctcttggaatacgaccttgtccatgtcaccgaaaaaacctccccggcttttgccgaaaatatcaaaaaggacggtatcgtgctgatggatgcatctacagtcaaaattgaacagcttcgcaacgcgctttcccggctggaagaggccattgccgagtaccggcaaacgggcagctccgccgtgcgcgacggcgccatccagcgcttcgagttctgcgcagagctggcctggaaggccgcgcaggattacatgcaggcgcagggctatctggatgtgcacagccccaaggccgtcatgcgcaaagcctacgccgaacacctcatcaccgacgagaccggctggcttgctctgctggatgcccgcaatcagacctcccatctttacgatgacgcggtggccgacgccgtgtatcaggccatcggaaatacctatttgcccctattgcgcgaactgagcgaaaagctgtccgccgctgtctgaccccatccctttttgggctcgtagattcctgcgcacaggatcacaaggaagtgttttttatgttgcatgtccgtccacaacacattcatcgttgccttgcttgtctc

SEQ ID NO: 3721 - DNA, 18456 bp, Unknown
  16S sequences of unknown bacteria
gataaacgctgaaggcatctaagcgtgaagcccccctcaagatgagatatcccaagaccccttgaagaacacgaggtagatagggcagaggtggaagtgcagtaatgcatggagctgactgctactaatcggtcgcaagcttatccaaacgcggagaaagcggatagcatccgcttacaaagcaaggtagggttaaaaaggttaaagacttaaaataatcggattgatatttatacagactgtatgtggttttgaaggtatgtgaaatgagacatcggagtgatccggtgtctttttgcattacagaaaagatatattaaacagtgaagaaaggtagcatactacggggaaactgtggtacaatgagcagagataaagcgaggaaaggaaaccatctatgatttttgatagtcatgcacattatgatgatgaacaatttgattgcgaccgggaggaacttcttgattcgatgcaggagcatgggatcggtggcattattaacgtaggagcctctatggagggcgtctttgcaagtcaggagctggcggaaaaatacccgtttatttatgcaggggtcggaattcatccggattatgtgggcagtctgaatgaggagaagctccggatgctggcagagctttgcaaaaagtcgaagacggtcgtggtcggagaaattggtctggattattattgggataaagaagcgcatgatattcagaaaaggtggtttatcgaacagctgaaaatggcacaggaggcagagcttccggtcaatatacacagcagggatgcggcgaaggatacattggatattatgcgacaggagcatgcgggtacgaccggcgggatcattcattgcttttcctcctcagcagagatggcgatggagtatgtacggctggggtattatatcggtatcggaggtgtagtcaccttcaaaaatgcaagagtgatgaaggaggtagcggcagctgttccgctgaaccgtatcgtggtcgagacagactgtccatatctggcgccgacaccatatcggggaaaacgaaatgcatccttgtatcttccacttgtgatagaggaaatcgcacggatcaaagaggtgtccccggcagaagttgaacaggcaacgtatgaaaatgtgcttcagctgtttccgaagatcgcgaagtgactgcgttcatgagcaagtagcgaagctaggccctgtcagcacacctgcagggatggattgtgaatgtccgctttacacaggggacttgcttgattcggttaaaatatatccggaggtatccggacagagaggaatagaacacaaaatgacagagaaattatcgaatccgaaaaaaacaatcgaggtgatccagaagcatggatttgattttcagaaaaagtttggacagaattttctgattgattcgcatgtgctggaaaaaatagtcggagcagcagagattacaaaggatgattttgtgctggaaatcggtccgggaatcggcaccctgacacaatatctggcagaagcagccagggaagtgacagcagtagagattgaccgaaatctgattccgatccttggagaaacactttctgactactcaaatgtgacgatcatcaatgaggatgtcctgaagctggatctggctgcgctggcaaatgagaaaaacggaggtaagccgatcaaagtggttgcaaatcttccatattatattacaacgccgatcattatgggactgttcgagagccatgttccggtgagcagtatcaccgttatggtgcaaaaggaagtggcgatgcggatgcaggcaggacccggcacgaaggattatggggcattgtcgctcgcagtacagttttatgcagaaccatatattgctgccaatgtgccgccgaactgctttattccgcgtccgaatgtaggcagtgcggtgattcgcctgaagacatatgagcagccacagattcaggtaaaggatgaagcatttttatttgcactgatccgtgcttcctttaatcaacgcagaaaaacacttgtgaacagcctgaaaaatgcatcggatttaaagctggaaaaggaacaggttctggaagcactgcgtactatgggactgagtgaaacggtgcgtggagaagcgctgacgctggagcagtttgcatcgcttgcagatttgctgaaagcatagcagctgcaatcagagtaaaagaaaggagcggggctatgagagaacagcattttacgtttccatcctggaatggaagcaatgagatacacgccgtccactggattccggacggtgagatacgtatggttgttcagatttcacatggcatgtcggagcatatcaggcggtatcgggcatttgcagagcatttatgtacatatgggattcttgtgtgcggccatgatcacctggggcatggggattctgtggcgaacgcagacggttatggatttttttcagaaaaagacggaaatcgggcgctgcttcatgatttgcacagagtgacagagctgacaaaaagaaaatatccggatgtcccttatgttctgatgggacacagcatgggctcgtttctggcacgtcagtatgtgtgctgctatggatcggagctggatggggcgattatctgcgggacaggctatcatccggcaggagagcttcgttttgcgcttgcactttgccggaggctggcagcagtaaaagggtggaattatcatagtcgtttgcttgactggatggcttcgggaagctataatatgaaattctggccgaatcggacacactttgactggctaagccgggatgacgcatcggtagatgcctatattgcggatgaaaaatgtggatttccatttaccttaaatggttattataatctatttcttaccttatataagattatccggccggagtatctggagcggatgccgagagagcttcctatctattttattgcaggcgcaaaggatccggtagggaacaacggaaagggtgtcagaaaagtagtcgatttgtttaaacaatacggcatgcagaaggtgcaatgtaagctgtatccgtatgaccggcatgagattttaaatgagctggaccggtatatggtgtatgaagatgtacggaactggctggaagaagtgattcagaatttacgacagaaaaaagagatggacaaacagtaaataagggacagcagcggtttttgcttagatgcgaagctggctgctgttttttactttacaggttactgaatcagaatatttttaaatcgcatgcaacaatctcagaaaaaaagaacacttatatatagaacgaaagatgcagcattctgtatcggaaaggaggaggttatggaagatgcgacatctctggttcttcgggcaaaggatggcgatgtgcatgcatttgccggattgtatgcacagatttataaagatttgtatcggtttgcggtgtgtaccttacagaatttgcatgatgcagaggatgcagtgagtgaaaccgtattggatgccttttcgcagattggcagtctgcgcaaaccagaatcctttaaaagctggatgtttgcaattttgtcggtaaaatgcagaaagaaaatacaggattatgggaaggcaggtatggaactgacggaagatctgatgcggacggaagcagacttaagtgagcagctggatgtccaggaggcatttcaacggctttcgaaggaggagcggatgatgctggcgctgaagctgtttgccggatattccagtaatgagatcggagcgcttttgcagctgccgcccggaacgatccgttcaagacagcacagagcattaaagaagatgaaagcagtgctggaagatgaaaaaaagcaaaaaacagatgcagggaaaatctggaacagggaaaataagaaatagtgaagatcagaagcagagaatccttgggacaaagaatatcagaaaatgtgaaaatcagaaacaggcagaagggagcatacgatatggatgagaaaaaaatgctggatttgctgagaaagcaggcagaagagattgaacctccggaatcgctttcgccggatgcaattgaacagatgttggcaaaacaaaagaaagagataaaagaagcagaaccgaaagagaagaaaaaggaaaaggaggggcaggacatggcagatcagaaaaaagatacaggtaaacacaaaaagaaattctcatatcgcatgatcgcagagctgggcagtatggcggcaatttttgtgcttggtgtgacggtatattctcagtcgaagcagattacgcagcttaagaaaccagccatgacagtacagcagctagagacagagactgaaaaagcggaaatgggagaagcgaagacagaagcggagcagacagccgagaaagcggtaaaggcagaaacagagcagacaactgaggaagcggtaaaagcagaaacagagcagatagctgagaaaacggtaaaagcagaaacggagcagacaaccgagaaagcggtaaaggcagaaaatggatcggaaccggaaacagagcttgcagcggatgcaacggaagctttcgaaaatgcgactttcatgcaggaaagctcgaactcagaggatacgctgacctatgcatccggatatcaggagatttatgacaggctgtatgagcttttccagtcgaacacgattttgtatgattatgatacctcagacggagggatggatccaagaagcgtcacgtacatggtggaggagtctgcattagatgtcagtacagcggccacagaggatcacgtggattattccagaaccaacatacaggaggcgggtgtagatgagggagacattatcaagacggatggaacctggatctacattttaaagcaggatggcagcttttcaattgtacgtgcaaatgatggagcaccgaaggtggaaagcacgactaagctggagaaaacgggattatcaaacagagagatccgggaaatgtatctggatggcgatcgactgatcattgtggaagagggtatttgtacggcacttgagaaggacaatgagctctatcgaacctcgaccggataccagacagtattgtcggtatgggacatcacagatcgcgcgcagccagagcagatcggaatgctgcgacaggacggatattataaggattccagaaaaaatggtgattttgtatatctctttacttcttatatgccatatattgcagatacctatgaagagagtacgattgttccgcgtataaacggggatgaggttgcttataatcagttctatcttccggagaagccggcaagtgagaactatctgatcatcagctctgtggatatcacaaagccggaggaagtaaaggaccagaaggtgctggtgtccggtgcggatagcttttatgtcagcacagagaatatttatgtgacaaatgaaaattataacagcggcagagatacggttgtgacagaaatcgcgaaatttcattataaagacggcagaattaccggtgtggcggcagggtcggtcaaaggatatctgaatgattccttttctttaaatgaatatgacggaaccctgcgcgtggtttctacctattatgatgaaatgtgggaggaatggaatgcactgtatattctggatgagaagctgcagcagctctcagcgattgaagacctcgcacagggtgagacaattcgttccgcacgcttttttggaacaaccggatattttgtgaccttccggcagaccgatccgcttttttcagtggatttgtccaacccggaaaatccgaaggtcttaggtgaactgaagatcagcggattttcttcctatctgcatttttacggggagaatttactgcttggaattggctatgaagcagatgaaaatacgggaagtacgacaggcctgaagctatcgatgtttgatatttccgatccggcgaatgtgaaggaagtaagccgtaccgtgcttccggggatgacctggtgtccggcaattgaagattacaagtctattttggtggacccggataaaaatctgatcggcttttactgcgacaagagatactttgtctattcttatgacgagacaggcggatttacaagagagctgctgtgtgatttttacggggatgaatttctgggcgtgtcagatcaggcagggcaggagcagggtacatccaagattgcggcaaccgtagattatgacaatatgcgagggctttacatcggggattatctgtatctggccgggaatgattttgtggcggcgtatgatatgaaagacggattctccatggaaaaagtaataaaagtaaattaggggacttgtttgattcggttaaagaatcggttgtaatatcatgtagaatttactggacgaaataagcaaaaaagtgtatgataatgggagcaggtggaaataaggaggatgcttttatcatgctagaagaattaaaaaaacaagtgtatgaagcaaatatggagctcccgaagcgcggacttgtcacctatacctggggcaatgtcagcggcattgaccgcgaggctggtctgtttgtcatcaagccgagcggagtcgattacgaaaagctctgtccggacgacatggtggtcatcgatatggaaggcaatcgtgtagaaggcaaatataagccgtcgtctgatactgccactcatctggagctgtacaaggcatttccggagcttggaggtgtagtacatactcattcgccgtgggcgacctcatgggcgcaggccggcagagatattccgtgctacgggaccacacatgcagattatatgtatggaccgattccgtgtgcgagaagcctgactccggaagagatcaatggcgagtacgagaagaataccggccttgtcatcattgagaccttcaaggagagaggcatcaatccggtatacgtaccggcagtgctctgcacgaatcacggaccgttcacctggggcaaggatgcttctgaggcggttcataatgcggttgtacttgaggaagtggcaaagatggcatgccgtaccgagctgatcaatccgcgggttactccggcgccggattctatcaaagagaagcatttcatgagaaagcacggtgcaaacgcatattacggacagtaatcacagataaggacaaagaaggggtgtacattatgacgacactggaattacaaaaaatggcgaacgaagttcgcaaaggcattgtgactgcagtacacagtgcaaaggctggacatccgggcggatctctttccgcagcagatgtttttacatacctgtattttgaggagatgaacattgatccgaagaacccgaaggatccggacagagaccgcttcgtgctttccaagggccataccgctccgggctactattccgcgatggctcacagaggctatttcccggtagaggatcttgtgacgctgcgtcatatcggctctcatctgcagggacatccgtgcatgcagcatatcgccggtattgatatgtcttccggatctcttggacagggcatttccgctgcagttggaatggcactggcaggaaaaatggacaaaaaggattaccgtgtgtacacgctgcttggcgatggcgagattcaggagggccaggtatgggaggcttccatgttcgcaggacacagaaagctggacaatctggtagtcatcgtggacaataatggtcttcagatcgatggaaacatcgcagacgtatgctcaccgtacccaattgataagaagttcgaagcattcaatttccacgtaatcaacgtagcagacggaaacgacatggagcagctggcagccgcattcaaggaagcaagagagaccaagggcatgccgagtgcaattatcatgaagaccgtaaagggtaagggtgtttccttcatggagaatcaggcatcctggcacggagtagctccgaatgatgagcagtatgcagtagctatggcagacttagagaaagtgggggaagcattatgtcagaagtaaagaaaatcgcaacgagagagagctatggtaaggcacttgccgagctcggcgcagagcacgatgatcttgtagttctggatgcggatctcgcaggtgctacaaagacaggtatttttaagaaggcatttccggaaagacacattgactgcggtatcgcagagtgcaatatgatgggcattgcagcaggactttctacgacaggcaaggtaccgtttgcaagtacttttgctatgtttgcagcaggaagagcctttgagcaggtaagaaactccatcggctatccgcatatgaacgtaaagatcggtgcgactcatgcaggtatctctgtaggtgaggatggagcatcccatcagtgcaacgaggatctggctctgatgcgtacgatcccgggtatggtagtcatcaatccatctgacgatatcgaggcaagagcagcagtcagagccgcttacgagtatgtaggaccggtttacctgcgttttggccgtctggctgttccggtgatcaatgacaatccggactacaagtttgagatcggtaagggtgttaccttaagagaaggtactgacgtgacgatcatcgctaccggactttgcgtaagtagtgcactggaagcagctgatatgctggcaaaggatggtgtatccgcaaaggttatcaacattcacacgatcaagccgttggatactgagctggtcgttgaggctgcaaaggctaccggcaaggttgttactgtagaggagcattctatcatcggtggtcttggcggagccgtatgcgaggcactttctgagaaggctccgactccggttcttcggattggggtcaaggacgtattcggcgagtctggaccggcagttgcacttctgcacaagtatcagctcgatggcgaaggtgtttacgctcagatcaaagagtggctgtaagaatctttgtaaaaatttataaaatactttaaaaaacagaagactctgatttatggcataactgccgtaaatcagagtcttttcatatgtccggggacttcgtggatatcccttctgaagcggtggatatctttcaccgcccgtctctccggtgtggattactccgttccggcgtggcaagcgtgaagataaattcggtgcctactccttctgtactgatgacgttgatattctggctgtgtgcgcggatgatttcgcggacgatggataagccaagtccgatgccctttttgtctctgccgcgggagacatctgtcttataaaaacgctcccagatctttggcaggttcttttttgagatgccctctccgaagtctttgacggagacgaagacgagctttttccgttcatggacgctgaccaggatttccttccctgccggactgaattttatcgcattgtcaatgagattgtagagcacctgctgtatgcgtcccatatccgcacagacgatcagtggctcatccggaaggtctgtgcggattgccagattttttttctggcagagtacctcgaatgtatcgagcgtatgccggatcacctcggagatgtcaaattctgtgagatccagataaatacgctggtcgtcgaagctgttcagcagcaacagcccttctgtgagcttgttcagacgctcagtctcacttaagacgataccaagatagcgctcctgcatttccggggagatcgtgccatcaagcatggcttctacataacccttgatggatgtcagcggagagcggaagtcgtgtgagatatttgaaataaactttcgctggtattcattggaatgtccggctgattcggacagatatttcagggttgcagtcagacgcccaagctcatcatcccggtcgtaggtgatctccggtttggtggaatcctcttccatatagcgggcagctgcctctgaggcatcacgcagcgggcggtacagcttaaaatatatggccagaaacgggatgagcgagagcagcatgacgaacgcaaccataatatagcaggtattctggatagcgacggaggcgccgtgtaaggcatcctgccaggtgggatccgaggaaataccatgcagatagtgctgcagtacatgcgggacgagcagcatggtcagcaggaagcttagcaggagaaaacacagataggaagcgatcattgtgatcagcattttttttggtttcatgccttcacctcgaatttgtagccgattccccatacggtagagatcgcccagctggcgtgatccttgatcttttcccggagccgcttgatatggacgtctaccgtgcgggtatctccgatgtattcatagccccagatatggtcgagcagctgttcgcgggtaaatacctggtttggtgaggaagcgagaaaatatagaagctccagctcctttggcggcatgtcgaccgttttttctttatagactacggaatagttggtaagattaattgtcagatccgggtattcaacgtattttccggccggctttgtctgtgaagcctgggcaggctgataacgacgcagtacggccttgacccgggcgacaagctctttggaatcaaacggtttaatgatatagtcgtcagctccgagctccagtccgagcaccttgtcaaagacctctcccttggcagagagcataatgatcggaacgttggactgctggcggatctcccggcagacctggtagccgtcgatgcccggaagcatgagatcgagtaatatcagattcggggagaagaggcggaactgccgcagcgcctcttctccgtcgtagacgattttggtatcataaaactcttttgtcagatacagagaaatcagctctgagatgtgttcgtcatcatcgacgatcaggatcttctgtcgtgctaccataaaaaacctcctatacgctacttaaactctactatggttacgccggcatcgccttctccgtattcgccgaggcgataagaggcgacgtgcttctggcgacgcagatactgatggactgctttgcgcaatgcgccggttcctttgccgtggacgatccgcaccggggagaggtgggcaagataagcgtcatccagatatttatcgagttctacgatcgcttcatcggtcgtcatgccgagcaggttcagctcagagctgatagaagaagacttggacatccggatcttgccgctgccggaagtctttgcactgctgcttttgctgtaagccggaagctcatcctcaagcttttccagatccttcagattgacctgtgagcgcaggattcccatctgtacgaacagattgccgcgggcatccgggagcgtgctcactgtaccgcgcaggttcatgctgagcacgcggacaccgtcgccgatgcgaagatcttttgcctgcagctgtttttggggcttctggtctgccttgacgccattggccttctgcagagcgttcattttttcgcggagctttgtgcgttccctctccatttcctttgcggagccggatgcttttccgagcttattgtagctgcggatggtctcgtcggcatattcctttgcctctctgagcacagtctgtgcttcttcacgtgctttacgcagaatctcatcacggctggaatcaagacggccttccttgcgctccagacgctttttcagttcctcgatctcctgcttgtagcggttgacctcttcacgctcgtgctcaatctgagcacggctggattcgagatcggagatgacatcttcgaagctctcggcatcctgggtcagatgctcacgggcttcttcgatgacatagtccggaaggccgagcttttcagagatcgcaaaggcattactcttgcccgggacaccgatgagcagccggtaagtcggacggagcgtctcgacactgaattcgcagcagccgttttcgatgccgggtgtggagagggcaaagaccttcagctcgctgtaatgcgtcgttgcgatcgtgcgtacatttctgcggtgcagattggagagaatggagatcgcaagcgcggcgccttcggtcggatcagtaccggcaccgagctcgtcgaagaggacgagggagcgctcatctgcctgatcccagaaggagacaatatttgtcatatgcgcagagaacgtactgagactctgttcaatactctgctcatctccaatgtcagcgtagatttcatcaaaaatggcaagctcagagtggtcggatgcagggatatgcaaaccggactgtccgagcagtgtaaacaatccgacggtcttcagggagaccgtttttcctccggtatttggtccggagatcacgagcatcgtgaaatcctctccgatgcggatatcgacaggaacgacctttttcggatcaagcagtggatgacggccctttttgattcggacgcgcccttcttcgttgaaatccggttcgcttcccttatagtagagagagagctgagcacgcgcaaagatgaagtccagctccgtcatgagcaggatattgtcattgatggcgtcgctgttgacagctacctgcccgcttaaattggcgagcacgatctcaatctctttttcttctttgatctccagctcacggagatcattgttcagctttacgacagccatcggctcgatgaagagtgtggatccggtagaggactgatcgtggatcattccgggtacctgtgagcggtattccgccttgaccgggatacagaagcggccgttgcgctgtgtgatcacggcgtcctgcagataatttcttgtgccgccgttgaccatggcgttcaactgtgcacggatgcggtcatttgcctgatgcatctgacggcgcacctgcttgagccccggacttgcatcgtctgcgatctcttcttcggacggaatgcagcggttgatctcatggctaagtgaggtgagcggctgtaaggaagtgaacatttcttccagagagtcctcgttttgctcttccaaagatgcctgtgcactgcgggaccatgcctttacgcgagaggtcgtctcgagcagctttgcgacgcgaagcaattcttcgacatttaaggagcttccgacctccagtcgacgcaaggacatacggatatctgcaagacctgagaatgagacgttgccttttcggagcaggcggcttacagcgtcacttgtctcacgctgcatccggcggatctgcgtaagatccgaggatggggacagattccggcacagctcttttcctggctgggaaccggcatagtcggtaagtttctgtataattttcgggtattcgagtacccggagtgctttttcgttcataataacctcataaaaataattgcagcagttccgcacgactttttgacagaaccttccaaacagatacaaaatcagctgccacagtgggtgcgaagcagctactcggttataagcaagcagcgaagcggattgcgaatatccgcttttattgtatcgcaaaatcccggatttgaaaaccgcttcttgcgtagtataaattttttcgagaccttgtagatttttcaattatcaagtatactgaaaataatggagccgaattgccaggcagtgatttggttataagataagtaagtagcgaagcggattacagatatccgctttgatttttgacgggagaggtgtatgtttgacgagaaaaagattgaatcgctctgtacgcgggacatgacctttttgcttggacagcagctgcagttgctccatgcggtagaaaatctgcaggttgaggaagcagagacaccggaagctttttatatcaatgcggaggtcggatcaaaggcaggaggcggagaaacggtttatccggtctggatccgctgccgcaggcagaccggggagattgaggacttcagctgtgaatgtgccgcttttcaggatgaaccgggtatgtgccgacactgtgtggcagcggcgcttgcatatctggaacagaagaaaagtgcagagaggatgaagctgtatcgtgggctgctggcagagtcaaggaaggagcattcggacaaagagatgctgctggctatggaggcatatgcgatgcgtcgtcggatgcagaagcaaaagccggaagggacgatcgagctgattccaaagctgtacgaaacaggacggaactattattatggaagaaagagctatgcgctgacctttcagattcaggaaaacagcggcaggagctatgtgctgcgcaatctgagtgattttatcgaggctattgaaaaagaggagaagtatacttacgggaaaaagctttcttttgttcatagtaagagtatatttacggaaaaagcatggcagtatgtgcagctcatatgggatggaataaaggtcggcaatacaggcaatgaaaagctggcgaaggagcttccgctgaaccggatgctgatggagcgtttctttgaactgaatctgaaccaggagatcgcatatgagagctttgactgtccatatgagacactgcagatcatagatgagaatccgccggttcagctgcagctgcaaaaagagaccggtcatgcatttcgtgtgtggattccgcctcttgccatctggaaggggacaaggtctttatttgttcggatgcgggaaacaatctatcgctgtaccgctgactatcggtatgcgatggagaggctgctggaatgtgcaaatgaggataaagcaatcaagctgaaaatcgcagaggaggatatgccattgttctgttcggcggttttgccggagctggagcaggagaaggcgatcgagacgagaggtgtttcactggagaaataccgtccaaaggaagccgtgtttgctttttatctggatgaggaagatggcagtgtcacactgcacacagagtgcacatatggagaatatcagtacgatttgctccggcaggagccagacggcagacgtgatttgctgcgggagaggcaggtactcgaggtggcacgcagttatttcccatatgaggactctgaaagggggcttctctgctttgcggcatcccaacaggatcggatgtatcagctgctcagtaccgggatccgtcagctggagcaggagggaaaggtctatgcgacggaccgtattcagtcacatcatttgctgcgcacgccaaaagcacagataggtgtgtctatggcgaatgggctgctggagcttaccgttttgtcagatgcatttagccgggaggaactcgcggaggtgctggaaagctatcgcaggaagaaaaaatatcaccgtctgcgcagcggagattttctggagctgacggggaatgcggtcacaacggtggcagagctgctcgatgggctggagcttaacggaaaacagcttgcaaaggacagcgtgaagctgccggggtatcgggcattgtttatcgatcaggtcataaaggagcacggtacgcagcttaccgtgaagcgggatgaggcataccgggctgtgctgcgcgatatgaagcatgtaaagagcagtgatttcaggattccgggcgaattggacgagacgatgcgaagctaccagaagatcggctaccgctggcttcggacgctggcgaagcttggctttggagggattctggcagacgagatgggccttggaaagacgcttcagtcgattgcatatctgagggcgcggcgtgaggaagggatcagccggtttccggatctgatcgtctgtccggcctcgcttgtttacaactggaaaaaggaaatcgaacgctttgcaccgtctctgacggtctgtctgctggtcggaagtgcggctgcccgggaggaaattcttcacgagaggatgagactggagcagcggcggatggatgctccggctgctgtgcggttggatgccgtacagagagccgccgcagatatctggattacctcttacgatttgctgaagcgtgacgttacgctttatgaaacactgcagtttgataccgaaattatcgatgaggcacagaacatcaagaaccatggaacacaggcggcccaggcagtgaaaaagatttcggctcgtgtgcggtttgctctgaccggtacgccgatcgagaaccgtttaagtgagctgtggagtatctttgattatctgatgccggggctgctcggaggatatgagcattttcggaagcgctatgagcttccgattatacaggaggacacggaggcaacgaaacggctgcaaaggatgacggcaccgtttatcctgcgcagaagaaagcaggaggtgctgcgtgagcttccggataagctggagcagatcgtgtatgcgaagctggagggggagcagcagcgtctctacgaggcggaacgtcagaagctgcaggaggagatatctagaaagagcggagaggagctggcaaaaagcaggctgcagattctggcggggctcacgaggctgcggcagctctgttgtgatccgcggctgctctatgaggactatacttcgggtgcctgcaaggtagatacgtgtatggatctgattcagaccgcagttgaaagcaggcacaaggtgttgctgttttctcagttcacgagtatttttccgattttggaggaacggctcaggaaggatggaatcgcatattacgagctgaccggaaagacgccgaaggaggaacgacagcggctcacggatgcttttaatcaggataatgttccggtatttctgatttctttaaaggcgggaggaaccggactgaatctgacggcagcaaatatcgttattcactttgatccctggtggaatctggcagcgcagaatcaggcgaccgaccgtgcacaccggatcgggcagaaaaatgaggtcaccgtgttacggctgattgcgcagggtacgattgaagaaaagatcgtggagctgcaggagaaaaagcaggagctggccggaaaggttttggccggggaggcagtctcgaatgcagccctgacaaaggaggagctgctggaaattctggcggacagataaaagacaattacatcagatgggggcaaaaaaatgaaatggaacaaagaagaacggatagcctacggaaaaattttccgtctggcgctgccgattatcattcagaatctgttcagcgcggcgatcagctcagcggatgtcatcatgctgaactcagtcgggcagtccgcaatctctacggcgtctctggcggtgcagtacagcagcattttatatatggtatattatgggctcggaaccggtgcaacgatgctgtgcgcgcagtactggggcaagggcgagctgcgtgcaattgagagggtcgaagggatcgcactgcggttctccattttgatctcgctgctgtttgcgataccggcagtcggtgtgccacagctgatgatgaaggtatttacaaatgacgcggagctgatcgagcttggagcttcttatctgcggattatcagtgtcagctatctgtgctggagcatttctgaaatttatctggcagtgctgcgcagcattgagcgggtcagaacgagcactgcattgaatgtcacagcactcatgctcaatattttcctgaatgcagtatttgtatacgggtggttcggagcaccgaagcttggtatccgtggtgtggcactggcaacttcaatttcacgtgccgtacagctggtgctctgcttttgggtgtcggcagtctcaaaggacgtgaagatccggcttcgggcgatgttcgagaagggcggtgtactgttgcaggacttcatccggctgtcattaccggcacttggcaatgatattttgtggagcgtcgcattttcgatgtattcggtcatcatgggacatatggggacggatgtcgtggcagcgaattccctggtcgtcgtggtgcggaacttcggaacagtcatgtgcttcgcaatcgcgagtgcgagcggcatctatgtcggaaaagagatcggcgccaatcagcttgaggcggcggaaagagacggaagccgtgcgctgcgtctgaccgtggtaactgcggcagtcggaggcgcgctgattgcagtggcctctccgtttgtcatccgatatgcttctctgacagagaccgcgaccggttatctgaagattatgctggcaatcaatgtgtactatattatgggatcggcggtcaatacgacgctgatcgccggattgttccgcgcaggcggcgacagccggttcggtctgatctgtgatgcaatcgatatgtggtgctatgcggtaccgctcggatttatcgcagcctttgcattgaagctgccgccgatggtcgtttatttcctgctctgcacggatgagtttgtaaagtggccgtgggtgctgaaacgctaccgcagtaaaaaatggctgaaaaatattacacgggaagaggtctgaatgctttacaatgaaaagtatttgaatataatgatgatacaagggtcaaaaggttatgcgtttcatgcttgcatgaaaaagcatgacttattgacccgcaaaacaccgaaaagta

SEQ ID NO: 3722 - DNA, 9193 bp, Unknown
  16S sequences of unknown bacteria
ccccgcccccgccgtacacgccgccggggacgattgaaacgcgaaagggcttccgccctctcgcgctctcccatgggttctttgacagtctacgcgggctgcccatgcggcagcccgcatttttgagaaaacaacggccagcggccactggcaggcgcgcggcccaggaggaagttatgaaaaaagccggcaagaaatcgacgctgatcgcctccggcgtgatgctcgtggtctgcgcgctgctgtgcctgatcccagacgcgtataccaacccctcctcgctcatcccgcgcgaacaggtgcgtatcgagagcgtggacaacacccagctcgccccgctgggcatcgtgtattccggttcgcaaacctgtgaagtcaccgtgctttccggcgaatacgccggggaaaccgcgctcgccagcaactatcagaattccgcgctggacaaggacaagctcttcgagccgggcgacacggcctacgccatggtgcagatgggcgcgaacggcctgatggtcacgctcatcgaccactcccgcacgggcgcggagctggggatctttgccgcgctggccctcgcgctgatcgcggtgggcggcgccgtgggctgcggcgcgctggtttcgctggtttccagcgtggtcatcgtatggaaactgctcatccccctgctgctcgatggtgtgaaccccatcctggcttccttcctcaccgtgctggcgctcacggcggtgatcgatctgctggtggcgggctgcacgcgcaagtgcctggtggcgctcaccggctctttgctgggcacgctggtcacctgcgtcctcgcctatgcgttcacgaacctgctcaagctggacggcggcgatacgccctacatcgtgccgctgctggcgcagacttccatgaccatcgacccccgcgcgctgttcatcggcatggtcttcatcgccaacgccggcgcgctgatggatttgagcatggacgtcgccatctcctgtgaggaaatcgtctaccaccgcccagacatttcccgcgtggagttgctcaaaagcggcatttccattggccgcggcgtgctgggcacgcagaccaccacgctcatgctcgcctattcaggcaattacctctccatgctgatgtacttcgccgggcagggcacgcccgtgatggatatcctcaacctcaaatacgtttccagccaactgatgaacacactggtgggcagcttcgggctggtggtggtcgcaccgctcacggcaatcgccgcgtcgatcctgttcacgcggcgcgcaaaagttgcgccagccgccagcgaagcgcaataggccgcctgaacgcagcagcgccaaaatccgcaataccagggattttggcgctgttctatgggcttttgccgccgcgaagcttgaaaaccaggcccctgtatgctatactgccgccagccacatggaagggagatgcattatggacgaagcatggatggaagcactgcgcgaactggggctgcaaaactgcgcctacaccctcctgcaggaaaaggacggcatacgcgtcgcgcgggtgtggcgccagggcacgccatacattataaagtttttccaggccgcggattttcgccgggaaatcgcaaattaccggattttggctgcgctgggcgtgcccacgctgaaagtccatgcgcaaacgtcctccgcgctgctcctggaagacgccgcccacagccccttataccggctgggaacgccggaggatttgcgcgatcccaccgtcgcgcggcgcatcgcggactggtatcgcctgctccaccaaaaaggctatgcctacgtcgcgcgccatggcgcggatctatacgatgaggccagcgttttcacccgggaagcgattgcgcagatccagcagaaaaccggcacgcagggcgcgcccgcctggaaagcgctggaagaacgctttgcggacatcgtccagttgctgcaaagcgttccccaaacgctaacttacaacgatttctatttcaccaatctggccgtcgccaaagacctgtcttccgccatgatgttcgattacaacctgctgggcaggggatatgcctacgcggatgtgcgcaatgtgacggtttcgctggaagaagaggcccggcaggcctttctcgcggcctacggcgcattgaatcccctggaggcgcggctcgaccgcgtggtatccaccgtggttacgctgcattttgcctgccaacgcaaaaccttccccacctgggccgcagccgagctggaacgcgtttccacttcgctggaaagcgacgttctcgccctgttctagggtttcaccgcgcgggtcgcccagaaggtggggatattcagttcgtgcaacggccccatgccgttggtatcctcatacacgtgcgtgagcgcgaagcccgcttccagttgcccgccaatctgctcttccagcgtgtgggaaaactggatgccatcgtcgtttttgagcgacgcctcatacagcgcggggtccttcaggggattgtatggcaaaccgcgcttcaccacggtttcatcgtcgtcaaacaggtaattgatgccgttatccagcccgcagagcaggacgccgccctttttcagcacccggaagcattcccggaaaatgggcctgacctcctccacatagcaattggacaccggatggaagacgatgtcaaagctcgcgtccgcaaacggcaggggccgggtcatatcgccctcgatgatgcgcacgctgtagccttcccgttcggccaccatccggtcgctctcgcactggttgtgcgaataatccagcagcgtgcagcgcgcgcccagcgcggcaaaaataggaatctgctgcccgcccccgctggcaaggcccaggatctctttgcccgccagttcgccaaaccatgcgtgcggcacgggccgggtgggcgtgagcagcacgtcccaatcgccatttttcgcgcgcagccaggtttcgtgggagatgggctttccccattcccagccctcttcacaccagcggctgatcgctttcgcattcacttcctgataccgttccatagtaacctcccgcaaacatttttatggttcagcattgcttgtcctcgcgccgcatttgccttcctctttgcccgcaacgcgctgaaaggcctcttccgccggcatgggcatggcgaagaaatacccctgcaacaaatcgcagcggagcgcctgcagcgctttcacctgccactcatgttccacgccctcggcgagaatggtgatacccagcctatgtcccgtgcggataatgccttccgtaatcgcctggccctgttctgtgcccatgttttccacaaattcccggtcgagtttcaagccatccatgggatattcctgcaaatcgcggaacgcagcataccccatgccgaaatcatcgaacatgatctgcacgcccaattcccgcatggcgaggatattcgcccgcatctgcgccgcgtcttccgaacgaattgtgccgctctccgtgatttcaaagatcagttcccggcgcggaaaatcgtatcgttccaagagcgcgcggcagcgctccaccatcttttcccccgcaaacgtaaggcgggagaggttgcaagtgagataaaattcttccttgcctgcctcgtgcagccgctgcaagagcgcgcacgccttctccaaattgtacatatccaaccggccgattctgtcttcccgttccaggagcggaatataccggcccgggctgagcaaacccttggccggatgctgccagcgggaaagcgcctcgccgcccacaaaggaaaagtcctccgcgttcacaaaaaattgcacatatagctggaattccccttgttccagtccgcgctccaggtcgctgagcagctcgcgctcttcttcgcaggcgtagcacttgtccgctccgcaaacccgggcatacatcccttcatttcccgcgcgtatggcgcactgccgcgcgtggaacagcgcgccattgcaatcgcaacaatcgcgcgaagcgaggggaaacacgccaatggtgacatcgcgccggttgagcggcgcgcccgcgcactcataagcgcgaatttcatccaacacatgcaacgcccatttgcgcgtggaaagcgggcttttcccctggcgcagcacaaaaacatcgcccgttttgctcaagccgatgtccatattccctaccgcgcggcggtgcagcacatccgccacaaagcgatgaaagcgcaagatttcccccgggccgccaatgcgctcgatgtgccccaatataaagtggaaacacaccacgcaatacgacgcgcgattgtccgcgcgcacttttgcctcaaaccggcgccggaacccttcctgattcaaaaaacctgtgcgaacatccgtatacagcgccctgcgcaacgcgcgccggctattccgcagccagtagacggcgatacccagcgcgaccagcgccgccataagcgctgcgctcacgaccgccagcgcgggaaaggcgctcgcacacgccgctgactggctctccaccggcgccaaaattgcctcttccgcggcagcggcaggagccaccatgtccgtcagccattcccacagcgcgttccaacccgctcccgggcaatctccctccgccgccaaatccgcgcaaagggtttccaccacaatcttttccatcgtttttatctattttggtttttgtcttttcgcgctttttgcgcactacaaagcatggcacgcaccctttctgttcgcgccacgctttcccactccccgcgctcatagcagcacacgccgctcttccgcacgggttacatatagtatatcacattatagaattgcacgtaacatcaaacccgtaaacattcaataaaaagggataaaacgctcaatccgccacataccggttcttgccctgcgccttggcggcataggcgcgcagatccgccacatgggccaaagtgttgtaatccgttccttcttccggcgcaaaagccacgccaatgctgcaagacatggcatatttgccttcttcgctcaggcgctcaatgcattcgcacagccgccgcgcgcaatacaccgcctgatcgcggctgtgcagctccggcagaaaaacgacaaattcatcgccgcccacgcggccgcacaaatctttttcccagagctgattgcgcaacacctgcgccacgctgcgcaaaagatcgtcgcccgcctggtggcccatcgtatcgttcacggttttaaagttgtccaaatcgataaagagcagcgcggccgttgcgcccgcttccagcgcgcgcgtaatgcgctcataaagcgcgccataattcaaaatgcccgtgagcgaatcccgctccgccagcaaaagcgcctcgcgaagcgcttcgctacgctgtttgttttcataataaacgtccgtcacgtccgtgcgcaccagcagaatcatctgcgcatcccggtcgtaatagcggtattccaggcgcttgcgcgtgtaaccacggccttcctccattacgcccgcggtaaaagcatgcacgccttttttctccaattgttccaacacgcggccgatgcgcatttcccgaatcgtcatctcctgatcttcgggtaccacaaaattgcgcgcgtattccaccaacgccgcgtcgtaatcatcgcacaccgtgggcggcaaaggcgtgcccgccgtgttgccgctgaacatcacatagctgtttttccgagcgttgagataaataaaataatcgcacgtgctgtacacatacagatcaatgatgctacgcagcaaatgttcctcattgttttgccgcacaaaaatgtaggcgtatgcgctgccgtcttcccgccgccgggcgctcgccgtgattgtgagccaattggtagtgacgccctttttataagacacgtccagcgaaaagatgccgttcgccgaatccgccgcggccagcagcgccgtggtggaaaatttttcgcaaactttgtcgcggccttcttcggtgaggatgcggccatactggcgcaaatattcttcccaccgcatgctcgtgttcgttttttccggaaaatcgcggctttgcaaaatgtatacgtcgtcctgcacgagatccacctgtaataccgcgtaaaacatctcgttcaaggcgccagtcaactcattgtgatgatctcgtgccgctttctgtccgtccaacgccttcgccgctcctttccccgaaaaattgtccctacacaaaaatctatgctacaccgtacagttcacattataaagcgtatttattttaacacaatggcgagtggcttgcaacaaaaaaagcgataagtttctcaccgcccaaggccaaattcccataattttccaacgctatatagcgtcaatatcaacaatccatatcacgctattccaaaattcaaaccaaaaaaaataacatattttcaattcaattccttcgtgaatgtgcattttctcttttttgcccaaaaatctgcgaaatgccattctttcccaaagctatgttcgaaagtcaaaactgcagcgcgagaaaagccaagctattatccgcaatttttccaaatctgttgacatattcagggaaaaatggtatgatttttatgcggaactttcacaattctttggcaaatcaggaggttgaggcgatgcgaaacacagttgctctggtatcggcccgctttgccaagcccggccaaccatttgaaagcgttgcgcttccacacacttggaacgctctggatgggcaggatggcggcatggactatttccgcggcgcttgcacctatgaaattgccctaccgccgcctacagaaggaaagcgccaattcattgaatttgcggcggcaaatcacgaagcggaggtctttctcaatggcgtgcggctgggcgcgcaccgcggcgggttttccactttccgcttcgagctcacggcccatatgcggcgcgcagacaatatgctcaccgtgaaggcggacaacgacgcgcccgatacctatccacaaaacgcagatttcaccttttttggcgggctctaccggcccatatccttcatcgaagttgcgccggcacacttcgatctgctaaaaagcggcagcgccggcgtttttgtcacgcctgtggtcacggggcgtacgcgcgtcgacgcgttccccgtggatgcggcgggatgcacggtgcgcgtgcgcctgcgggacgcggcgggaaacgaagtcgctacggcgcaagctccggcggagccgcataccgtgctggaaatgctggtggaacgccccgcgctgtggaacggccctggcgcggcgcgcctgtacacggcctccgtcagcctggaaaaggacggcgtgacgctggattgcgtagagcaacggtacggctaccggagtttccacgtcgatcccgagcgcggctttttcctcaatggcgtccgccatccgttgcacggcgtttgccggcatcaggaccggcaggatatgggctgggccatcggcgaaaaagaacaccgcgaagatatggcatggatccgccgcatgggcgcgaacagcatccggctggcgcattaccagcacagccaggtgttttacgacctgtgcgatgaaagcggcttggtcgtatgggcggaaatcccctatatcagtcgtcatatccccggcgaagtcgcgcgggaaaacacgctttcccagatgcgcgagctgattgcgcaaaactatcaccatccatcgatctgcttctggggcattggcaatgagctgaccatgggcggcgagagcgaagaactctatcagaatctttgcgcgctcaacgcgctggccaaggagctggatccttcgcgcctgaccacgatggcgcacctgtccatggtgaagcccgaaagcccgcacagcaccatcacggacgtgcaggcgtacaacatctacctaggctggtacggcggcgaaatcgccgataacgggccatttctcgaccatctgcaccagcggcagccagatcgccccatcgctgtgagcgaatacggcgcggacgcgctcctctcctggcacagcgccgaacccaaaaaccacgattacacggaggaataccaggcgctataccacgagggcatgctcaagacctttgccagccgtccttggctgtgggcgacctatgaatggaatatgttcgatttcgccgccgacgcccgggatgagggcggctgccgcgggcggaacaacaaggggctcgtcacttacgaccgcaaaacttgcaaggacgccttctttatctaccaggcctactggacgcaggaacctatggtgcgcctgtgcggtcgccggtttgccaagcgtgcgcccggccaacgggatgtgaaagtctacagcaattgcgccagcgtggcgctttggctcaatggcgcgccgctcgccaccctgcagcccgtggatcatgtgtgcgttttccggaatgtgccgctgcaaagcggcgaaaaccaactgatcgccatcgcggacggcgcgcgggacgaaatgacgctctccggcgtaaacgaaccctgcgcggaatacgatttgcccgcggacagcatcgtggccgggaactggttcgatgaagaatccggcgaaccgctcgttttgcactatcccgcggggcggttcagcatccgcgatgccctgggcgcgctgatggacgcgcccggcggtgaagcgatgcttgaggaaatccgcgccttgatcgcgccgcccgccaacgcgccaaagcggcccggcttttcggaaaaagatttgtggaaaatggtgcgcggcatgagcattttgcaagttatccgcatgacccgcgcaaagatcacgcccgcccaactcgtggccctcaaccagcggctgaacgcgctggaaaaacctgcggcagacgcggaataaaagaagcggagcaaaaatccccgttcgccatgcggcaaacggggatttcaaactgtcgaaaaaccaaagagaggggcaacgccctttcgcacttcaatcgtccccggcggcgtgtacggcgggggcggggcgatttttgcggcggaaaatcccattttccagagcaaaaatcgcttccttgcagtttccgcgcccagaaatccataggatttcagcggaaactggagagggtggcagtggcgggggcgcacgaagcgcgcgcccagtgggacggagcttcgccgcgcgcagtgcgc

SEQ ID NO: 3723 - DNA, 6035 bp, Unknown
  16S sequences of unknown bacteria
tatttgatattttttgttgtgtttttcggaaatccctttcactattaattgcatattctcctatgcgcgtcactccgttcgggatgtttatactcatcaggctactgcagtcataaaacgcaaatctttttatgctcgtcaaactttcgggtagtgttatactcgttaacccaacacatccccaaaatgtactccctgctataataggcaatttttcggacaatgttacgctcgtcaaactactacatccataaaaaacatattctcctatgctcgtcacgctgttcggaattatgatactcgttaaattactggcagaaaacgctttctttcctatactcgtgacaggttttcccttatatacggaagggatatatacttccgttatatcattctcgttctcgattccgaccaccgtataacttgccctgtcctcgttcaaaagatattttaattccttggtcggctcgtgctccccgcatctcgtacaaatttcattcacataagtgtgtccgagcgcagcgatttcctcctgcgctacaatgatctcgccgcacaccgagcaatgttttcccgcagtcctgcctgtcgcggcgcaggtaggcgccacctcttcgtccacaacttccgtgtgtccgagcgcagcgatttcctcctgcgccacaagcacctcatgacaaaccgagcaatgttttcccgcagtcttccctgtcgcggcgcaggtaggcgccacctcttcgtccacaacttccgtgtgtccgagcgcagcgatttcctcctgcgccacaagcacctcatgacaaaccgaacaatgctttccttctgttttgcccgcctcagtgcaggtaggctctattgcttcatccaccacttccgtgtgtccgagcgcagcgatttcttccttttccgtttcgccgcatttggcgcattggcgttccttgattcccttttcggtacaggttgcgtcctttatggccgtatactctccccactcgtgtacacacgccgtgctttcgggagtcttgccgcaagcggtgaaagtaaacaaaaacgacataaccgcgacaaaaattatgcttcccaataaaatccccgttttcttcttccaattcatatcttattccctcacactttgattatatccattataagcccccgcgactctttttgtcaagtcctctcgtaaaatttattatgaacttgtcaaacgtattatcctttttttccattttaaacccgttttctatcctttattttccctcgcagacgttccgattttttcttatggcaacgaaaaagacgaccgtttttttatagacgcggtcgtctttccgatccgataaacggcttatttcgactttttcctgcccgccgcccgccgaatcagcttggtgagttctacgaacggaagcaccgtaaacgccaatcccacggcgataaaatattctttaacgtcaatggcggcaaattcgaaagcggtattgacgcccggcacgtaaatgacgaacagcgtcaacagcagcgaaaaggcaaaggcgccccacaggtacttattctgctttttcatcgagaagatcgaatggtcgatggaacgcacgttgaaggaatggaacatttccgtcatggaaagcgttaaaaacgccatcgtcatgccgtcgccgctgacgtctccgaaattccatgcccaggagccggcttcgatgctatgcccgatccagtaggaaaggagtgtcatcacgccgataaatgccccctgtaaaacgacgttgattcccacaccgcccgcgaaaatcccctctttgtcgtcgcgcggctggcgcttcatcagatcgggttctccctcttccatgcccagcgccaaagcgggaaaagtatccgtaatcaggtttatccacaaaagatgcatgggtctgagcagcgtaaatccgagcatggtggcgataaacaccgcgatgacttccgcgagattgctggataacaaaaattggattgccttgcggatattgtcgtaaatgcggcggccctcgcccaccgcggtgacgatggtggcaaagttgtcgtcttgaagcaccatatccgcggcgcccttggtgacgtccgtgcccgtaatgcccatgcccacgccgatgtcggcgctcttgatgctgggcgcgtcgttgacgccgtcgccggtcatggcggtgatatatcctttctttttccaagcggtgacgatccgcaccttatgctcgggctgtacccgggcgtaaacggaatactgcgggatcttttcctcaaattcttcgtcgcttaactcatttaacgccgcacccgtgatcgcctgcgatttgtcggtgatgatccccagttccagagcgattgccacggcggtgtcgatatgatcgcccgtgatcatgatgggacggatgcccgcgtccttgcattcctctatcgccagcttcacctcgggacgaatcgggtcgatcatgcccgtcagtccgataaaagtcagatctgtttctatctcctccggctgaaactccgccggcacgttatcccgcttcttatacgcggcggccagaacgcgcagcgccttgtccgccatcgccttattggcgtcgagaatctcctttctcttttcctccgtcagcggtacgtcttttccgtcgacgcatactcgggtgcaccgttttaaaatttcatcgggcgcgcccttcgtgtactgtacgattcccgccgacgtttcatggagcgtggacatcatttttctcatgctgtcgaaaggcgcctcggcgacccgcttatcctcgccgtccatctgcgttttgtcaagccccagctgataggcgtaattgacgagcgcgcattccgtcggctcccctttcgcctctttgctctccccgtccaaaacggcgtccgagcactgcgccatcgcgcgcgccaaaagtttttcgtccgagccgaaatgatccacgacggtcattttgttctgcgtcagagtgcccgttttgtccgaacagatgatctgcgtgcacccgagcgtttccacggcggtcaggcgcttgacgacggcttttttcttcgccattttggtcatcccgagcgaaagcacgatggtgacgacggtcgccagaccttcgggaatggcggccaccgccagcgatacggcgatgatgaagctgtccaaaacgacctcgaacgcgaagctcttttcgagaatcaacttgaaaacaaagatgaagatacagattcccagcacgaggaaactcaacaccttggaaagcttgttgagcctcttttgcagaggcgtcacttcgtttttggtctgcgcgagaatgtcggcgatcttgcccatctccgtctgcatccccgtggcgacgactaccgcctttgctcggccgtagacgacggtgctgcccatgtataccatattttttctgtcgcctaagggaatgtctttcaaatcgccgagttctagtttctccgcgcgcttttcactgggaacgctctcgcccgtcagcgcggattcttccgcttttaaggaagcgcattccagcaggcggcagtccgcgggaacggaatcccccgcttcgagaatgacgacgtccccgacgacgacctcctcgcttttgacggcgacgagctgaccgccgcggatgaccttgcaggtggaagcggtcatttcctttaaggcttctatcgcctgttccgcttttccctcctgaacgactccgaggacggcgttgagaagtacgacggcgacgatgatgatgaattctgcgaaagattcctctccgccgcgggctctctcgacgatgacggtgacgagattgacagccgccgcgacgagcagaacgatgatcataggattgacgagttgctgtaaaaatcttttaaagacggaggttttctttgcttccgcgagcttgttcctgccgtttttttcgaggcgggatgcggcctcggcggcggaaagaccgtcgggcgaagaggaaacttcttcaagcacctgcgaagtttcggacagatagtgtttcatcgattgaatagataactccttgtttattttatcaaaaataaaagccccatacaccatattattgccgattttcagacaaataatatagcgcatgagtctcattctttcaaacagccccagacggagagcgtatcgccgtcgttattgttggaaccgttacgcctttcaggaagacgcaaactactccctcattctgctttttaaaagcttataaaaacagtatattccaaaacatcagatttgtcaacgatttttatgtaaaaatcaagcaaaaatattttcactctcttccgctttcctttataaaactttttatccgatgactcgcactccttatttttcgttgctttcccgattttttcttgccctctcccgccctttttctctcttcttcttttttactctctcttttctccatttctttatgtccctttttctgttgcctgcttttcgtttctcttcctgtttccctctcttttatctctgacgacttcctcgtccgcctttctcccatgaaaaaagagcggcaatcttaccgctcgtttttcttttcggtttttgctcacttgactttatatttatcgtaataaggctttaaaattcctttatatttttcattccaaggcttgttccgcccgagatagtgaataatcttcgcgttttcgtccacccaaccgagcttaattttgtccttgcccgaatgcctgcgattccagccgcgaattttccgctcgttgagattgtagacgtaaccgtcggcgatcttgattttatggccgtacagggtagagatgacgtcctgatcgggcaatgtgaggaaaaacttacgcctgtcgatgtaagaaagcacttcgtcgtgactctgttcttggcgcagtttttcgagattcatcaaaagcacgcccgtgttgacgtatacggtgttcttttcagctccgttttttacgcggataaaccattttaagaaaggagaatgcacgttcgtcgtcgccacgaaaaaattatcttcaaaatcggtattgtaaaagtccgaaatatcccctttgacgataatatcgctgtccatatacaaaacgcggtccacgctttcgggaaggtagcccgcggcgaaaatgcgatagtaaatttctttcggccagcgccgttcggtaggcgccccttcgagaatatcatcgcagaaagcgacgggacagaccttgacccggtcgggaatataggcgcgatattgctcgatgtcctgctccgtgacttctttggtggcgacatatacggtgtgttcgccgggattgttgtccgcgaaagaacgcaccaatgccgtaaagtagggcagatattttttattgatggcggttaatagattcataaaaacattcttcgtccgtttaaatagacaaaaggagcactccttcaaaattcatgaaaatattgtaacttatttttgaacacttgtcaacctttcgtatgctgtttctcataaaacgtaattttttaacatatttcttttataatgcgctgtcaacctgctgtcaagtataccatagagttttttttatggtatactaatcgcatcaagacaagcgaatatcaaaagaaaaaacttatatctccatgaagataattttacaattttgattttttttgtgatattatataagaaagttaaattttggaggaaatacaaatggacgaaaccaaattgagaatttgtcaaaactgcgtttattatgttccctattacaaaaaatgtataacaagtttccgaaacgcttattgcggtcggtgtgtcaacgacattcaaagaagaaagagaaaaaaggattacagtagaattttcgattcggagaaagcctgcgaattttttgaagaaaaaaatttcgcaaaggaaagcgccgaggatatacgcgccgtaatggaagctttacccgaaattgccgaaaaaatagtcggcatttatgaaatattaaagaagacgcaaaagcgtcgttaaatattccgcccgcgctttttataaaaaagc

SEQ ID NO: 3724 - DNA, 10724 bp, Unknown
  16S sequences of unknown bacteria
ggattccgatttgcgactgccctgcatcagctgcaggtagtcgatcatgataattccgagattgtgctccagcttgtattttctgcatttgctgcgaagctctgagacagaaataccaggcgtgtcatcaatgatcagattcgaccggccgatcacaccggctgcttcgatcaggctggaccagtcattgtcactcaaatttccggtacggaggatctgggaatccaccctggattccagcgcaaacagacggtttacgagctgctccttggacatctcgaggctgaagatcgcgactgtctcattgctgcggaacgccatatattctgcaatattcaacacgaatgccgtctttcccatagaaggacgggctgcgatcagaatcagatccgacggctggaagccggatgttttgtaatccagatcgataaagccggtcggcattccggtaacgcttcccttcatccggctggccgcctcgatcttatccagcgcattgagcaccacgtccttgatcggaacaaattcatcatttgtctttcgctgcagcacctggaaaattttcttctccgtgtcctccatgatctcctctacgctgtcttttcccgcatagcacgccgaggcgatttcctcatttacccggatcagtctgcgcagggctgccttctccgacacaattttcgcataagtccctacattgacagaggtcggaaccttcgtaatcatatcccggacaaattccagactgctgatctccggcggcacatccttctccttcagccggttttgcagggtgatcagatcgaccggaacattctcggtatacagttccaccatcgcttcaaacaaaatcccgtactgcttctggtaaaaatcatctaccgtcagaatctccgaagcaatcgtgatcgcatcccggtccatcagcatcgcaccgatgaccgactgctctgcttccacattgtttggcatgacccgtttcagtaattcatctgccacaatctatttcctcctgaacaagcggaaatctgctccgttttgttatgatctccgccgtaaaatataaccagactgcgcagtaccctgcaaagtctggttattccgtgttgctgcttatccctctaccacatgtacccgcatcttcgctgtcactttggtgtgcagtttgataccgatctcggtgtagccaagtgccttcaccggtgcatccagtaaaatctttttcttatcgatctcatagccgagctgctttttgatctcctctgcgatctctttcgtcgatacggatccgaatacccgtccgccttcgcctgccttgacggaaacccggatctctttatccttcatctcctcggccagcttttttgctgcctccagattttcctttgcgaccttctcttcattggccttctgcagcttcaggtcattgatgttctgaccgtttgcctctttaccaatcccctttttcagaagcatatttcttgcatatccgtcgctgacatttacaacatcgcccttttttccaagtgcctttacatcctgtaataaaataaccttcataattaaatcgctccttctttcgtcatctgtgtcagtacttctttcagcttcacccttgcgccctccagatcggtatccttcagctgtgcaccggcaatattcatatggcctccgccgccaaggcgctccataatgatctgaacatttacctcatcaatcgcacgggcgctgatataaaccttcccttcatattcggtcagcacaaaggaagcctttacaccgacaatattcagcagctcatttgctgcctgcgcgccgaccaccgtcggactctccagaccttcgctcggacagttgctgatcgcatagcagcccataaatgcctctgcatgccggactgcctccgccttggccttgtaagtatccatatcactgcggaacgccttgcgcacgcgcgtcacatccgcaccatatcttcttaaaaatgctgccgcttcaaatgttcgcattccggtctttgccacaaaattgttcgtatcgatgatgataccggcatacatgcagtccgcctcatacggtttgagcttcgtctcatcgtcgtagtactgcaggatctcggaaatcatctcacaggctgaggatgccgacggctcaatataggacagcgaagcattctctatcttctccgttccctgccggtgatgatccagcacaacgatcgtcttcgtcagatacagaatctcctcgcactctacgatgcccggacggttcgtatcaactacgaccacgaccgtattctgattcgtcagctcgattgccttctcgtgcgtaatgaaaatgttctcataagcctcatcgctggacttcagcatgttgacccacgggcggatactgctgttgatctcaccgagcacaatatacgccggtttatcgacctgcattgctgcgcggcaaacaccgacacaggcacctaaggaatcaatatccgtcatctgatgccccatgacaatcacgcgttcccgtgaagcgatcatttcacgcaacgcctgcgactttacacgcgcccgtactctggtatttttctcggaatgttgtgtctttccaccgaaaaatgccatcttgtcatagtctttcacaacggtctggtcgccgccccgcgccagcgccatctccatcgccacacgggctgcttcataattctgtgcatatccgccacagttcataccgattccgatgctgaccgtcactgcaatggaatttccgatgttcaccgtcttgacgtcctccagcactgaaaagcgatcctcttccatcgtgtccaggctcttgcggttgataacgagcaggtacttatccttttccagcttcttaatcagcccgtccgccgtcgcaacatacttcgtaatccgtcgatccacgagcgcttccagcatggatctgcgcacttcctctacgctctccatcacctcatcgtaattatccatatacaaaagcccgactaccggattctgttcgtaagtctctttcttatactcggaaagctctgtaatgtcaaacaggcacagcgctactgcgaaacaggaaccggaaatccgctccaccactgcactgtcgtcaatcaactcttcaaacgggatccgcttcatgcacacgcggtaccttcgccctgcatgctcgatctcaacctcacgttcctctgaatccagcggaaaatgtgctgagttcagctgcgaaaaaacggcagaaatatttccgtgatagctgtcgctctttccggtcagctgacacatcgcatcgttcatgcgcagaatctttccgtccgcctgaacaagactgtacggaacgacgaattccttcagcatgtcccgctcaatctcactgtatttccgtgaaaaatccagcagctctgcaagcaccttgggccggtaatacacatccaggccaaggatggtcaggtataccatcaccgtaaagcctccgacaattactccggctaatgtattaatataaagtaccactgccgtcagcacgagcagcatcagcgtcagaaaaatacaccagtaccagtgacgcatcagcttaccactgtacttcatctgagatttattttttgatatatcatgatccatctcgtcgtcaaccttcctgttttgtgtattgtgggtgggtagctgcctatgttttctattccggacgttccgcacaagccacagacccgcttgcttcgcaagcgattcgctacctcacccggtagcttctgtctgtggctgaggggcgtcccgcccctctcagcctggctcacacagcctccggcaaataaatttgcctccacctggctgagccaagctgccttgtgcggaactgttagggttcattctaccacactctttaaatgaagaaaagagttttatgcctctatcatgttccggatattctgcatttcttcatccagagcggagatggcttccgcacagacgcggagtcgctcggtgatgacctcctcattttttacatccttcttataacgcagcttatgatccacacttgcccagaaatccattgcaatggtgcggaactgtacctcgaccttcacaaaggtctttccctcttttaaaaataccggaacctccagaatctgatgcagactgcggtagccgttcggcttcgggttcttgatgtaatccttcgtgcggatgagccgaatgtcgtcctgcttaatcagaagatccgataaatgataaatgtcctcctgaaatgcgcagactacccggattccggccacatcgtaaagattttcctcaatcgtgcgttccagatcttcctcgtgaaactcatagcccctgcgcaccagcttctccataatactctccggactttttaagcgactctctatcgactcaaacggattgcgatcatactgaagtgaaaattctgcattgagcaccttcagcttcgtctccacctccatgattgcgcaccggtacttattcatcatcttcataaactttttcccggtctccagcagttctatataacgatatatgtctgtacctttaattcctgtctccaattccttaccctccaatataatgatgccagggtcaaaagcctgaaaccacgatgtgcttgcacaggagtggttttatggcttaatgacccgccccgatatgagcataaaagtggagcgcaagcttcacgatatgcgaatattgggcaggattgtgggagtacgaagtacggaacaatccgtaaggcatcttttaaccttaatacaatgatgccagggtcaaaaagccgttcatgcttgcatgataaggcttttgaacttgggatccgtcaaacatgagaaaatagcgatttacgtagtaaatcagcggatttcgaatgtttgcagaattgcgggggaatgcttatctgcgttcatcctctccttatactataccacaagaagaagggactgtcactcaaaacccgagcacagtcccgcttctccaccttcctcatttccgattgtaaagcaccccgcttcgtgctctgcgcaccttccgcggcgaaatgcttattctatatgcgtttgcatccagcttttccgacgcaaagccaatccaacacctgtggcaaaaatcccggctgaaagaagcagcacgagcagccattctccaagcggcgtcccatctccggtcttcggcggtgtcgcgtgatctgactcctttacattctgaaccttctgccgcaccttcacaacctccgtatgatcatcctcatatgcaaaacggaccttatattcctgatcgtccttctgataacctgccggtgcttttgtctccacaagggtatacgtcttttccttcccggcccgcccgtttgcgaatgtcgcgatctccagtacgctgctgactgcttctccgtttttgtctgtcaccagctcctccagtacgctgccatcttcatcccgcagttcaaaatgagcaccttccagcagctgatctgtctttttgtcacgtttttcgattcgaagctgtcccatggcatgtttatcaaacatatgcaccggctgcacttctccggtattctcgaccgtaaacgtcacatcctctgcgactacatagccaaacggtgccgtctcctcccgtaagatatacgcatggccgggctccagtccccggatactgtgtagcttctccccggatgtccatgtatcaacgatatgctcctgctcatcaaacaccgtcagcttcgcccccggaatttctgcgcagtctgtcacatcctgcttcgatatctctaccgtcgtctgtatatcagaaacggtcaggtacataacattgcttccatccggatccacggtcagctccagctcttctctttcactgatctgtgctgccactttttctggtataccggctccaagatcaattttcaccggcgtttcgtcctttacatagcccgcaggagcctccagctctttcacataataaatcccaagtggcagatctgcgtcaaataccgcttcgccattcgcatctgatactgcagccgctatctgctgatccttcccgcagagcacatttcccttcgtatcacagagtatctcccctgcatataaaccaaattttccaccgcccagtggcttttttgtctcgttatccacttttcggataccgattttccaccgtctgcggatattttcgatcgctgcccgcttctgtacgactgcctgcttcgctccctcgtatgcaagacatacctgcacgccttcggactcctccaggtaagcatccggggtattctgctcgaaaagtcgataaaggccaagcggaagacgttccaagctgccgcttcccgcttcgtctgtcgtgatctctgccacctttgtaccttttttgtaaagcactctgcggttaccctctgcatccttctgcccatccggcgtcagaatatcctcatccgccacgatggaaaatgtgatattctccagagggagcgccgtataggcgaagttatccacaaacccggtcagcttctctcctgttttcaacacttcgatgcttccatccacaggttcatctgccatttccagctcgatcagcggatcaccgctgacggaatccaaccgataggccatatcatcggaaatcataaattcaatcgtttcctccgacagcacatatccctccggagcttctgcctcctccagacggtacttgcccggtccaagcttctccggcatggtaaggtttcccgtctcatttgtataaaaaatgctgatccgctcactgcccggataggaggctgcctgctccacataggtttccttctgcttgtcccagatacggaagccagctcccggaatcaggatcggctcctgcgtccgcgcatcctttttcgtgattttcagccggaccataaacaaatcatccataaatatctgccatggctgcggttcgttcggatgatgttctgaaatgacaactgtaaagtccttcaccggcctgtgctgggacggcaccgtcgtctcccggaacagataggtaccatacggcaacgcgatcgtacacagatacccccgatcatccgtaaacagctccgtctcgccctgactgccgagcacgaccggcgcaattccttccgtcacataatttccggccgcatccttactcagatctgaaagcagccacgcagtgaatcctgctgcgggaagcggttgcggatttgtactgccatcatttgacaccttcaaaagctgaaatggttgctttttcacctgatcagcgactgtcagctcacatcggatcacgccatctgtatccacttcctgatcggctgcaagctttacttcatattccgtttcatcccgcacatatcctgccggagcctccagctcttttacataatagagacccggatataaatctgtagcccccgcacgtccggagccatccgtcgtaaggaccgtcacctgatctcccgcacggtagatcacgccgctctttccatccggatgtacaatgtctcttctggcaaacagtccgtactttgccccttccagagacgcatccccctgcgggagcgcttctgccgtctccatatccaccttctgaagccgcaaagaagctctcagacgtttctccatacactcagctgtcatttcctgtgcttccagctccggatgatcttcaaaagaaagctcatatttccacgctttatttaactgatagccgacaggtgccgtaagctcccgcacgaagtaacggtatccacacggcagatccgcctgaaatgctgccaggccattttcatccgaatgcgccgtaccaagcaatgtctgcggctgtatcagcacgtctccgttccagtcccggatctcctcctgcgcaaataccccaaatgcagccgcagcgactccgttctttgtctcgctgtcctttttgttcacctgaagcgacaggcgctgacgtcgattgcaaactgtcacgggtgtcaccgtcacttccttcctctgatcttctgtcttcaattctaccggaatctttgtaccgtcgctgaccatatgagacggtgcgcttttctcaatcagatagtagcttcccggataaagccttccgcttatcgcatacccgtcagctcccgttgtcagtccgccctcaacgagcgcatcctttccgtataccgccacacctctctcattctttatggtatctgctgcatacagatcaaacactgctccggataacgcccgcacctcataacgaaacgtcactccatcgtcacggatatctgctcctgtcagcaattcaccctctttcttaatctgaagctgcgtcatctgtacctgatcgaccagctccagctgcacctctgcctgtgcagatacctgaaccggataggctctctcatccacacaatagcccgcaggagcgctctgctccttcacataatagacgtcctgtgtcagctccagatcctttaattccgctgtgccgtcagaaccggtcttcgggaactgcgccacaagcatactgcaggcttcatccgcgtatagtccatacacggcatccgccacccctgcctgatccctcgcatcttttttccgcaaagacacaccaaaatatggcgtatacgcagaagcagtcaccgtgcgtgcttcagggtgtaccatcgttgtctcatccatcgacaggtaggtaacatactgacgctttacactgctgttcaccggcacataccaccagcctccatactcctcacagctcacctccagagtcgctttgatctccgtccgctcccggctcagcttccggtatgcttcatccgtcgctgtgaaccaaaatggtgacagcagatctccttcctcctttttcgcaatgctcacgccgtccggaagtgtcccctccggcatcagggcagcatcgataatccgatccggcagattcgaagtgcagacaaactctgcctgtgtccgccaggtcccatctgcctgctgcacccacgtatcctgcgtcgtcggagaaatactgcaggtcacttccatcgtctgattattgtctgcactgacctgtgtcgtatctgcataggcatcttctaccatcttgtaggccagattataaaccttcgtatccatcgattttttcagcttcttctcgatcgaggtctcccggccctgctgacagttgatgatatgcaccgcaatctgtgtgatgtagtaatccttcttccagtcaccggcagaatacctggaattgtatgccgtactgccgcgataccggcagccattgtacaggcagtatgtaatctccttagaaaaagggccgtcgcctgacggcttgtatgtctcattctccggagcctctctcgtattgtaaacacagtaagctgccacggtcttgccgcccgtgctcatcccatgattggtcacatatttgaaatagcacggaaaatccagataatgcaggatcagcgactcatcccttttcaccgtcggattccccgcccgtcgcattccggacatcccaagccgtcgcatcggcccatcctgccagtattcatagaaatccggaagcgtttcctcgctctccttttccgtatccggctctgactccatttcctcggatacatccgattcagattcctctttcccggtctcatctgattctgatgtcattttctcagctatatccaactctgactccaccttcccggtctcatctgattctgatgtcattttctcagctacatccgactctggctccatcttcccggtcgcatctgattctgacgtcattttctcggtcgcatccacactcattgcatctttctcatttatatcagcgtgcccgtcctgaacgttctcatctggtatttcatccgcatgatttgtccgctctgactcctgcggcattttatccagttcactctccgcgcttttatccgcgtcggagccgcctgaagcatgcttacctgtatctgctatttccaggctgtccgtctcatttgtagttatgtctaaatcctgcgcttctgcattcactccataaaattccgcagatctctccgttgtctgtacatacccctgctctgccgcatttacatacgatgtcaccggcataaggcacagcattccggccgccagcatcccggcgaggcccctcatcaatgtctttttcttcataaatccgtcttccctttctttttggtagcacaaaatcatcccagaccagagaaaatctccttctctcttctgcgaaaatcttgtctgaccatttgcttacagggaattttgcgtatgccagagatctttagatgttacatgtagtttatcactttttgttagatattgcaagtatttttatataactatttatttaaaacaatcatattgtttatggcttatgtgatgcacggctcaaaaaatcatgcgtttcatgcttgcataaaaaagaagcactgaaaaataaccattaggaaatgcttgaccctccatggatctggcgataaaatgatgccaaagtcagacagatattttccctgtcatttcatcctttgctgtcataggatgatgatgccagggtcaaaaggtcatgcatttcatgcctgcatgaaaaagcatgacttattgacccgcaaaacaccgaaaagtagccatttttcgtagaaaaatgagcgaatttgaggtgttttaggattgcgagagcatgaaatgcgaagcaatccgtgtatcatagggg

SEQ ID NO: 3725 - DNA, 5412 bp, Unknown
  16S sequences of unknown bacteria
aactcgcggccctcgccttggcaaggcgatgctctaccactgagccattcgcgcaaatatagtgtgttgcatttagtacgttagttagtttaacataccattactgttttgtcaacactttatttcactatttatattaattttcaaagtcctgttaatttattgtaaataacatattagcatgatataattttttataggtaaaattatctactattttaaaggagggtttcaaaatgagctacaaaaaacatttcctgtcaattgccctttccgcggctttggtaacttcatgttttacaaccgcatttgccgcagaatcgacattcaccgatgttgacccacagaacagcgaggccatcgtctatatgactgaaaacaagtttatatcgggaattgacgaaacaaaattcggcgtcgacatgcctgtttcacgagctgaggcggtagctgtgcttcaccgtatgtcggggcttgccgaagcggtatcagaagtttccttctccgatgtaacagaaggctctgactatgcaaaggcagtagaatgggcttctgcaaacggaatcgtttccggttattccgacggcacattcgcacctgatgaaactattacaaaacaggatctcgtttctcttctctatcgttatgcagtggctgacgacgcttatgtaacagtaggcaattcttctgctctcggaaaattcaccgacgccgataaggctgccgattatgcttccgaagctcttatatgggcagcggacagagaaattttaacaagtacagacggaaagcttaatcccgaaaaactggtaacccgttcggagctggctgtgcttgattacaattatattaagacattgccggttacaaaaactgtttccgtagcgtcaacgcttcgttctgaagctcagattccagcttacgtaaccgttcctgtagattacaatgcggaaaataaatatccgatggttattttatgccacggacacggtggaaatcataacgaatggggtggatttgacgtaataacaaacggccttgccgataaaggtattatttccgtaacccttgactatcccggctgcgatgcaagtaaggaaagtttccagcttaacactatgacaaatatgaaagccgatacgcttgacgttatcaactatatgctttcaaactacagcgttgataaggataaagtcggtatcttcggatactccatgggcggacgtatagcgcttgaacttctttccgacaaagcttttgactttgcggcagttgaacttgtggctcctgcagaagacgttacagacctcaaaggccttttcggcggcactgaagcatgggaaaaaatgaaaaccgaagccaacgaaaaaggatttacagtgtacacaacaatttacggacaggtgcaggaactcagtaaagagtggtttgccgatttagaggcagttcccaattgtcttgccgaagcggcagctaaaaactataaaggaagaagccttgtagtatatgctgtagatgatgaagcggtttctcccgaggtttcaaaagcaacagcggaaatactcggttcaaaagttgcggttacacctgccgatggacacagctatagcttctacggtacaaatcccaaaacaataagaataacaaacgacggttccgtcaacttctttgcagaagaattagttaaataaatcgccataaaaatctaaaaaataactctatgccgaaaatagcatagagttatttttctttaaaagtcgtatccgatataataattttctcaagtattgttttttataccgataaattatttatgtattctaacgtttttttcacaaattctttgtcaagctgcgttttatccgcataccaaatattactttgacctgctccgacgccgtactttttcttctgcattggtcctttaggtacaacataattcctattcttccaatcaatcaatttgcagcctatcgcctttgccgttatgttatactctcttccttgatatcttctgcgttctctgtatacggttgcattttcataccaacctacaactatatgctcacctttaggcgcttttgcaaaaaaaatcactgttactccgtcaacggcttctttatttttaaattctccgtctattctttctatccgtattcttctgggcttactgtattttgctttatagccgttggagtgtgaagtttcgacaaatcctcggcaaagaccgtcagagcatacaagaaagttatatttctccattgcgtcattttcttcgtttacatatcgtccgccatttataggtgtatcagtttctgtaattccactataatatttcatatatgcaatattgcaaaaaagcactctgtttttgaccacgttttttactcctttcaaaaataatcggttatctatacggttgtatattaataatcttataggtaaatccgttacatttaaaaatatcgtttttctttttgtctaaacacagtctggctacttgtgaaagttcagcgggagatctttcaatattcagatcgattctttctttgtcttccaaacaatacagtataaccttgtctccatactccgcaaaaatccctcttttatctctagcatatttattattcttacattttttagatttttgtccttccgtcgaagacttcttatttgtttttttatttttttccgatgctatactcttcttgttattattttttcttttttcaaatttattatgtttcccaaaatcatattcatcggtcttattatttttatggtgctcatctatatatcccgcctcaagtctgttctcaaaagtttctctggctaagtaacctacatgccatggtactccgctcattcttccagccacttaaaccaactccaaattcgaatcacatctatatcgtttttgctatttcggtaattttttctattttatgtatttggctatgttttatctaattatcataatctccaagttctgaatctaatattttttcggaaaattcggtgtctaagctttctacatttttaagtttcctttgtatagcccttgtacgtacgcctacaagtttgtccaattcatcattagccttcaaaagtttatcctgcgtagattttagaattttttcaaaattgttaaattccgtttttacagcccctaaaactttccaaacctcactgcttcttttttgtatggcaaaagttttaaatcccatctgtaagctgttcaataaagcagccatcgtgcttggtcctgctatattaactctgtaaacattctgcaattcttctaccaaacctctgtttaccacttcagaatacagtccttcaaaaggcaaaaacattatggcaaaatcagtcgtattcggtggatcgatatatttatcacttatatccttcgcttcactttttatccttctaacaagttctttagctgcattatcaatatcaatcttatttccgttttcatatgctttaacaagattggaatatgaatcccccggaaatttagaatccacaggcaaatatattccacttccgtcatctgtaggcaacttaatagcatattctacaggttcttttccgcctttctttgtaataaaattagttttatattgttcgggagctaatatttctgacaaaatagctcccagttgtatttctcccaaaatgcctcgcgtcttaacattagaaagtacttttttcaaatcgcctacgccggtagcaagactttgcatttcaccaatccctttatatacgtcctccaaattcttatttactattgcaaaagattttgttatcctgtcttcaagtgttttttgaagtttttcatcaacaatcccctgcattttatccaatttttcattattatccttttgtaagtcgctaagttttgtctctaccgtttttcttatttgctcaagttgctttccactggcttcagatgatattttcaatctattgtcaattttatcactcatatcggaaagcttaatttctaaattttttcttattccctcaagtttattttcattttcaaccgcagatgtttcaagtcttttttctattgtcagaatctgattcgtcatagcattgttcatactttcaatatgttttatcgaagtgtcgccgttattttttataccttttgtttgcaaatcaaaaagagatttttgattttctatcatcatattcccaagagaatttatcgttctttgcatatcatccgatacttcttttcttagaatagtattactgttttcaaaatcgtatttgaatttttcaagtacggaattttgtatattttcatccgttttgtacaaattattccgaaaaagatttttaataaccaatggataaatacaaagcaataaaataataataagtaataaaaaaacctccattttccattctcccttcataaacaaaaccattgcacctaactatatagtgagtcattaaatcatgaattactatatcttcattcattatatataattgccttagaaaagtaaaggggtctttctatggattatggttctctatgtcttaaaatcaatgatatattaagtgaaaaaggtataagtaaaaatcaaatttgtagggatctcgacataccacggtctaatttcaacagatattgcagagatgaatttcaaaggttagatgtcggtcttatatgcaagttgtgttggtacttggacattgaagtcagcgatttaattgtttacaaccgacctgaaaatcattaggatattaaaagtatgataaacataaaacagcgacagaatatatattctgtcgctgttttatgttttaaataagtcaacttggtttcataaataaaaaagtgcccagaaccggaatcgaaccagtgacacgaggattttcagtcctctgctctaccgactgagctatctgggcataaactttttattaagttacaagcacgtataaaacgtgcccgagaccggaatcgaaccggtacgggtgttaccccgcaggattttaagtcctgtgcgtctgccagttccgccactcgggcaaaatggttggggaaggattcggaccttcgaagctatcgcaacagatttacagtctgccccctttggccactcgggaacccaaccatatataactccgtgagctctaaaaactgaacagcatatttttaaaccattgtctccatagaaaggaggtgatccagccgcaccttccgatacggctaccttgttacgacttcaccccagtcactggcttcaccttcgactgctcctccctttcggttaggtcacaggcttcgggtgcttccaactcccatggtgtgacgggcggtgtgtacaaggcccgggaacgtattcaccgcgacattctgattcgcgattactagcgattccagct

SEQ ID NO: 3726 - DNA, 32759 bp, Unknown
  16S sequences of unknown bacteria
gtccctgcgacgattgagtggcagcagtgcctcctgcacctccacttttttgacacactgacgcctcccgcaggttcttcctgcgggaggcgcttttcgtttccgtcagccgttgccgcccagctgcgaatcatacagcaggtcttcgatcacgccggtctccacgttcacatccgcccagtagaccccgtcccccggagtaaagggcgggaaagcgctggaattgtcggccggacgctgctgcaggctgagcatgatggtcagcaccggcttgccatctttcaggtgataatacaggtagtcggcggtatagtccgccatgtcctccagctcaaagacgaatttcagcattttcgcctgatcatcggtgagctggtaggcgctgaccactgcgtcatgagccaatgcgagcaggtcttcttcgctgtaggaagaagccttggccgccgcgagggcttccgcttcgccggtcttttcccacgcggagccttcgggcagctcgccggaggcggccttgtgcttcgcggcaatggccttcgccttttcggaaaacgcgctgaggtcgtggcgctccgccgccgtgcgcagcatttcctccagctgctccttgccccaggcttccgcgtcaaacaggccggaggtgctttcgccgtcatggctccacagggcagcggcagcgccgtccttcacggagaccgtatattcgcccagcacgtcccgcaggaaatcaaagctggaatagaccaccgtcgcgccgccgtccgccgtttcggtgacggtgcggctaaagaaggtgctcagcatgggttccgtcacgccgtaggtatccgccacggctttttcggccagctttgccgcgtccactcggctggaaaacaccagccccgccgccagtgcggtgacgctgaggcagacgatggcggcgatgagaatcaaagtcgtagacagctttttcacaggtcgttcctccttacggacggcttgaagcaccgcgcggcgcttcccttcgtcccagacgagcccggaaaggttctggtcgacgagctcctgaaaatcaaatttcttcattgtcataccactccttcagcctgtcccgcaggatcgtgttcgcccggtttaagcgggaacgaaccttgccgtccgacaaccgcagcgcgcttgcgatctctttcagcttcagccccttgtaataccgcagcaggacgacttcacggtatttggcgggcaggcccatgacctccgtcagcacggtgccgtccgggaaggcgaagtcggcgggcttttcgggcagcgaatcaagggaagtccggcttctgtggcgaaaccacgggttgcgcagcatgtcccggcacgtgttgacgcagatggtcgtcagccacgtcttttccgagctttcgccgcgataatcccctaaatgccggtatgccttgaggaaggtctcctgcacagcgtcctgcgcaagggatgcgtccttcaggtaaagggcgctcatcctcagaaggctgctgccgtactgctccatgagccggtcaagctccgaccggctgtccgacggacattcgtaaggcacagtaccaactcctttcacctgtatagacggagcaaagcggaaaaactgctggaaacggcgaaaaaatttgggggagggggagaaaggggcgcttcatcccgccggagggaaaacaaaaaaacaccgccgtcttcgggacggcggtgtattccgttgcgtaggaatcagtacttgcgcttacgtgcagcttctgctttcttcttgcgtttcacgctgggcttctcataatgctcacgcttgcgagcctctgccagaacacctgtgcgagcacattgacgtttgaaccgcttcagagcgctttccagggattcgttttcgcggatgcgtacctcggacacttgttatccctcccctcgctcatcctgcgtatggcgacttcatacaatagccgccagcagttatgaatctattatagcgcgtctgccggttcccgtcaactggcatttgaaaactttttgaggggtttacaccttggtcaaaagaaggagccgccgcagaggggaaagaaaatgatgctattttatcattttctctttcagccgggcgatgttccgcaggggctcgtcgatggcctcgccctgagtctcgttccagtcctcccggacgatctcgatctccttctgataaaattcgatcgccttttcgtattgcccctgaatttcatacagctgggcgatggcgttgaccgggtcggtgaagcggggccggggcgaaagctccagcgccttttcatacagggcgacggcctcggcataggcgcagcgccgggccatccggtcggcccgggcgaaccagctgagccaagtgtccgggtacttttccgtcatgccctcccagcaggctgctgcttcctccagcctgccctctttttcgaggatcatgcccctgtacagatcggaatgatagcttgtttccagccggtcggccttggccagataagcccgcgcttcctcgcagcggccgtcggcgatgagcagatccagcagccagaagtacgccctgcgctgggacgggtgacgggcgatgaaatccttgtaaaactcgatggttcggtgatgattgacagcgttccagtccgggaacacgccgccttccgcctcgaacagcgccgtgtgggcggccttgtcatattcgggcagcagctccagcgccttgcgggccagcggcgaggccagctcccggtattcccgggcgcgcttgcagtacagctccgccagcagcagcgtggcccgggcctgcgcgtccggctccagacatttgtccttcagaaaacgctcctcggtctcaaattcctcccgggacagaaagcgctgatcccagagcatattgtcgatgcgctccatccgcttgtcgtccgtcatggaaaacagcgcgtcaatcgaggtgcccagcagaatggaaagctcgggcagcagctgaatatccggcagggtaacgccattttcccatttggacacggcctgaggactgacccgaagccgctgggccagctgttcctgcgtcatgcttttggaaaggcggagggtcttgatccttccgccgaaatcaagggtactcataaggaaacctccgtcatacaggatggatgttctgtccgggcccgggctccctgaacggctttcagtatagcggcaaaacccgccgggcgcaatgacccggcgggtgagaagggttgaatcccggttgttttactgggaaacggtatacagcgaatagaaatacccccggcgttccatcaattcttcaaaagaaccctgttccgcgatggagccgtcccgcagggtcagaatcgcgtcgtagcggcgcagcgggctttcttccagcgtgtgcgtgacgacgatgcgggtcatgccgcttaagtccagaatggcatgggagacctgatgagccgtctgcgcgtccaatgcggcggtggcttcatccaccagcagcacctgcgcgtttttcagaaggctgcgggcgatggagatgcgctgcttttcgccgccggacaggccggtgccgttctccccgcagagatagtcctctccgcgttcccgaatcagcccggaaaggccggacaggcgaatggcccgctctaccgcttctttcgggaaatccgcaaacagtgtgatgttttcccggatggtggcgttaaagatgaacacgttttgctgaatgacggagatcaggtcatacagagaggaacggcggatgtctcggagctcctgcccatcgtaaagaatctgcccggaatagccggtctgggaggcgctcagcaggtgcagcagggtggacttgccgctgccggatgcgccgacaacggcgtagcttttgcccggttcaaacgaaaaggaaatgtctcgcaaaatcggcttgtcatcttcgtaggaaaaagccagatgggaaagttcgatgccctgtgtcagcgaaccgagctgcacggagccttccggctccccggctgcttccagcgcggaggccgccttggcgatcagcgcccgggccgccttccgctccgccagacagacagggatgacgctgatggggctgataacgtagttcatcagctgtacgaaaagcagtaccgtaccgaccgtcagccccttccccgacagggccagcgccgcgcctatcagaaacacgcccaactgagccgttatgcccgccagactgcccatcctctgaatgagaatgccgatgcgttccttgcggcagcgggcgctggtcaggctgcgtacgctgtctgcaaacagtcggcacatctgcttttccgcctgaaaggacttgatgacggagaagccgcccagcgcgtccttcagcgcagcagtgcaggcttcgttctgatcggacagcagcttttcggccccggcggccttcccgcccatcagaagggaggcggtcaccggcagcagcgccagcaaagcggcggctagcgtcagcaggggactgtaccacagcatcatggcaaaggcacccacgaaaagcagcaggctattcgtcagggagaaaagattcgtcagacagcccttttcgatcacagaaaggtcgttggtcaacgccgaaaggtacagggaagagttttccccggtgaaagcggccagcgttttttccatcagacgtccaaacagagtttcccggtactgggccatggccctagtcagaaagcggggcttgaaaaagtaggaaaacagacaggagacagccgccccggccaccagccccgccgcgatgaccgccagctgacggagcgtccagcccgcgccgctgccgccgatcaagtccataatctgctgcagaagccaggagatcagcagattggccgcggcgctcaggagaacgtccgtcagggccagagcaaaatttagtcggttgccccggaaaaacgtccgggtgtagggccgcaggtcaggctgagccatagaggcagggtttttcatggctgatcctccttctgcgcttcttccgcgcaaagctgccgccatagggccagcagctcgtcgtcatggtctccctccgtcagttgccgctccacggaggccagcgccgattcgcccagatcgtcgtagacggtggcctcggagacggttcccgcacaaaatttgacgctgtccatccggtaggtgggggccgcgtcaaaggccgtccctatccggcaggcccgccggagccagtcctctgcctcctctggccgccccagcttccgggaaagatgggcgcactcggcgcaacagcaggccagaattttatccacatagctcacggcatccgggcccgtctttagggaatccagcaggtggtacagccactgcagcgcgtccagagcggacgagtcatcgccctttcgttgatagtaatagacataggccgtcatcagccgtaccgacagactggtcagatcgcccatcgcgttagtcagataggactccgcttcccggaggggatgacggccactgctcaaagtcagggcgatcagggcgttgtgaacgccgcagatgttggtctttttcagaatctccagcgcctgatccccctcaccgagcttgaggcagcactgggcgatatggtactgaatgaaaatatcgctgacggcggggtcggtattctgggatagcaggggaagggagcgctccagcagatcccggccccggcgaagccagtccggccggttctgctccagccccgccagctcgtacagggagccgcagcggtacacgacgcggaaatcgttgggatagcggcgcagggcctcctccgcctcggacacggcctccccgaagcgtttctcccgctgcaaatggaggagcctccgggccagcgcttctgcggagctttgctgcagctcgaagcccgccagcgcgtccagcgacacggaaaacaggctggccagctccgccatcaggcctaagtccggcgtggctacgccccgctcccatttggacacggcggcgaaggtcacgcccagcgcttccgccagccgctcctgtgtcaggccgttttgcttccgcagacggcagatattttgggcaagggatagcttcataaggaaatcctccgtttcctgcgccgccttgggcagcgcctgtttttaatgtaccacgggaaacaccgtgggaaaagatgaaattggtacagaaaagacagaaaattctaaaccgatggtacaattttgcttttcgggcggcttccgcccccggatgggccggtgcttgtacaaatttcctattccgtgtataataaagtgttgtcataggctttggcggatgctgcggccttcggactgcatggccgatgtgaggcacactggtatcccctttacggagaggagggaaaggcggatgaaagaaagaagaaaacggcttgccgctttgtttgcggcgttctgtctggtactgatgctgctgcctgttcccgcggtccgggcggaggatggaaacggatatacttacatagcgcctaccctgtctaagagcgcggacccctacgaccctgaaaagccggaggagctgagcgccgaccagctttacgccaaggcggccatcctcattgaggccaccaccggcgatgtgatctttgaaaagaacgccgaccagaccatgtaccctgcctcgaccaccaaaattttgacgaccctgctgggcgtgatgatgggcgacctttcacaggaggtcaccatgactgaaagtgcggcgcaggtggaggagggcagctccaccaccggcctgcaggtgggggagactatcaattttctggatctgctctacgccaccatgatccgttccggcaacgacggcgcgcagctgatcgccgagctgatctccggcaatgaagcggaatttgccaacctgatgaacgaagccgccgccatgtacggctgcaccggcacccacttcgccaacgccagcggtctgcacgaccccaatcattacaccacggcccgggatatggcaaagatcgctcaggccgccatgcagaacgacaccttccgccagatcgccaagaccttctcctataccctgcccagcagcaatgtgcgtaaggaacggacgatcaccggcacaaatgagaactggatcaaccccaatcaggccaccaaggacgacccggagggggtcaattcgacttattatcctgacgccatcggtatcaagacaggctacaccgccgccgcaggctattgctacgtgggcgcggcggagcgggacggggtggagctgatctccgtactgttctacaccagcaaatccggccgttggtcggacagtaaaaagctgatggaatacggcttcagccagttcgtcagcatgaccccgctggaactgtacaacgaaaatcccatcaccgtggagacatccggcttctcgctggacgatgcggacttgggccgtctgccgctggaggtgcgggcgcaggcctccacccgcacggtgaatatcatcggcaccaagagcgatctggaagccatggcccgcaacctgagccagaccgtgctgatcgagtatacgcgcgatttctccgcgcccattgaaaagggcgaggtcatgggcaccatgacctattatcccaccgacggcggcagccccgtggtctacgatctgatcgccgggcgcaccatccagcggcgggataacgcccccctgacgctggaggagatcgaggccgaggtgaaggctgatcccaatccgctgccgcccctgtccgtggagctggcgctggtggtgttgacgcccttcgccgtcattttcctcatcattcacctcatccgccgggcactgcacaagaccgggcggcataaaaagagccgggttccccggcctcgaaatcggtacttccgttaagaatcttgtaaaaacacaggagagggggagcggacatgatcgcacaggtcatcgttgacgtggtgcataccaatgtggaccgtcccttttcctatctgatccccgagggcatggaggtggagcagggcagccgtgtcagcgtgccgctgggcaagcgccgggtggacggctttgtggtgtcccttttggaggaagaccagctgcccgccgacgtgccgctgcaaaaactgcggcccatagcggcggtgctggacgattatcccgccctgctgccccagcttctgacgctggcccgtcagctggcggaggaaaatcactgccccctgtccgaaactctgcggctaatgctgcccgccgccatgcgcaccgggcgcattcagcaaaagaaggagctttgcgccgtgctctgccccggcgtggacgcggagaaggaggcggacgcgctgcggcgggcgcccaagcgggccatggtgctgcggcttttgaaggacggccagcctcacggggtcggccagctggcccagctggtgtccaacccccgggacgcgctgaaagcgctgggggagcagggactggtgacgctgaccgagaaggaggtcttccgggccccggatacggagctggagccggcccgcacggtggccccgcccttgaccgacgaccagcgggaggcgctggacagcatgatcccctcgctggaaaagggacagggcgcgttcctgctccatggcgtgaccggcagcggcaagacagaggtctatctggccatggtgcagcggacactggaaataggcaagggcgcgattattctggtgccggagatcgccctgaccccccagatggtgcgctggttccacagccgcttcggcgaaaacaccgccgtgcttcacagccgcctgactgacggccaacgatatgatgagtggcggcgcatccgttcgggacaggcccgggtcgtggtgggcgcgcgttccgctatcttcgccccggtggataaactggggttgatcgtgatcgacgaggaacacgaacagacctatctgagcgataagcacccccgctacgacgcgcgccgggtagcgaagcagcgctgcgaaaacgagggggccgcgctgatcctgtccagcgctacgcccagcattctttcctttgccatggcccgccggggagattacacgctggtggaaatgccccgccgggtgggcaaccggccgctgccgcaggtgacggtggtggatatgcgccgggagctggaagcgggcaaccgctccattttcagcgcgctgctcatccagaagctaaaggaatgtctggatggcggccatcaggccatgctgtttctgaaccgccggggctacaacaccttcgtcagctgccgaagctgcggctatgtggtcaaatgcgagcagtgcgacctgagcatgaccctgcaccgggaaagcccggacgaccccggccagctgcgctgccacctgtgcggcgcggtgaaggccccgcccacggtgtgcccggagtgcggcagtaagtacatccgctacttcggcagcggcacccagcgggtggaggaggagatgcacaggctcttcccgcaggtcagaaccgtccgcatggacatcgacaccacccggggccgggacgcccacgcccgcctgctggacgagttcggcaagggacgggcgcaggtgctcatcggcacgcagatgatcgccaaggggctggattttcccaaggtgacgctggtgggcgtggtggcggcggatatgacgctgaacctgccggattaccgctcggcggagcggacgttccagctcattacgcaggtggcgggccgggccggccgggcgcaggagcccggcgaggtgatcgtgcagagctacaagccggacgatccctgcattcaggcggcagcgaagcaggactaccgggcctttttcgaaatggagttttctcggcggcgggcgggactgtatccgccctttaccatgctgtgccgtctgctggtggaaagccccgacgaggccgaggcaaaagatacgtccgagcggctgtacgataccctgcagacctatcttctgagccacccagtgcagaagaaaaagacgctgatgatccgggcggacgaagcaccggtcaagcgcatccgggggcagtaccgctaccatgtgctgctcaagctgttcgaccagccggaaaccgcgccgctgctgcgtctgatgtcggagttgacggccaccggcacggaacgctgccatatttacgttgaagtgaaccccgccaccatgatgtagcgggcagagagtaaggagagattttcgatggcgctgaggaaaattgtgaagatcggggacaacaagctgcgcaagatctgcaagccggtggaaaaattcgaccggcggctgaaaattctgctggaggatatggcggacaccatgtacgacgccaacggcgtgggtctggccgcgccccaggtgggcatcctgcgccgggccgtggtcatcgacgtgggggacggactggtggaattggtgaacccggtcatcgtggagtcggacggccagcagagcggccccgagggctgtctgagcatccccggccgcagcggcgtagtcacccggcccaaccatgtgaaggtgcaggctcaggacgcggacggcaacgccatcgagctggaagccgaggagttctttgcccgggccgtgtgccatgagctggatcatctggacggcgttctctatgtggacaagatggatcgcgagattttggagggcgacgaggaatacgagccggtggacggagacgaagaggaggacggagaatgaaagttgtttttatgggaacgccggagttttccgttcccattttgcgcgcgctggtggaaaacggctacgaggtggccggggtctttacccagccggataaacccaagggccggggcggcaaggtgcagatgaccccggtgaaggaatacgccctttcgcagaacattcccgtatttcagcccttgaaaattcgcaaggacggactggacgacctgaaaagccttgcgcctgacctgtgcgtcaccgccgccttcgggcagattctttctcaggaagtgctggatgtgccgaagatcggcacggtgaacgtgcatacttccctgctgccccggcatcggggagcggcgcccgtccagtggacggtctggcagggcgagaccgtcaccggcgtgaccaccatgttcaccgatgcgggcatcgacaccggcgatattctgctgcagcgggaaacgcccatcggcccggaggagactgccggggaactgaccggacggctgtcccatctggggggcgaactgctgatcgagaccctgcgccgcatcgaggccggcgactgcccccggcagaagcaggacgagagccgcatgacctacgatcccaagatcaccaaggaaatgggcgagatggactttaccgagaccacggcgcaatgcgtgaaccgggtgcgggccatgagcccgtggccatgcggctacgtgaccaccgagaatggcgcgctgaaaatctggaaggcccgcgccgctcagggcagcggacagcccggcacggtgctgtgcgccgaccggaaaaagggcctgatcgtggccaccggcgacggggctgttgaactgtgcgaaattcaggctcccggcgcaaagcggatggaagccaaagcctatctgctgggccatgtcattcccgaaggacagaaattgagtgaggcaaagctatgaatgagaacgaacgccccgcgtccaacgccggggaaaaacgaagcgaccgccgtccgggcggcaagtttgacggccagcgccgtccctatgccgggaagcccgaaggccatcgccctgcccgtccgcagggagaaaacgcccggaaggacgaaaaacgtccctacggcggcaagcccgcgtccggccctcggaagtttgacggagaacgccgtccccagacttccggggatcgttccgaccggccctatggccggccggcttccggtaagccttcttttggtaagcccatttatggtaaacgtccttccggcccccggaagcctgccgcgcccgtccagcccagcgcccgcaagctggcgctgaaagtgttgctggatgtacacgaaaacggtgcctatgctgccttgagcctgaataagaccctgcctcgtgatttgaagcccgaggagcgccgcctgaccactcaactggtgtacggcacgctggaaaacgaagtgaagatcgatcatgctttgaaccagctgaccgagtatcccgcccgggacgcggtcactcgggacgcgctgcggctgggcgtttaccagatcatgtttttggagcgggttccggacagcgccgccgtggacgaatccgtgaagctggtcaagacgatgggcatggaagcctctgcaggctttgtgaacgcggtgctgcgcaacctgatccggggaaaggacgagctgtcctggccggacaaggaaaaagacccggaggaatggctccatgtggaaagctccacgcccttgtggctggtgaaaaagctcatcgaggcctacggcttcgatacggcgaagcagatgctgacctaccgggaagccagccatcccaccaccgtccggcccaatctgttcaagctggacgaccatggttttgaagacctgctccgtaaaaaaaatctgtccttccgggcaggcgtggctccccatgcctatctgctggagggcgtgaccgagccgggctttgacccggattatcaggcgggcctttattccattcagggtcagagcagcatgctggccgccgaagcggtgcaggcccggcccggcatgaaaattctggacgcatgcgcggctcccggcggcaaatccgcttatctgtgcgagaccatgcagctgacgggccgggtctatgcgtgggagctgcacgaaaagcgggcgctcctgctggatggtgttcgccgccgtttggggctggacaacctgcgcaccgccgtgaaggacgcctgcgagtaccggcccgatatggaaaaaacgctggacgcagtgctgctggacgcgccctgttccggcacgggcgtgctcagtcagaagccggatatcaagctgcgcctgaaggaaagcgacctgcccgccatcgtggagacccagaaaaagctgctgaacacggtgtgccgctacgttcgccccggcggtctgctggtgtattccacctgctctgtgctgccggaggaaaacaaggcgcagatcgaggccttcctgaaggagcatcctgaatataccaccgaacccatgcccctgtccttcccggcggagctgcgccagcagcaggacgcgctgggtctgcagctgctgggcttccgggatcaggtggagggcttctacatcgtccgtctgcggaggaactactgatgccggaaaaacggatcctgctggacatgacccccggcgagctgggagcctacttcaaggagctgggtcagcccgctttccgggccggtcaggtgtacagctggctgacccggggcgtgcccttttcggagatgagcaacctgcccaaggccctgcgggagcagctgatggagacctgcgacgatctgcccatggagctgtacggcgtgttcccttcccaaaaggacgatacggtgaagtttctgttccgctgccgggacgacaacctgatcgagggcgtgctgatgcactatcattacggctacagcctgtgcatctccacgcaggtgggctgcaaaatgggctgcgcgttctgcgccagcaccctgaacggctgcgtccgaagcctgtccagcggggaaatgctctcggaggtgctgctggccaaccgctatctgggcgagaagggccgggtggggcacatcgttctcatgggcagcggcgagccgctggataattacgacaacaccgtgcggtttctgcgggcggtgaacgaggaaaagggcctgaacctgagcctgcgcaacgtgtcggtcagtacctgcggtctggcggatcagattcgccggctggcggaggaaaatctgggcattacgctgagcctgtccctgcacgcccccaacgacgaaattcggcggcagatcatgcccgtcgcccggcgctggccccttggcgaggtcatggccgccgtgcgggaatatgtgaagaaaacgggccggcgggtggtgtttgagtacgccctcatcgaccagctcaacagccgcccggaacatgccgtcgaactggcggcgctgcttcgggatctgcagtgccatgtgaatctgatccccttgaaccatgtggacgagcgggcgctgcgccccgcgtcgccggaggcggtgcagcgcttcctgcacacgctggaaagccgtcatatctccgccaccgtgcgccgggaaatgggctcggatatcggcggggcctgcggccagctcaggcggcgggaactggaaggaacatcaaaggagtaacaccatcatgcgggtttgccacagaacacatcagggtctggtacgggccagcaatcaggacagcctgctggcggagggacggctgtacggcgtcgccgacggcatgggcggccacaagggcggggaaaccgccagccgggtggccgtgcaggtggtcaaaaacgccctctcccgaaaaaaaccggaggaggacgcgctgcgcatgggcctggaggccgccaaccgccgcgtatacggcatggcgggcagcgacgaaaacctgaccggcatgggcaccaccatgacccttctgtgggagggcgagcggcgcatcctcatcggccatgtgggcgacagccgggcctaccgcctgcgggacggcaagctcagtcagatcacgcaggatcacagcgtggtaggggagcttctgcgcaatcaggtcatcacccccgaaatggcgaagaagcatccctatcgaaacatcatcacccgggccgtaggcatcgacccggtggtggaggtggatgtgctgtccgaggacaagcagctggacgacctgtggctggtctgctccgacggcctgtataacatggtggacgatcaggacatcgaagaaattcttcagaccatgaacgaggagaaggccgcggatcgtctgctggagctggcgctggagcacggcggcacggacaatatcactttcgtgctgggccgggtgatggaggtgcagggcgaatgatgaaaggcatgatcttcgccgagcgctaccagctggaggactttatcggtcagggcggcatgtcgctggtctaccgggcggtggatatccgcaccggccacagcgtggcggtcaaaattctgaaaagcgaatacaattccgacaaggaatttctggagcgcttccagcgggaggcccaggccgccagcctgatgagccatcacaacatcgtcaacctgctggacgtgggcgtggagggcgaataccgctatctggtgctggaatacgtcagcggcagcaccctgaaggacgtgatccgccagaagggacggctgaacacgaccaccgccatccagatcaccgtgcgcattttaagcgcgctgcagcacgcccacgacaacggcatcatccaccgggacatcaagccccagaacgtgctgatccactccgacggccacgtgaaggtggcggacttcggcattgcccgcatgaccaacgccttcaccatctccaagggagataccgtggtggggtcggtgcattactcctcgccggagcaggccatgggcggcgtggtggaggccaccagcgatatttattccaccggcgtggtgatgtacgaaatgctcaccggccgggtgcccttcgtgggcgatacgcccgtttccgtggccatgcagcacatcaacgacgcgccgccgcctattaccgactacgcgccggaaacgccgcccgccgtggtggcggtggtgatgaaggcactggccaagaaccccaaggaccgcttccagagcgcccgggaaatggcggatgcgctgctgcaggccaaggacggtaagctggatcccgaaacgctgcagacgggcttttcccggctgcctgccggggcagtgactccgggcaggcagcagccggtgcagcccccgaaacgccctgccgagaacaaaccctaccggcccggcccggtttcacaggtcacggggcggatgaagaagcaccgttattcccgccggggcattcttttgaccgccgcggccaccgtggcggtgctggccgtgctgaccttcggtattctggccattttcaaccgggtgaccaaccgggtcatcgcgccggatgtggagggctacccggccgaggaagccatggccatggccagacgggccgggctgggctggcagcagaccgagcagaacagcgacctcatccccgccggggtggtgatctcccagctgccggagccggacacggaaatgagccggggcgacagcctgctggccaccgtcagtctgggccccagtcaggataccatccccgattgcgtggggcagctgtatgataatatttccaagaatctgcgcaagcagggcttcagcatcgtggtcatccgatcagtgtccacggagccgctgggcaccatcctgcagcagaatcccaagggcggcgaagcctttacccccgggcaggagctggagctgtccatttccggcggcagtacgctggtgccggacgtgaccgcccgcaccgaggaagaagcggccaagctgctgcgggaaaaccagctttccgtcggcgagaccgtctatgtggaggtgctggacgaaagccagatcggcatggtcatggcccagaaccccgtctcgggtacgctggcggtgctggacgcgccggtggtgctgaccgtcgcgacgcagagcaagggatataagggcgagatcagctttaccatggaaagggccgatcaggatcgaaccattcgggtaacgctggtagagaacgggcaggaggtggagcagtattccgccgtataccctgccgggcagagcggcagcgtgatcacgcccctcagctccgcctacggcggcagcgcgtcctgccgggtctatgtggacgggaagctctatctggagcagtccgtgaccatggaataggaggaaacagtttgatggaacagagcgcccgggagggcgtgatcgtcaagggcgtgggcggcttgtactacgcccgccagccggacggagaagtgcacgtgctccgggccaagggaaaattccgcaagcagcacgtaacgcccatggtgggggatcggatcttgttcaccccggccagcggggacgagcatggctgggtggaggagattctgccccgaaccagcgagctgatccgtccgccggtggccaatatccgcacggtgctgctggtgttggctccccaacccgagccggactatctgctgatcgacacgctgctggtgatggcggcccggcagagcatccgcccggtgctggtagccaacaaatgcgacctttcgtcggaggtgtacgagagccttgtgcgggaatacagcccgctgcaggttcccatcctccgggtcagcgccgaaacgggcgaggggctggacgaactgcgggccgtgatgcggcagggcatctgctgcttcgccggtcagtcgggtgtgggcaagagcacgctgctcagcgccgccacggggctggaactgaagaccggcgagatcagccgaaagatcagccggggccgccacaccacccgccacgcggaattgatgtttcaggacggctatcaggtgctggatacccccggtttcagcctgctggaactggaaatgggcatggaacccattcagctcaaggattattaccccgatttcgcgccctatgaggggcaatgccgtttctccccctgctatcacctgagcgaaccgggctgcgccgtactggaggccgcccgggaaggcaagctgggcagggaacgggtggaacgctaccatctgctgctaagccgcgtaaaagaagcatggaggaatcgctatgactaagatcgccccgtccattctggccgccgacccccttcggatgtttgatgccgtaaagctggtgaaggacaccggctgcgacgagctgcattttgacgtgatggacggccattttgtgcccaacatcagctttggccccagcctgcttgcggccattcacaaggagctcgatctgcactgcgacgtgcatctgatgatctccgacccgctgaaatatgtggaaagcttcgccaaatccggcgcgggcaccatcaccatccatcaggaggccaatgatttcctgccctgcctgcggaagctgcgggagctgggcgtgcgggtgggcgcgtcggtgaagccgggcacctctgtcgaaaccttgcgggaggcgctgccgctgctggatcgggtgcttctgatgacggtggagccgggcttcggcgggcagaagctgatgccggatgtgctgcccaaggccgcccagctgcgggctatgggctttaccggggatattgaagccgacggcggcatcaacggggagaacgccgtccagctggcgcaggcagggatcgatacgctggtcatgggcactgcctttttccgggcggaggagccggaagcgctggtgcgccgggtgcatgccctctgaaaaaatggcaagaatgagaagcgtcccctttatagcaggaaaggacggtcttctcatgaaaccgacgagatccaatcagcccggggaagcgctgtttacgctctatccccggaagaaaaccatgaagcgcggccccgtgcgtcactgagccgcgctgattggaatgggaaaggaatgaaaccgttttttgaattttgacgaactgtcgctgcttccgcagctgttgaccgcggtaaaagcctgcggctatgagacccccacccccattcagcgggatacgattcccaccgttcttgcgggcaaagacgtgctgggttgcgcccagacgggcaccggcaagaccgccgccttcgccctgccgattctgcagcggctttatcaggagcggcccgccgggaaaactcggaatattcgggcgctgatcctgacccccacccgggaattggccctgcagattcaggaaaacttcgtggcctacggcaaagggctgccgctgcgctcctgcgtgattttcggcggcgtaggccaacagccgcaggtggagcagctcaagcgtggcgtagacattctggtggctacgcccggacggctgaacgacctgatcggtcagggctttatcagccttgccaaaattgagatttttgtgctggacgaggctgatcggatgttggacatgggcttcatccacgatgtgaaaaaagtcatcgcccttttgccggaaaagcggcagacccttttcttctccgccaccatgcccgccgaggtggaaaagctggccatgagcatcctcaaagacccggtcagcgtgaaggtagacccggtcagcagcaccgtggacaccatcgagcaaaacctgtatctggtggataaggccaacaagaagcacctgctggccgaccttctgcgccgcccggaggtggaaagcgcgctggtctttacccgcaccaagcacggcgcggaccgggtggtgcgggagctgagccgggagggcattcaggcccgggccatccatggggacaagagtcagggcgcccggcaggaggccttggcccagttcaagcagggcaagatccacgtgctcgtcgccaccgacatcgccgcccgtggtatcgacattgcagggctgtctcacgtgtttaattacgatctgccccatgagccggaatcctacgtccaccgcatcggccgcacgggccgggcgggacacgaaggcgtggccgtcagcttttgctgtatcgacgaaatgaaggatctcaaggccatcgaaaagctcatcggcaagcagatcccccggaaggaaagccagtggcccatgcaggtctttaccgaaacggtgaagcagccgccccagccccggccctccaagcgggaacggatggcggcggaagcaaaccgtccgtcccagcccgccaagcggcctgaaaaggcgggaaaaccggccgttaaagccgcgcttcccgaaaagagggacttgaagaacgcccggatggagaaaccggcgcggcatgaaaaggcggctgccgaaaagcccgttcgggcggcgaaagcgcccagacagcaggagccccagcgccctgcacgggaacccaagccggttcgggagccgaagcccctgcaaaaggctgaacgtcagccgaaggaaacggcgtttcgcgccaccctgctggaacggcctaacgcccggcccgtccgcccgaaggagggacccatgtttctggaagcgccttttctggacgacaagcccgcccggaaagaggaagaaaagccgtccatgacctatcagcagtatatgcagaagcagcgcgccgcctcccggatgcggttttccaccggggaagaccgccgctgataaggcctgaaagggccgaacacccgacgtgctgaagaggaaaagccaatgtacattgccgatctgcacattcattccaaatattcccgggccacctcgtccgactgcgacgcgccccatctggacctgtgggcgcgccgcaagggcatcgggctggtaggcacgggggactttacccatcccgtctggcgggcggagctccgggaaatgttggagcctgccggaggcggtgtatacgcactgcggaaggagtttgccctgccgtccggcgtggccggcgggggagaccccgtccgctttgtggtatccggggagatcagcaccatctacaagaaggatggcaagacccggaaggtgcatcacgtcatcctgctgcccgggctggacgaggcggaggagctggcccatcggctggaagccgtgggcaacctgcacagcgacggacggcccattctgggcatggacagccgggatcttctgcagatgaccatggacgcctgcccggacgcgatctttattccggcccatatctggacgccccatttttctgtgttcggggaattttcccaattttccacgctggaggaatgctacggcgacatgaccggctgcattcacgcgctggagacggggctttcttctgacccgcccatgaaccgccgagtgtcccaattggactcttatctgctggtatccaattccgacgcgcattctccgcaaaagttgggccgggaagccaatctgctttcctgcggcgcaacctatggagagctgaaacacgcgctggagaccggcgagggtttcgaggggacgatcgagtttttcccggaggagggcaagtaccatctggacggccaccgggcctgcggctgctgtctggagccggaggaaaccaacgccctgaacggccgctgcccggtttgcggacgaaagctgactgtgggtgtgctgcaccgggtggacgagctggccgaccggcgggagccggggcccctgtcccgccccttcgaaagcctgatgcccctgccggagctgctggccaactgcatgcagaccggcgcgtccagcaagcgggtgcagggagcctatctggaaatgctcaaacgctacggcccggagtttacgattctgcgggagctgccgctggaggcggcggagcgggacatgggccacggcgtggccgaggccctgcgccgcctgcgcacggggcaggttcacaagcaggcgggctatgacggcgaatacggcgtgatcaccgtgtttgagccccacgagctggagctgctggaggggcagacctccctgctggagctggcgggctttgccgcgcccaaggcgaaaaaacagccggtaaaggcccgcaccgccgaagcggaatcggaagaaatggtgcagaagctgcccttgcggatgaatccggagcaggaggaagccatccgggcggaggacgaaattatcgccgtggtggccgggcccggaacgggcaagacccgcacactggtggaacgcatcgcctatctggtggagcggcggaaggtgccgtcgaaggagatcaccgccgtcacctttacccatcaggcggcggaggaaatgcgcgcccggctgaaggagcggctgggggctgcggccaagtccatcaccattggcacgttccatgccattgccctgaacctgttggagaaaaagcccctgttcagccgggaacaggccctcgccctgatggcggagatgctggaagaacggggcgaaaagacctcgcccgccgaaatgctgcggcttttgtcacaggagaagaacggcatggaagttgtaggtttcccccatggcctgcgggaagcctacgacgaacggatgcacgaactgggcgcacgagatctggacgacctgctgacggaagcactggcgctggacgtgagccggaagccctgcttccgccacctgctggtggacgagtttcaggacatcaaccccttgcagcaccagctggtggagcactggcggcagggcagcctgttcgtcatcggcgacccagatcagtccatttacggcttccgcggcgcggatgcggattgcttcgaccgcctgcgggaacgtcacccggggctgcgtctcatccgtttgaaggaaaactaccgctccgtgccctcggtgctggaagcggctctgtccgtcattgaccgaaatcccggcccgtcccggcagctgcacgccaacgttccgggcggcgcggccgttcggctgatgcaggcggacgatgcctttgccgagggtgtgttcatcaccaaggagatcgagcgcatggcgggcggcgtggatatgctggaagcccatcaccagaaggaagaccgggccgttcaccgggcgttttcggaaatggcggtgctgtgccgtacccaccggcagctggagcagatcgagtactgtctggaacacgacagcatcccctgcgtggtgtcgggccgggaaaacttctgggaggacggcaaggtgcggggcatgttgggctttttccgctccctgcaggagcctgaaaattttgcggcgctgaacgacgctctatcccttttgtggaagattcccgcgccgctgattcagcgggcgggggagactttgcggacagcgaaagagccggccgcccttcgggaaagactggcttcctttgaggtgctggccccgtggctggacgcggcggacgagctttggccccagctggccaaggcaaagccccggaaattgctggaacgtctccgggagctgtgcgggctggaaaattccaagccggtgtcccggctgctgaacgcctccgtgttccagagccggatggaggaatttttggaacggacgctgctgggcgcggagggcgacctgcagcgccggggcgagggagccgttcaaagcggcgcggtgcgtctgatgacgctgcacgcctgcaaggggctggaattcccggtggtctttctggcgggcctgaacagcggcgacctgcctttggagcgggagaaaagtcccatgaatgtggaagaagagcggcgcctgttcttcgtgggcatgacccgcgcccgggaggaactgatcgtcagctatggcggtcagccgtcggccttcgtggacgagctgccggaaagcattcatccgcagccggttcgcacccggaagcctatggtgaagatggagcagcttagcctgttctgacaatgattttgaatgcaaaagagggaaaagcatggtttcgttgttactggcggtgatttatctggcctttgtcagtctgggactgccggacgcgctgctgggctccgcgtggccggtgatgcagggggcgctgaacgcccccctttcctttgccggagcggtctccatggttatttccggcggaacgattctctccagcctgctgtccgaccgcatgacccgaaagctgggcgcgggactggtgacggccctgagcgttttgatgacggctgcggcgctgctcggcttttccctgtgcagcgcgccgtggatgctgatcctttgggctgttccctacggtctgggggcgggcgcggtggacgcggcgctgaacaattacgtggcgctgcactattcctcccggcacatgagctggctgcactgcatgtggggcgtcggcgccagcatcagcccgtttattatgagcctggccctgcagcggggctggggctggcagacgggctaccgaacggtttcctaacttcagcttgcgttgacggcgcttctgttcctcagcctgccgctttggaaaaagcgcacggcggcggaggacggcggcgccccggcggacgccaagcccaagagtctggtgcagcttttgcgcattcccggcgtgcccctgatacttctgacgttcttcggccactgcgccatggaaagcacggcggggctgtgggccagcagttatcttgtcaacgcccggggcgtggaggcggaaactgccgcccgctttgccagcctgtactttctgggcattacccttggccgttttctgaatggatttattgcggatcgtttcggcgacaagaccatgatccgcgccgggctggggctggcggcggttagcattctgatcatcctgctgccgtggcagctctgtccgctgattggtctggtgacgctgggcattggcagcgcgccgatctatccctgcatcattcattccacgccagagtcctttggccgtgaaaattcacaggcgatcatcggggtgcagatggccagcgcgtacatcggttcgacgtttatgccgccgctgttcggcctgatcgcccaatacggcaatatcgggttttacccggtatatctgatgatctttgcggttttgatgatcgttctgtacgggctgtttacgaaggggcagggaaagaaggcgtaaggaaactcggttcggcgtccgaaggggtgcgggggcggaaagccgcctgcctgtgacgatatacccagtatggctgtaagaacccctttccggggcttgacgcgccgacttcggcgcgaatcgggacttgccgtcccatggggcgttcacacttttctttcgatggcgaaagaaaagtgtgcaaaagaaagccagcggcacggcactacgggaaaaaggcttctactgcccactttgacggcggggctcgcaatgtcgcgcgcaatttagttggacagataactcctacgcttgtgcgcgctcctgtgctcgcctttttccgccgtcaaaatgggcgtgcctttttccctgcgttgcctaacgccgctctgctcccccgcagttggcgttgggcatacttagaaagtgccggttgggatgcttcactgcggtttgggtgggcttgcagcgcaaaaggacaggaaaggaaatgatatgtcgtctgtcgctcgtgctcctgtgctcgcctttttccgccgtcaaaatgggctggcctttttcccttcgttgcctaacgccgctctccttccacgcagttgacgattggcatactcagaaagcgccggttgggatgctttgcttcggtttggatgggcttgcaacgcaaaaaggccaagaaagccgtggatatgccggtcacggcgttcatgctcaaaaaatgcaagttgggatgatgtgctgcaccactgatggctttgcggcaggtatgaaaagaaggttttttccactgcggcttgaaattttccccaacgaaaaagcccagcctgttcttcaaacaagctggactgtgaaagcaagccatgaggcccggcgccgaatggcggcctttcctattcaactatcaggaatccacaccagacctgcgagccgcgaggcctgtcgccgagcggcggtaactccgcagccaagccacatgtccccctactcccctgcgcgcatcgcgcgcagtccgggctcaaggggtactaccccttgttagccctgcagaccgttttcctgacgctccatgttttcgacgacgatgtcgtagatctcgcccagagaggaagcgtattccagcagctgccagggctcgttggtgtggaaatggatcttgatcagatcctcgtcgcccacagccagcagacagtcgcccttgaggttgttggtgatgtattcgttgatggcgtcctccgagaggttgtggccctcgatgagaagctgggtgtcaaatttgaattccagcatgatgggttcctccgtttcctaaggtttgacgggttcgtcattccgattataaccaattttgagctgaatggcaaggggcggccccggagccgccgaattgggaggttgacagcatgaaatgtaacgtttgtccccgccgctgtaacgcggaacgcacggaacacgagggaaaaggcttctgccatatggggacgctgccggtggtgtcccgcgccgcggcccattactgggaggaaccctgcctgagcgggacgcggggcagcggtacggtgtttttcagcggctgctcgctggggtgcgtgttctgccagaacgagcccatcagccatcacgagctgggccgggccatgacgccccgccagctggcggaattgttccggcggctggaggaaacgggcgtgcataatctgaatctggtcacgcccagccatttcgccccggcgattttcgaggctctttccatccggaagccgggcgttccggtggtgtggaattccagcggctatgaagcgctggagacggtggaacaggctcgggggctggtggatattttcctgccggatctgaagtactattctgaaaagagcgccgccgcgctggctgccgcaccggattatttcgaggtggcgatggcggcggtgaaggccatgtgcgcacagacgggtctcccccgatatgacgaaaacggtatgatgctgtccggcacactggtgcgtcacctgatcctgccgctgcgcacccatgaaagcatggcgatcctggatgctgtcgcggcggagctgcccaagggaacgccggtcagcctgatgcgccagtacacccccatgaacgactgcaaactgccggggctgaaccgccgcctgacgggccgggaataccggcaagtattggagcacatgatggagctggggctggacggctatctgcaggaaaaggaagcggcggacagcgcctatacccccgcctttatggacgaggagagcgtgaagttgtttccggaaatgaagtaaaaaagtttatttcattttatggcgacttttggctgtgaggtaaaaggagctactgtatgattcgcgtaggtattccaagttggttcataatcggcattcgcttgatttccccacatatcccatccttctctgacaccgcgcgcaaacaattcaattcgaggagcttgactgcatgcttctatgataggaataatttcatcaggttttctactatgttctcgtttcatagcacgaattaaatttacttgcgaacggccaggctgtaaggttctgttaggtgcactttttttcttaattccaaataaaatcaattcagtaacatttctaaagtaaaagccgacacctctgccatctgggccgccatcttttcgtactttttcccaaactatatttcctttatattcaaagccccaggcatccataacggcaagcccttcgggcaacagtgcattaggaacccacaagtataaatgagctttttcgtcagaaatttcagagatagggagagattttatttcttcaagatccattgtctcataacgcatgagccttttatgctctggtgaaactttgccagaacggttttgaaattgccaaggaggatctgcataaattgtattatattttttcccatgagtgaaattatataagttttgaattgtgctctgtagagtttccatattcttctacacatccttttttaattcccacagctaatattgggcaaccaccgttccttctggaatctagcctataaagcagttttccaatccatgtcgtgctagcaccatatttgttaattagcttttgcccattgttgtctttttctgttctaaatatttcattcagttcttcggcccttgttacaataacaccaacatctattagtccacagtcaaaataggttctcattgctagtaaatctctgtcaaaagtttgatctttactattccattctaagtcaaaggcaactctatttttcaaaaaatcaatattatgaccatcaatataacctttagttgtctcaatctcaaaaggctcgtcaccaaaacgccctcttctttgagcagtttgacgagggtattttttgactacaaggtctccactaattcttatttctctccagccgtaaggatacaaaatatcatcaaatttcttcggtatgggtgactcatttccgccagcttttcgaatgtcggataggctgagctttaagtgcctaaaacaatcttgcaattctttccattcatttggaaatgcatcgtgaagaatttctaaagcatgaccataattaaaaaattcaaatttatccagcaaatcgctgtcgatatatttttcaaaatccataagcatatttcctttctgctttttagggagttgtatcccacaaaaacaaaattagtatagcatattttttgagctgttactagctttcactttttcgcttaattttagctcttgtcggcgacaccccataatacctcttaaacatccgcgaaaaggcgaaaatatcgggatagcccacggccagcgccgcttcgccgggggagaagccgtagccgcacagaagttcctgcgcgtgctccatgcggcagcggagaaggtactgctggggggaaaggcccgtttgctggcgaaacagcgtgctgaaataggagcggttcaggccaagctgcgcggccagaccggcaatcgaaacattccgcatgtagttgctggccagataggtttgggcctgttccacatagtcgctttccgagggacggtgttcgctgagcagagaaagcagctggtagatcagcccgcaaaggtacatttcccggccctgcgccatggtttccaaacggagagcagaggaaaacagcgaaccgaggccgctgtgctgcaccacagcctgttcccgcaacggagcggggagagtcagctcggtgtgaaagccgatccagatgtattcccaggggtcgtgctcgtccgcctgataaaaggtggtttccaagggatggatgacaaacatctgtccggcccggacgggatgccgcacgccgcctgattcaaagacgccgcttccgctgacgacatagtgcaaaagccagtacattcgcgccgtcgggccgaaggaatgagaaggcccgcagcgctcccagccgcagtccacgggattgatatcccgaaagtgctgatcggaaagcaaaaacggctctgccataggcattcctccccccaaaaaatgatgggttttttatagataacattatgccaaaaccttctcacaaattgcaatagcttttttcctgctttgctggcataataaggataacggttcgcacgaaaatgcgaaaaaaaccaaacggaacgccaaaggaggaaatggtatgaataagatcacctttatgggcgcgggcagcacagtgttcgtgcgcaacgttctgggcgactgcatgtgctcggacgcgctgaaggattgggaatacgccctgtacgacatcgacgcgacccggctggaagaaagctatgagatcatctccgccatgaacgagaccaagggcggccatgcccgcatcaccaagcatctgggcgtggaaaaccgcaaggaagctttgcgcggcgcgcgttttgtcatcaacgccattcaggtgggcctgtacgacccctgcaccattatcgactttgaggtgcccaagaagtatggccttcgccagaccatcggcgatacgctgggcatcggtggcatcatgcgcgccctgcgcaccatccccgtgatggacgatttcgccaaggatatgcgggaagtatgccccaacgcgctgttcctgaactataccaaccccatggccatgctcagcggctatatgcagcgctacaccggcattgagaccgtgggtctgtgccacagtgtgcaggtctgctctgaaaagctgctgaaaaagctgggcatggaggacaaggtggaaggccgccgggagctgatcgccggcatcaaccacatgggctggctgctggagctggaggacaaggacggcaacgacctgtaccccgaggtgcgccgccgcgcattggaaaagaacgaagccgccatgaaggacggcgcggagaagcacgacgacatggtgcggatggactatatccgccgcttcggttactactgcaccgagtccagcgagcataacgccgagtacaacatgtactacatcaagtccaagtacccggagttgatcgagcgctacaacatcccgctggacgaatatccccgccgctgcgtcaaccagatcgccggctgggccaaggaacgggacgagctgaagactggcaagcatctggatcatcagcgcacgaaggagtacgcctcctacattatggagtccattgtgaacaatacgccctatgagatcggcggcaacgtgctcaacaagggcggactgatcgagaatctgccgcaggacgcctgcgtggaagtgccttgtctggtcaatggcaagggtgtgcatccctgtcgggtgggccgtctgcccgtgcagtgcgcggccatgaatatgaccaacatcaacgtgcagctgctgaccatcgaagccgccgtgacccgcaaaaaggagcacatctatcaggccgccatgctggatcctcataccggcagcgagctggacatggacaccatcgtgcgtatggtggacgacctgatcgacgctcacggaagctggctgccccagtacaaataagaaaacccgtttttcactgcccgctgtgcgtttatgccggcgggctttttgcgtataacggcccttttttcgccccatactgacggaaagaaaggatcgtgatgctgaatgcagaaatgccgccatcaaatgattcccggagaccttcaccctcatgcgcggccgccggagcgggaaatttaccgaaagcccggcctgacggcctttggacagcgaaaccgggaggaaagctgccatgaataaacagcgggtgcataccgatccgggctattatgcccggctgacggacaagttttcaccgcccagcaaactgggcatgggcattctccgcgccttctgggtgggcggggtcatctgtatgctggggcagtttatcatggacgcgggcagccgttggctgcagctttccagccgggacgcaggcacgctggccagcgtgacgctggtattcctgaccgcgcttctgaccggcatgggcgtgtttgacaaaatcggccaatacgcgggcgcgggcagctttgtgcccattacgggtttcgccaatgctatggtctccccggcgctggagtttcgccgggaagggctagtgctgggactgggagccaagctgttcaccatcgccgggccggtgctggtatacggcgtcagcgcctcggtagtggtcggggtgatctacgctttgttcgtgagatgaaaaaaggcgcgggaaaattccgcgctttttgcatcgaaaaaagccccgccaaaaggcagggctcagcttgtcaaaaaagtggaggtgcaggaggcactgctgccactcaatcgtcgcatggactactgccgtagtccctgctcgtttcgtgtcacacctgcgggtcgctaaccgcctacggcggttgtgcccaccgggcgacggtgaacttttcaaattctatttgaaaagttcagtctgccaaaggcagaccgggttgcccaagggcaacccgccttgcgccttccctgcggtgcctgccggggttttagggcggcgagaaggagcgggcatccagtggatgcaactgccgaaggcagttagcgactgacagccgtcaaccgaaacgaggatttggcacggcagtgccaaagacgacgattgaggttgcggaacggagcccctaagccttgtgccgcggcacttttcccgcaaaccagcttaagggtgcgcagcaccgaggacgaggacagcccgaagggctaccgcagtccgaagcccgccacgccatccggcggggtgggccgcaaagcgctgttcgcgggcgatgacggccgatcagggtttttcgacagtctgagccccgcgaaaaggcggggccaaaggggtaacaatcagacgtaatactccatgggatagaccaggtactggatctcgtccagctggtccatcgtgaccagaccggcgggagcccgcaacacgctggggatgcggttgacgatggtagcgcaggtgtgctccacggtggcgggcttgaccacatggaattcggtgtccggctcgccggtgatcttccagtcgcacatatcgccgtcgtcggggccgtacaccttgccgatgcactgggtctccagcgtaatgccctggaaggtctccgtggtgaccaccgcagccatgccgatgcagttgcccttcgggatggtcttgcccagcgtggcggagtacaggtcggcgtcatggaagtagggcacgcacttctgggtctggctcttgatagtcaggcccagcttctgcgccagcgcctcgttgctgttccacacgtaggagggctccagcacctcggggtgcgcgatctgcgcttcgaattcttcgggggtcaggttcacgccgtgggcgttggccagcgccagaccgtaatcttccacgttgtagctgaccgcgccttcgatcttgcggatgttgtggcagccgccggcgatcaggccgatggagttgacccagaagcagtcctccatgccggagccgacgaaggtgcagccgtgttccttggccagcacgtccagctt

SEQ ID NO: 3727 - DNA, 27857 bp, Unknown
  16S sequences of unknown bacteria
ccctctccagtttccgctaaaatcctacggatttccgggcgcggaaactgcaaggaagcgatttttgctctggaaaatgggattttccgacgcggcgtattgcgaatccatgcacccctcaattcagcatggtcgtcccactgcgctcgcaggctcgcttgcggcactccctgcttcattgggcttacttcgcgctgtttcgcccacagggcgcgcgcttcgtgcgcccccgtcgtacacgccgccggggacgatggaagtgcgaaagggctttgcccctctctttggtttttcgacaggctgctgtgggcataaattcccactttgcaagctttctcatggcatttggggctgtgaaaaaacttttgttgttttttcacagccccatccaccgccttggcagcaagccaaggccctttaggacatcatcttctccaacagggaaagcgcttcttccagcttggggttgggatcgtcagaatgcagcccttcccgcacgcaatggcgaatgtgcgcttccaaaatttctttgttgatgcgcttcaacaaggcttgcgtcgccaaaatctggttggagatatccacgcaatagcggtcttcttccaccatccgcaaaatgccgtccaattgtccgcgcgcaattttgagctggcgggttatggttgctggatcggctttcatgcgttggccacacccgtcacagtatagcccgcatcttcaacggcggctttgagcgcggcatcgctcaccgagggagccgcttccacaaaggcctttttctcttccaggctcacgcgcacatccgaaacgccttccacgcccgtaagcgccttggtcacatgctttacgcagttctggcacatcatgccttccaccaaaatttccttcttcatggtttgaacctcctccaatttgtcttgcgccgcatttaccggtgcggcttccggttgcagcaaaggaatttcttccacatgcaacgaatggattgtggcagaggcttcccctgccttcgcagccacgcggctgggtttgaaaaagcgcaaccgcagggcgttgctcaccacgaacacggagctaaagctcatagcgagcgcggcgatcatgggattcatcttcaactggagcgcggcgtaaaagcagccggctgccaccggaatgcaaatcgcgttgtagaaaaacgcccagaacagattttgcttgatgttgcgaatggtggccttgctcagttctatggcagaagcgacgtccagcaaatcgtttttcatcagcacaatatccgcagattccatggccacatccgttcccgcgccaatggcgatgcccacatccgcgcgggccagcgcgggcgcgtcgttgatgccatcgcccaccatcgccacctttttgccgctctgctggatctggcggatttcgcgttctttgtcctgcggcagtacctcggcgatcacccgatccgcgccgacttggcgcgcaatggcgtgcgcggtcttttggtggtcgcccgtgagcatcacaacttcgatgccgagggatttcagttcgtcaatggcctgcttgctggtgggtttcaccacatccgccacagccaccatgcccacaagccgtccgccagcggcgaagaacagcggcgtttttcccgcatcggccattgtattttgccattcatccaacgcatggtgatcaatgccagaagcttccatcagcttttgattgcccgccaggcaaacctggccgtcaattttgccccgaatgccctggccaggaatctgctgaaaatcgctcaccgggagcagaggaattttttgtgcctcagccgcttccacaatcgccttgcccagcgggtgctccgaaagcttttccaaagaagccgccatttgcaagagcgtcttttccggcacatcagcggcatggaaaacatcggtcagcacgggctgccccatggtaatggtgccggttttgtcgagcaccacagtttgaatggaatgggcgctttccagcgcttcggccgatttgatcaatataccattggccgcgccgcgccccgtgccgaccatgatggctgtgggcgtagccagtccgagcgcgcaggggcaggaaacgaccaacacagaaacgccaatggacagggcaaattccacccccgcgccagcgatcagccaggcaacggccgccaccagggcaatggcaatgaccacgggcacgaaaatgcccgccactttgtccgccaacttggcgatgggcgctttggagctggtggcctcgtccaccaaacggatgatctgcgccaaagctgtttcatcgcccaccttgtcggcgcgcatctgaaaatatccgctcttgttgatggtggcgccgatgactttatcgccggtctgtttatccaccgggatgctttcgcccgtgatggcggattcatcgatggaagcgttgccgtccagaatggtgccatctacgggaatcgattcccccgcgcgcacgacgagcacatcgccccgcacaatttcttccgccgggatgaccgtttccacgccatcgcgcagcacgcaggccgtctttggcgcgaggttcagcaggcggttgatcgcgtcggaagtgcggcccttggcgcgcgcctcaaagaatttgcccaaagtgatcagcgtcaggatcgtgcccgcgccttcaaagtacaaatcgtgagaaaattgctgcaccatggcaaggtcgccgtggcccataccaaacgcaatcttatacagcgcataaatcccatagagcgccgacgcactggaacccagcgcaatcagtgaatccatgttgggcgaaccatggaacagggttttaaaacccatgcggaaatacttgttgttgatgagcatcacgggcaaaagcaaaagaaattgggtaaacgcataaatgagcgcgttcgcatcgcccagaaaaatccccggcaggggccagcccatcatatgtcccatggataagtagaacaatggaatcgtaaaaatgaacgaaccgatgacacggtgccgcatggcctcatattcccgctttgcgcgatccaccgcgctcccttcagcggccgtctttttggcgccagacgtatgggcgtccgcctgcaaagccgcgccatatcccgcctgttccacggcggcgacgataccgtcgctgttcaaaacactggaatcgtacttcacgaccatgctgtttttgagcaaatttaccgtaacctgctccataccaggcaatgcactcacacatttttccacacgagacgaacaagcggcgcatgtcatccctgtgacatcatatttttcctgccgttcttgcattgcatttcctcctctctgcatacaataccggggtggggtatctatagcaatagtatacccgcccctcttgcttttgcagcagctattttgaaaataatatgtaaattttagaaggaattccccgccgcgcaaccgcggtaaaagtgccgttgccatctgagtgaaggcagctgcgcccatcgccataacttcctcaaaaggagtaaattgtatttattataataactttataacatattgcgacaaaattctcgctgcatcactattgcgtttaacaattttaatcgaacaggacgccaccctttacttaatgatttttttcatttgcggcaacaaaaagtattgacaagagaattgattgggtgtatactacatccgtcaggtttttccgggttcacatgaaaaaatagcatacgggaggatgaatatatggattccatttctttttatgctcatccggagatcctttccaacatctcatttcatatcgataattataaggacgcaagtattcatatctccatcaattgcgttcgagcgaagaagtttatccgcgtggtgattggtaacaagttttgcctaatgaacgataaaaagctcgcgccagaagcctgtgatgacttgcattttgccatttttgagttcaatttgcaggataaggaatacctttgccttctcgcaatgctggatgctattgacatttcccattgggaacgcaaatactatagttcccagtacgcatgggcgcagtggaaactgcggatttccctgaaggaacgcaagtgcatttcttccgcaggaacgagcggttaccccgatgcgtgggacaagttcatgcaaatctgggatacattcactcgccttgaagcattgatcgccctctatcgcagccgctggacgatggacggcacgcttacgcctttgccgtaaactctataaaggagagaagagatggcagtcccttctcccccacctgcgcgttcgatcaacgctttcttccctatatcccatcttctataggcctcgccagcagtcgaatcgcgccgcggcaggatgccgccgttccgtgcatgtgggctgtgaaagaatggcaaaagttctttcatagcccacatatcttgctcaaaccctttccggcaaaatgccaattacgcctgcgtttccaccaattcttccgtctttggcacgctagcaaagcgcaattcctcgccttccgccgtaacgctcacacgatcgcccaggtgaatggcgccggagagaatttcctcgctgagcgcgtcctccaccttgcgctgaatggtgcggcgcaggggccgcgcgccatactgcggatcaaatcccgctttggccagcagggccaccgcctcgggcgcgacctccaattcgatgccacgttccgccagccgcttgcccaccgccttgagcatcagcgccgcaatccggttgatgttctcttccgtgagctcgtggaagacgatgatctcgtccacgcggttgaggaattccggccggaatacctgcttgacttcctccatgatgttgtcgcgcatttgctcataggttttttcgcggctatccgcgctgccaaaacccatggtgcgctgctttttgatggtctgcacaccggcgttggaggtcatcacgatcacggtattcttgaaatccaccacgcggccctgcccatccgtcaacctgccgtcttccagaatttgcaagagcacgttgaacacatccggatgcgccttttccacttcatccaagagcacgatggaatacggctttctgcgcactttttccgtgagctggccgccctcctcgtaccccacatagcctggcggggaaccgatcatgcgcgaaacggagtgcttttccatatattcgctcatatcgatgcgaatcaggctattttcatcgccaaagagcgcttcgcccagcgctttgcacagctccgttttgcccacgccggtggggcccaggaagataaaggaaccaatgggacgctgcgggtctttgatgcccgcgcgcgcgcgccgcacggcgcgcgccacggccgcaacggcctcatcctgcccgatcacgcggctgtgcaaggtttcctccaggtgcaagaggcgttcggcctcgccctccgtcatacgggaaaccggaatgcccgtccaagaagaaacgatttgcgccacttcctcttcgcccacgatttccacgcggccttcgcggcgctgctcccattccttgcggcgctgggcaatttcattttgcaagcgcttcttttcatcgcgcaactgagcggccttttcaaaatcctcgtgcgccacggcttcttcggtttccttgcccagcgcttccagacgcgcttcctgttccttcatatccggcggcgcggtgaacgccttgatgcgcacgcgcgaagccgcctcgtcgatgaggtcgatggccttatccggcaggaaccggtcggcaatgtagcggtcggaaagctgcacagccgcttcaatggcctcatccgtgatgcgcacgcggtgatgcgcctcgtagcggtcgcgcaagccgtgcaaaatcgccacgctttcctcttttgtgggctcgccgaccatcacaggctggaagcggcgctccagcgccgaatccttttcgatatatttgtggtattcgttgagcgtagtcgcgcccacgcattgcaattccccgcgcgccaagaggggcttcatgatgttcgccgcgtcgatggaaccttcgctcgcgcccgcgcccaccatcgtgtgcaactcatcgatgaacaaaatcacgttcccggccttcttgatttcggccatggcgttcttcaggcgttcttcaaattcgccccggtattttgcgccagccaccatacccgccaaatccagcgaaaccacgcgcttgccgcgcaggatttccggaatgttgccttccacgatcaactgcgccaggccttccacaatggcggatttgcccacgcccggctcgccgatgagcacggggttgttcttcgtgcggcgcgacagaatctgcacaatgcgctcgatttccttcgtgcgcccaatcacgggatccagctcgccattttgcgcggccttggtcaaatcgcgggcaaaatggtcgagcgtaggcgtgttattcccctttttctggcctttttcgcccgacgcgctatcctcgccgctcagcgcgcgcaggatttcctcgcgcatcttttgcaggtttttgcccattttcgtcaaaattgtggcagcgacaccctcgcgctcatggatgagcgcgagcagcaaatgctccgtgcccacgtaattgtgctgcaaatcgcgcgcttccttggcgctctgttccagcacctttttggtgcggggcgtatacaccatggtacggatgggcgagttatcgtcccccttgcccagcatctgaatcacttcctggcgcgccgcgtccagcgtaactccttccagagcgccggcggcgctgccgggatcggtcaaaatgcctagcaacaagtgctcagtgcccacataattgcgccccatttgcgccgcttctttttgcgcggccaccaaaacgcgctgtgcgcgttcggtaaatctcgaaaacatcgccatatctggcctcctcattccgctagcttcgcgcgcacatagtccgcgcgcgccatattccgttcgcgctcattccgctcgccgcccaggcgcacgctcaaagagccgtcctgcgcgtccatcatcagcgcgtcgataaacgcataatctcgatccacatagcccaggctggccgccagccgcagatccgagcagcgccccataaactctttcacgggcaaaatgcgcgcgttggcaagttcgccataggagcgcatcagccggtcctccagcagggtagaatcgtgctgcagcgccttgcgcgcgccccgttcgtaagatatgatctgcgtggtcgcggcggtcagcgttttgagcgtgtcttcctcgctgcgtcccagcgtcacctggttggaaagctggtaaagattcccttgcgcctcgctgccttccccatagatgccgcgcacggtcaggcccagcttggatatggcctgcagcagcgcgctgagcttgcccaccgtcgccagcgccggaaggtgcaacatggtggatgctcgcatgcctgtgcccacattggtggggcaactggtgagaaaaccgaattgcgcgtcgaacgcgtaattgtcgtccgcgccgagcgcatcgtccagtgcgaacaccatttccgcggttttttccggctgcaggcccggcaacaggccttgaatccgcagatggtcttcctcattgatcatcacggagacggtatcgttctggccgatcagcgcggcgctcagttcagcaaatttcaaaaggtcgtagctgatcaggtggtgttccaccaattgcttgcgctgcgcgtctgtgaggttctccatgcggatcagctgatacgtctccgggcggcgggccagcgcgtccgccgcgcggcgaatggtctcctgcgcccattcccggttcatggagggagcaaaggggatgtccttataattgcgggccaagcgcacgcggctggaaaccaccacatcccgctccaaagcgttattcgccgccatggcactccacctcttcctccaattgctgcttcagagcgcggatctggtcgcgcaatttggcagcttcttcatattcttcagcggcaatggcgttcaccagctttgcctttagctgatccaccgttgccttcagcgagacgcgcttggccaacccgcccggcacgcgacccgtatgctgcgtgttcgcgtggatggacataatcagcttttccagcggctcgcggaattctttatagcaatccgcgcaaccgagcaagcccgttttgcggaacgtttcataagtcatgccgcagcgcgaacaggtaagattcggaacctcttcctcgacctttgccgtctttgcggcttcaaaaaacccgctcaaaagccctgccaggctggtaaaatccaattctggcatggactccttgatttttgccatgcaggaagcgcagagatttttttccttcttttcgccccccacaatggtggtaatgcgaatgctggccggacgaattccacattcatcgcacatcattgccatcattcccccttctggtggtttacaaacgcctgcgaaaccatattgcgaaaaacggcggcgcgcaacacgtctttggtgctcacaggcagcgccaacgcattttgcgcaatgcccgcgcgcatcagcagcgcctcgttgcgcgtaatgatcttgctttccagcaactgcgaaatgatcgcattggccgaatcctcgtcgatggagcgcccaatgcgccggagcagcaccgaaagagagctttcgtcgtttgcccgctgaatgcggatgatgcgcacatatccgccgccgccgcgtctggattcaatcacatatccatggtcgatggaaaaccgcgtcgccagcacataattgatttgcgagggcgcgcagccaaagtgctgcgccagctcattgcgcttcaaatcgatctggcgatcctcctccatcagatccttgataaactgttcgatggaatcgctcaactgtgccatcgtcgatcccttctttctttgaccatctctgactattataaaccattcttcagaaaaatcaagttaaatttcataaaatcaactgtgcacttcttttgataaaacttcgtaaatcaatcgcacagcgaccaaattcgtcgcaagcgcgctcgctctcattctatatagtatacccgttttcattcgcagataaacaaagcgcaaaatggctctgccctgccacccatccggcattgcgttttcacagcctttttcatcgcggccgcggttgacccgccggccaaaagtggctataatgaaaaaaggacaaaaaacaaaattgggtgggataccatggatttgcgaatggccatttgcgacgacgaagcgagcgcgctagagcacacccgcctgttggcgcaagcctgggcggaacaggcggagcatgccgcgcgcatcgaaacgttccccacggcggaagcgttcctcatccagtacgaggaggacaaagccttcgaccttctgctgctggacatcgaaatggcgcgcatgaacggcgtggcgctggcgcgaacggtgcgcgcgcaaaaccgggaaatcgccatcgtgttcctcaccggttacgcggattacatcgccgacggctacgacgtagaggccctgcactacctgctcaagcccatcacgcgcgagaagctctttcccgtgctggatcgcgcggtggagcacctccgccgcaacgagcgcgcgctgctcatcgccggccagggcgaaaccgtgcgcatccccctttatgaaatccgctatgtggaaagccggctgaactacgtcaccgtgcacgcggcgcgggaatatcgctttaagatgccgctcaaggaaatcgaaggcatgctggatggtcgctttttccgcgcggggcgttccctgctcatcaaccttgcgcgcatccgccgcatcgtgcgcggcgaagtggaactgctggacggggaaatcctgcccctgccgcgcagcgcgtatgagccgctcaaccgcgcgttcatcgaatacttttaaggggtgaggcccatgaacccgctttcccggcgagtcgagcgaaaaatcgccgcctaccagaacgagctgatcgccacgcactttgccgaagtggaaaatatgtatgctcaggtgcgcggctgggcgcacgattaccgcaaccacatgcaggttttgagcgcctacgccgaaaagggcgacctcgccgccatccgtcagtaccttgccgagttggacggcgacctcgccgggctcaccgcgcccatcaaaaccggcaaccgcatggcggacgcgattctgggcagcaagatttcgctggcccgcgcgaagcgcatccccgtcaccatcgacgcgcatgtgcccttcgcgctgtcggtttcccaggtcgacctgtgcgcgattttgggcaacctgttcgacaatgccatcgaggccaccctccctcttcccgaggaagagcgcatgatccgcatctatatcgatacgaaaaacacgcaattgtacatttctttcaccaacacggccgcgggcgggcggcaggaaaaagtgggcggcctcttccgcagcaccaagggcgcgggccgcggctttggcctgaaacgcgtcgacgccatcgtcaagcgcctgggcggctatgtgagccgcaacagcgaggacggcgccttcaccaccgaaatcctgctgccgcagtagcgcaattcatcccccacggcgcgcaattcatccccggattgcgcgctgccgctatttttgcgctatactggcgccgcaaaggaggaaacgccatggaagacgcaaagcaaaccacccggccccgatatggtatggggcaaaacgtgctctacatgctgcgcacagcctggcgcacgcgcaaaagcgtgatcgcactgtgcgccgcgcaggccttgctcggcgtggcgagcgcggcggtgggcatgttcttcgccccggcggcgctgggcgcgatcgaaacgggcgcgccgcttgcgcgcctgctgggcatcatcggcgcgttttcgtgcgcgctgctgctcctaggcgccctggccgcatacgcatctgccaacacagagttcggccgcatccaggtgcgcatggagcttttttaccgcaccatgctcaaaagcgccaccaccgcgctggccaacgcggaaaaccccgcctttcaggaaaaatcggccaaggccaacgccgccatgaacagcaacgctgcctccggggaggccatttgggatacgctgcgccagattctggaaaacgcgctggggttccttctatatctttcgctgctcaccgcgctcgatccgttgctcgtggccgtaacgctggtgaccagcgcggcgggttttttcagcgcccatcgcatcctgggctggggctaccgccaccgtagcgaggaagaaaagcccctcaagcgaatggattacgtcctgaaccaggcaaagaatactgccctgggcaaagacctgcgcattttcggcatgcgcccttggattgaggacgtattccgcagtgctctgcgcgcctaccattccttccacgcgcgcgccggcaaacgctattttctggccgacgccatcgatgcgctgctcgccctggcgcgcaatggcgtggcctatgcctatctcatcgcgaagaccctgtccggcgaattgacggtggcagaattcttgctgtacttttctgccatcagcggcttcaccacatgggtcacgggcatcctttcttccttcaccacgttgcaccggcaaagcctggagctttccaccatacgcgaattttgggcgtatcccgaaccgcttccgctggaaggcggtgaaatgccgcctgcgctccggccgggcgatgcatgcgcgctggagctgcgcgacgtttccttccgctatccgggcgcggaaaaagatgtgctttcgcacatcgatctgaccatcgcgccgggcgaaaagctggccatcgtaggcctgaacggcgcgggcaaaaccacgctggtgaagctgctgtgcggattttacgaccccaccggcggcgaagtgcggctgaacggccgcaacatccggccttataaccgccccgcgtaccaggccttactgggcgctgtgtaccagaacttttccctggtgcccgcgagcatcgcgcaaaacgtggcgcaggatctggaaggcttcgaccgcgcgcgggtgcaaaactgcctggaaagggccggcctgggaaacaagatccgctccctaccccatggcatggacacccacctggtgaaagaagtgtatgaagacgcagaagagctttccggcggcgagctgcagcggctgatgctggcccgtgcgctctataaggacgcgcccatcctcgtgctggacgaaccgaccgccgcgctcgatcccatcgccgagagcgacatctaccagaagtatcgcgaaatgaccgtcgggcgtacctccatttacatttcccaccgcctggcttccacgcgcttttgcgaccgcatcctcctgctggcggacggcaaaatcgccgaagaaggtacgcacgaggcgctgatggccaaaggtggggaatacgcccgcctgttcgaaatccaaagccgctattaccgggagggaggggaagacgatggcggaagcgacgcaagcgaataaagtatccctgcgcgaagcgctgcgcttaaacgggcgtgcgctgggcctgttgtggaaagaacgcccacaattgattctatccatggcgctgagcagtgccgccggttccctcgcgccctacatcggcattttcttttccgcgcgcatcctaaacgaactttctggcgcgcgcgatgcgcagacgcttgcgcgcctggtattctgggcgctcatcgtcgcagccctttgggcgctaacgcaaggcgcggcgcggcgctggtgcgcatgcgagcgcgcaagcctgcactttctatgtggaaaaatccacaattttcccatgctgcgcatggatttcgcgcgcgtggacgattctcacacgcacgacctgcgctcgcaaatcgcgcaaaaccaaaactggggcggctggggcctgtatcaagtgtatttctctttggaagattccctcaaggcgctggcgcaagtcgcgggcgcggtggcgctgagcgtatccctgttcacgctgtccgtgcccgaaagcgcgggcgcgctcaccgcgctgaatcacccggctttcattctgctgctgatcgccgccatgctgggaaccacggcgctcgctcccctgctgagctatcgtgccgatcaatattggttgcgcagcgcggaaaatgtaaaagaaggcaaccgctttttcggcttcgccttttcgctggtgggtctttccaaaaattggctggatgtgcgcacctaccggcaagagcgctatatcgcgcccatcatcaacgtcctcatcgataagctttgcaagccggatagctggattgcccgccgcggccggggagccatgggtcttctgatggcggcctctgccagcatatcccacctatttaccgcgctggtgtatggtttcgtgtgcctcaaggcgtatggcggcgcgttcggcatcggctcggtcacgcagtacatcggcgccatcacctcgctctccggcggtctttccgcgctgctgcgagcgttgggcatagcgcgcaacaatgccgcgttcctgcgcgccacctttgaatacctggatctgcccagcgaaatgcgccagggcacgctcaccgtggaaaagcgcaacgaccgcaaatacgaaatcgagttgcgcgacgtttccttccgctacccgggcagcgaagtatgggcgctgcgccacgtgaacctttccttccgcattggcgagcggctggccgtggtcggcgaaaacggcagcggcaagaccaccttcatcaagctgctctgccggctctacgatcccacggaaggagaaatccgcttaaacggcatcgatatccgcaaataccgctacgacgaatacctatctctgttttccgtggtattccaggatttccagctgttggccttcccgctggggcaaaacgtggctgccagcgcgcatttcgacgccgcgcgcgccacggcctgcctggaagaggccgggttcggcgagcggctgcgcgcctggaaacaggggttaaataccgcgctgcaccgggacttcgatcccgaaggcgtggaggtttccggcggcgaggcgcagaaaatcgcgctggcccgcgcgctctataaggacgcgcccttcatcgtgctcgatgagccgaccgccgcgctcgatcccgtggccgaagccgaagtgtacacgaatttcaacaaaattgtgggcgataaaacggccgtattcatttcgcaccgcctgtcctcctgccggttctgcgatgaaatcgccgtgtttgaccagggccgggtggtgcaaaagggcgcgcacgacgcgctcgtgcgccaggaaggcggcaaataccgcgaactgtggcaagcccaggcgcaatactacgcaaacgaagcttcccaggattgacgcgccgcccatcttctgctatactggaaaaaaagcggttttccaaaggaggcattcccccatgcccttttccctggtacgcaacgacattgtgaacatgcgggtggacgccatcgtcaacgcggccaacagctcgctcgcgccgggcggcggcgtctgcggcgcgattttcgccgcggcgggccgcacggcgctgaaaaaggcctgccgggccatcggccattgcgatgtgggcagcgcggtgatcacccccgggttcaacctgcctgcccgctacgtgattcacgcggtaggtcccatctggcagggtgggacgcggggcgaagccgccctgctgcaaagctgctacacccgcgccctgcatctggcgcaggagaacggctgcgaatccatcgcctttccgctgatttcctcgggcattttcggttatcccaaaccgcaagccctgcgcgtcgccatcaacgccattgaggaattcctgttaaaatacgaaatgcaggtgtatctggtgattttcgaccgggccgcgctactgatcagcgagcggctctacgaaaacatccagcgctatatcgacgaccgctatgtggaactgcgcgccttcccccggcaggcagcagaagcgctgccgcacgcgcgccagcgcgcggagcaggcggatttgccccttgccgcgccgtgcgccacgcccggcaagcgctcgctggacgatctgctggggcatttggacgaatccttttcccgcatgctgctgcgcctgatcgacgaaaagggcatgacggacgtggaagtttacaagcgagccaacctggaccgcaagttgttttccaaaatccgcaaagaaggatacaatcccagcaagcaaacggccctggcgctggccatcgccctgcgcctgaacctggatgaaaccaaagatttgctgggcagggcgggctatgccctatcgcacagcaacaaattcgatatcattatcgaatacttcatcgaagaaggcgtgtacgacatcttcgaaatcaatgaggcgctgttcgccttcgagcagcggttgctgggcgcgtaaacgaccagactattgacaaagtctcgaaaaaaaggttctaatcagaaatgacgtacacgccgtcatttctgatgaaagcccgtccttcccataactttgtcaacgatcagaaacgacgcccatttgtcgcctggcaggcgacccaaagccgtgcaaaatgtggtatcctctcatcaagcaatggatgggaggaatttttatgaaaaccaatcgcacagaacttgtgatgattctggaccgcagcggttccatggcgggcctggaagacgacaccatcggcggctacaattccatgctcgagcggcaaaagaaaggcgcgggcgaagtcacggtcaccacggtgctcttcgacgaccagtatgaactgctccacgaccgcatccccctcaacgacatcgttcccatcacccgcgaggaatacttcgtgcgcggctgcaccgccctgctggacgccattggcaaaaccatccataaaattgccaacgcgcagcgccacatcgcagcggaaaagcgcgcggataaggtgctcttcgtcatcatcacggacggccgggagaacgccagccgggaatacggctatgccgagctgcgcgcgctggtggagcggcaaaaggagcaatacggctgggaatttctgttcctgggcgcaaacatcgacgccatctccacggccagccgctttggcatccaggcagaccgcgcggcggactaccacgccgacagccgcggtacccagctgaatttccaggcggtggggcgctttgtgcacgccgcgcgcgccggcgcgcccatgagcgccgattggaaggcggaaatcgaaaaggatttccgcggccgcaaaccggagcggtaagcgcgcaggcaacgcctgctccatgcttatagaaaaaacgcgctcccacccgcgcaaagtggcggggcgcatcagagcattgacaaagtcaaaatttcattcaaaattacgagattctcagtttcaaatcgcatgattatgtacttgatgaatcaccaattccgcgaccaacttcgctgacggcgtaaggaaacaacccctcagtcggctagcgccgacagctcccctttgtgaaaggggagcccagagtattgacaaagtctcggaagaacgaggctctaatcagaaatgacggcgtgtacgtcatttctggcattttttgcagagcaaacgcttgcgtttgcggtaaaaatgcattcccgtcccgaccgctggccgcaaatcgttagatttgcaagcggtcgggcagattcgttggcaaaccagaggtttgtcaacgatcagagctcccctttgtgaaaggggagccttttggaaagtagcacatcatagaaaatagtatcattcaagcatcagttatataaaatgtaagatatgtgtagaaaatcatcaacaaaatagataagatcaaaatccaatagacaaagaaaaacctttggatagtgtacctccatatggcgctgcagcacctaaagggctccccttgattccaaggggagctggcagcgaagctgactgaggggttaccttgcgtgtcgcaagcgttatcgttacgaattcaaaatgcaggaagcaaaatctattcctgcattttggaaatggcccccggatttatcagcggtctgacgcgctcccacccgcgcaaagcggcgagagcgcgttttttcatggataaaatccgtggcagcgcaaagcctagcagcgcgcccaatcctcacctgccatccgcaggcttttgacaaatgtgccctgggcgccgctcgcctggggcgcggattgcaagagcaaatagcaaagcccattgggaaatggatatttggctgcgatcgtctgcaccaagcgctgctccacaaacacctggcacccctgcgcgtcccactgcagggtcacacgctgccacttccctggcgcgcaattttcgcccgatagcgcgcaacttatgggcgaaagctgcccggcaaaagcgtcgcaggggttgaaccagcggtcggtcaacgtcgcggttacgccttcctccacaatttgcagcaaaatttccactttaccacaatgggccgcggggaaattccagcaaacgccctgcattgggctaaatagccgcgcatccgcgttcgcgcagatgtacagcgcctcttcgtaattcccatccggatccggcatcagaaccgccccatgggtacggttccacgcacagtggcccgcgcgcacgcgccggttgcccgaaacgctcttgagatacacctgcgtgctcacactttccagcccataggcaaaatcttcctcgcgagaagtttccaaaagccacttgggatccagcagaatcaagcgccgggcatacttatgctgcccgcaggagagcaaaatctttccatagggcatttccagcgcctggaactgatggacgctcttatccaccgcttcccccttgccgccgctggtgcgaaaatcgctgtcgttgcgaatgggattgagcaaaacctcccggaacccccgccaggttttgccatcgtccagggaaagcgccgcgtggttggcatcgcgattggtaaacacgtcctcgccacccagtccagaaatctcgccctcgttcatgggcggccaaatcttgcgcttgtccagctccggcaacggctgcgtgttgcaccagaacaaaaccatttctcccgtgtgcatgcgcaaaagcgttggcatggtgagcgtgccatggaagccagaaggtttggggctcgtccaggtttcgccgccgtcaaaggattcgtattgatagtggaaatccagcgacgtgcgcgtgagcatcagcaaactgccgtccgcgcgctccacaatcgtgggttcgcaggaaccgttttgccagcgcggcccctcgtggggccagacgggttcgtgcatgggcacgccttccaggcaggatacctgccaggtttccccctcgtcatccgtgcgcgccacgatgggccgcatgggccgttcgtacaattgcgcggcaatcaagatgcgcttgcgcgcgcgcagggccagcgggtagcggggacaacgcacatccaaatcggtgattttcacccagcgcaccgcgccgcccgggccctcatccgacaaaaccgcctgccatccgtgcgcgccctccggcggcacaggcatttccgcgccctgaaaacccccttcgccctccacaaaataggagagaatccagcgcccgctataggggctttgcaggccggaacacatggcatggaggtcgtccacgccgtattccttccaggtgaaaccgccatcgcaggaagaaagatacactcgcttcccatcccggcgcccataatgccggatttcgccatccggcatcgcgcacatatccatccacgcattggaaggcggcacgcccaccacctgcggcgcatacaccgcttgcaagcgccgcgcttcttcacaggacagccgttcttgcatcgcttccagatatttcacacccatcatcctttcaaagaaccgatcataactcctttaacaaagttcttttgcacaaagggatatgcaaccatcgccggcaaagcggaaaccacgatcacgccatacttgatgacttcgcccaaccgctgctgcgccatcagcgtttccggatcgctgccggattccagcgtggcttctgtggtgagcaaaatgccgcgcaacaccagttgaagcggatagagctccgcgtcggtgagataaatcatggcgttaaaataggcgttccactgtcccacgccatagtacagcgccatcaccgccaaaatggccttggacagcggcagcacgatgcgcatcaaatacataaagtgcgagcatccatcgagaaacgcggcctcgcgctgttcgcgcggaatgctgctcttgataaacgtgcgcgtgatgatgatgttggtcacggaaaccgcgcctgggatgatgcacgccagcggggtgttgagcaatttcaatcctttcacgataaagtacgagggaatcaggccgccggaaaaaaacatcgtaaacagcaacagcttggaaaataagccgcccatataaaaatccggctgagacagggggtaggcggcggatatcgtgagcacaaggcccagcgcaatgctccccgccgtatacaggatgctgttgcggtagcccgtcaatatggtatcaaacgtcatgatttccctatagccatccagcgtaatgccgatgggccaaaaaagcacttccccattccacacggcataaggatcgctgatagaggcgatcaccacaaaatagagcggatacaaaaatatgagcaacaaccctatgcaaataatgacgttcacaacatcaaaaatgttgtccgctctgcattggcgcattccatggattctcatgcaaccacccctatcaccaaagacttgtgtcgctgaccttgcgggcaatcgtgttcacaaacaacagaagcaccatgttcaccacagagttgaacagcccaaccgccgcggaatagctatagtccatattgatcaggcccattttatacacgtatgtggaaatcacttccgaagccgacacgttcagagaattctgcatcaaatagattttttcgtatcccacagacatgatcgagccgcagttcaaaatcagcataatcaccatcgtcggcgcgatggagggaatatcaatgtgcaaaatccgctgcaatttggtggccccatccatataggccgcctcgtgcatgcccggatccacacccgccaatacggaaaaataaatcacgcttccccagcccatgccttgccacacgccggacagcacgtaaatccacaggaaaccttccggcgtcatcaacaggttctgataggttccgcccgcccttttcacaagggcgttcaccagcccctgattggaaaacatgatgctgatcatgcccacaatcgccacggtagaaatgaaatgcggcgcataagaaatcatctgcaacgcctttttaaagcgcttttggcgcaattcgttgatcagcaaggcgagaatcaccgggcagggaaagcccagcaccagcgacaacaggctgatgcgcaacgtgttccatatgatgctctggctgctataggagcggaaaaaacgctcgaaatggtaggttccccaccattcgctgccccaaatgccccgcgcgggcacaaaattgcgaaaagcgatttgcaccccgtacatgggcgcatagtgaaaaatgataaagtacgcgagcgcgggcaaaaaaatgagatacaattgataattttgccggagatccctgcgcaaagactgccccacgccagatgccttcgccatatcctatccccctttatccgccatcgaattggaaagccgcgccgaacgccattccgttcggcgcggcatcgggcaaaatcagccctcgagggcgtctatgccttcttgcataatggcaagcatgtcattcaggcgcatattttccagcgtcgtgcaatagttctcccattccgcgtcaatatccgtgcggccaacgatgaactccgccatcatctgatccacgtaggaattgatatccgtagcgatggtatccagctcgctctgcgtgcggtcgtcatatacgatgatgggataccgttctgcgaatgcttcaggattcgacagagccagttcagagttttgcgaaataaaccattgctccgaagaattggccgtgctcaaccatgcttccgggtatgccgaagcgtttcctccacccggctgcaaagtataccgcgcacgaatggtggtcgtatcttccccttccggaataataaagtcccaagtgccatcttcaagccactcatagcttacgccttcaattcccatccatgctacgcgtgcgccttcctcgctatagaaaaagtccatgaagcttactgccttttcaacattttcacacaaggaggtaatcacgccagtaaacgcagtacctgcgacacggcgcgtccacagcggttcggtgttttcagaatggataatcggcgtagcaagcatgtcccaagcgcgatcatcgccaacaaccaacattgcgttcgatgcggcagaagaaccgataatcggcacttcattggtgcccttggccaacacctgctgctggttctgtgtgaaggtttcactgtccagcaatccttccgcatacaggcggttaaaatacttcagatactccttgtaattctctgtgttggccaagaaatatacgttgccagcttcatcaatatcacagttgttgactgatgattcgaagggaagggcaaaaaagttccccaagcaccgaagaccgctctgcccatagagcaaagacatggggatttcgtccgcttcgccattgccgttgggatcctgggtcttaaaggccaccagcacattgtaaagttcttccgtcgtttccggcatttccaggttcagggcatccaaccacggttgatagatcataaacaggtttgtaggcgtaattgtagtctccgtagtgacaaaatttccttctgtcacaaagccgcctaacgttccatcgctatagtacgccaattccttgatgcccgcatttcgttccagcagcgccatgtaattgggcatataatcgatgtaatcattcaacgcgacgaacaatcccgcatcaatattctccttcacaactatagaagaaatgctacttttggtgatgatatccggcagatcgccgcccgcaagcatcacattgaaccgctcattccaggcggaagaatcaatttccgtgaattccaaaaccacgccgttctgctccgccgcgtatttccaggcttcattttcttccgccggaacgttcaccgcggcgttgcggcagacgagaatgctcaaggttaccggttcttccgcttccgcgagcgcgcactgggaaaccagggccacaacgagcacaagcgccaatgccagtttcttcatcgagttctcctccttcaattcgtcgtccactaaccctgtcccgccccgtcgcgaacaaagcggaaccatttctggcagcgtgccggcctgccaagctaatacaaagtttagccatttccatggaagaagtcaatcggtaatccgcgcacaaaatatgcaatcttctgatttttggtttccctcttattttgcatattcctttctggccttgcggtactgcagcggcgttacgccttcctgctttttgaatttgcggatataattgttcacatccacatagccgcaggagagcacaatctcctttaccagcaaatctgtgcgcaccagcatttcgcgggactttcgcatgcggatttcatccagcatcgcagccacggtggtttgatgcgtctccttcaggcaattgctgagataattcttagaaacgcccacttgcccggcaatcttctctggctcgagcatgggatcgccatattgcgcctccatgatggcaatggcttcttgcgatacgttggcgcgcttatgccgcttttcctccgatacaaaatccaaaatttggtccagcaccatttccaaagaatcctgcgcctgattaatggtctctggttcgtaatccgtggcaggaaaagtaatattctccccgcaggccagttcccgcgcaatgcgcatgagagttgttacaatctggaaataagcgctcttaaatgtgctcggattgggttcctcttcgtagaacatggcaaaaaagcgattcaattcctgccgggcaacctgacggtcggcaaccagacaggcgtttttgagcgccgtcgcattgccatcgccatgggtgcgcgctcgcaacaccgggggacaatcggcgtccagcaaagcgttccatcccgtttccaaacgcatatacatcagccggcgcacctgcgcgtattgctcatccatatcttcccattcatcaaacgcccgccccaccgcaaccgttacggtttgctccgttagccgcaggatatcctccatggctctgcggcaggcatccagcacggcatctctgcccaccgtttcccgcggcgatagcagcattagcgcctgccggttttcattcatgggcgtggcaatccgcaccgtgcataagccatccagcaccgcaaacgcattcatcatttcctcctccattgccaagcggttagatgcgtcgtaggtactcacataggcttgcaactgatccagggccaccagaatgaacattcttttgccctcgccccactcccatgcgggaatggcgctcacatccgaaggccgcggcgttttgccgctcagatacgtatttagaatgttcacctttagcgccgccgtttgcacatcaatcaacgaggccagccgggccttttccgaagatacctgatggtattccacctcaatatcgttgatttcgcgatagcgctctcctttgcccgcctcgggctgtgcttgcgcgccggaaaggatgcggctgcgcgccaaatcgatcggccggtaaatcttcctcgtcagcagtcgcgccaaaataaggcccaggggaagggaaaccgcaatataaatatacaacatattccggtattcgtccacaactctccgcaattgcgggcgcacaatgccaatttccagcgataggcccaccgcattttgcgaatcagggcggcaaaccagcgtcgcttgcgagccatactcgcggtgaaatagctgctttccatcctgcgcatagagcgtgaaataggcaagatcgtccgcaaatgctttttctatttcctgctcaatttgggtagcgtccagcaaaaacatcgccacgcgccgcgaggcgggatcggatggcagcaaatatatgctagcgatgtgcttgccatcccccatggttttcaacacaagatccgtctgcgcggaaaaatagggctgcacatcttccaacttcaattgcaggttcgcattgatcgtatcgaaataaatcttgttgatgagcacggtatccgaaagcacatattgcatggcctcattggaataaaacaaataaaatccatccgcgatatcgatggaaagggaatagcgccggatggcgttataggccgaaagaagctccgattcttcctttaagagattcgagctccacagggccgtatcgctccccatgttctgggtaagctcataaatcatcagcatctggccatccacattgtcctgcaattgctgcgcaaaatggttgctggaacgctcgaattcatcatcggtgaattgccacagcagccgcacaatcaggatggcggcaatcccaatcagaacgcccatcatcaaaaggtacgtgatgatcaggctgtttttcaagctgccgttttgtgcgcgccgcgcgtttttcatcgcaatccgcctttcccatttcgctcatattccccataaatcttctataaaaattctccttccgctgctcaccttcctgccgatcccacaaattgcatatttttcagcagaaaaggcgatggaaaccgcgcactttgggagaggaatgcggcctttgcgcgcataaaaacggcccgccgctttctggttgcggcgggccgtctgatcgccaggcgacgatccgaagttgcttattgcagggaattgaccatttccacgatggcggtgtgcacggcttcggccgtgtttgcgctgatctcagtcgcggcctgcgcggcagcctcttcgctttccgcttcggcgaccgccgtttgcaactgcgcgtacgcatcgtagcactgctgctgcagctcggcgagcttggcatccacatcggcgatctgctcttccgtcaggtcgctatacagcaccaggttggagagcgcgtccgccgcccagtacatggaatcggcccagttttccgggaacacgcggaagccttctaccggcacccgttcgcccgcttcgttgcgcacattgcgcgtggtgggatagtacacgccgctctccggctcttcttccacgaactcggcgggcagagtgctgagctgatatccggcataggtatcggtggtcagcatcgggtagtaaggaacaaaggcgctccaggcggcgttgtccatggcaacccattccaccgtgtcggtggcgctatcttcctcgaacacctggaagatatgcacttcgaggttgctggcagaaccgatgccttcgatatcgtagtagcccaccacgtcggcgatggtgtagggatgatccagcgcgatattggtgtacatgggcacgatgttgccctcggcgtccacgttggaaatcgtataatcgctggtggccggttcgtccgaagcttcggcattgaagtacttcagcgcgctgaccatgcggctgttggccgactggtcggcgttgtaagaagccacgtaatcgatcgtgttggcttcttcatcgcccacataggtgcccgcctgttgcgcgaggccaatgaggttttccgaagcgatcacgttctccgtgtcgtccagatcgatcaagccgatgatggacatattgggctgggcgaacgccatgctgtcgctcagcttcagcgccaggtactggtggcccgtgacgttttcaatataccaggtctccgtgttgtccgcgatgaacaggcccgcgccgccgctgcagcccaccgtatcgtaaatgttcagcaagagatccaccgcttctttggcggtcgccgcctcgctgagcaaaacggtgacgatttcggcctcttcaatgccggtatccgtgtagggatcgagttcatacacggcgtccgaaccgccgatcgtttccgtggcgctcacgctcaggcccatctcgttggtgccagccgcctcatagggcgtatgtttatgcgtgccgccgcaatcggggcaaacgccttccaccgcgtcgccattgtcatcgcggaaagcggtgtagctgtagctatcgtgggtaaaggtgtaagtaaaaccatagcagccgctgtattcttccccagcggtgtggttgccagcggggctcacataaaagagtttgttatagctgttggaaatgtcctccgagcgggcgaacatggtggaaccatcctccgtgagatcggaacccacataaatcgccgtgcaggccatggcgcccacggaagagaagcacatcaccagcgcaaccgccatgcacaaaagaaccttaagctttgcagaacccataattgcaccttccttgcttgctttgatggcttgtattatagtgcatatttattaggttgtcaaggaataatatacgtaaaattttgatgacggcgccacatacgccaggcgctcattccaagcggtaaaaagcgaattccgccaccttcctgccgccagcgtgttccgccagcaaagtcgaggcgcggttttccacgtcgatcacgcccgcttccgccacgcgccccaaaaggggcaaaaccgcgcacaccagggcggcaatcgcgccccggcgctgatacgcgggcaaaatccgcgcttccgcaatgcgccgcagccggccgttggggagcacgatcatataacccgccagttcgccgcgcacgcgcgcgatggcaattttcggccgcggcagcgcgcaaagcgcgcgggccattggttcctccgcaacgcccgcgatttgcgccacctgcgcgcacacttcgcggctcgccccgcataccgcgccagtcgcgccaaagcgcgcggccatacgcgcccagatgcgcgcgtcctggggcacggaaatttcatacagcccatcgcggcgcaccacccgcgcgccacacgcttccagcaagcgcgcgtaatgcggcggttgcacgggcgaaagccggtctttgcgcgcaaatcccgctgtgcgcacgccttccagcagccgcgtgggcgtgggcgaaaccgggcccacgcacgcgctttcgccctgcgcggcctgccattcccgcacgcgggcaaacaattcccgcgcggcccccaggtcatcctggagaaacaagcgcgaaaaacaaccgcgcgccacttccgcgcgcgcggccactttcccttgggatacaactttaatttccatcttgcaaagcgcgcaacgcgcgcagtagactgtcgaaaaaacaaagagaggggcaaagccctttcgcactttaatcgtccccggcggcgtgtacggcgggggcgcacgaagcgcgcgccctgtgggcgaaacagcgcgaagtaagcccaatgaagcagggagtgccacaagcgagcttgcgagcgcagtggaacgaccatgctgaattgagggggtgcaggagctcgcaatatgccgcggcggaaaatcccattttccagagcaaaaatcgcttccttgcagtttccgtgcccggaaatccgtaggatttcagcggaaactggaggggcgcacgaaggccgcgcgcagtgcgcgaaacaggccgtagtaagcccaatg

SEQ ID NO: 3728 - DNA, 2270 bp, Unknown
  16S sequences of unknown bacteria
aagctggtcgagcgcggcgtgaagatcatgggcacgagcctggaagatatcgaccgggccgaggaccgtcatgagtttgaggaaatgctgcatcagctcgatatcccgcagccaaagggcgagaccgcagtagaggtcgaagaggcggtgaagatcgccaaccgcatcggctatccggtgctcgtacgcccgtcttatgtgctgggcggacgtgcgatggagatcgtgtacaatgatgacgacctgcgggtatacatggccacggccgtcaaggagatctcgcatgacgcgccgatcctggtcgataagtacatcgtcggcaaagagtgtgagatcgatgccatcgcggatggcgagcatgtgttcatcccgggcatcatggaacatatcgagcgtgccggcgtgcattccggcgattccttctcggtctatccggcaccgacgctctctcagaaggtaaaggagacgatcgtcgactatgccgtgcgcatcggtaagggattccgcttcgttggcctctacaacatccagttcatcgtggacaaggatgagaatgtctatgtgctcgaggtcaacccgcgcagctcgcgcaccgtgcctttcctcagcaagatcaccagcgtgccgatgtcgcatatcgccacgatgtgcgtgctgggccattcgctgagcgagcagggctatccgatcgactgtgtcaaggaagaagagaagcgggtgttcgtcaaggcgccggtgttctccttcgccaagctgcgcagcgtagatacgacgctcggtccggagatgaagtcgaccggcgaggcgctgggcggcgatgtgacgctgcacaaggcgctgcacaaggcgctgattgccagcggcatcaaggtcccgctgcagggcaatgtgctcatcacggtggcagaccgggacaaggaagaggcgctcaagatcgccagacgtttcttcgatatcggttatggcatctatgcgaccaacggtaccgcgaaatatctgcgcgcccacggcatcttcgtgcatgacgccatcaagatcagcgagaatccggacaagaacatcctgaatttgatccgcatgggccgcatcaattacatcatcaatacgatggagccgcataagagcgcttcttcgacggatggtttcctgatccgccgtgtcgccgcggaaaacagcatcagctgcttcacttccctggatacggcatacgcgatcctcggcgtcgtcgaatcgatgagctttaccgccatcagcatgaatgagctggagcactgagatggagagcgtaaaggcagtcgtgatcgaaaacatccagatcgcgaaggatacatataaaatgagcctgcgcagcgagatcgcggcgcagatgcagcccggacagttcgtcaacgtacaggtcagcggcttctatctgcgccggccgatctccatctgcgaggtggtcgataaacagcatttcgtcatcatctacaaggtggtcggcgatggcacgaagaagctgagccagctgccggccggacatgcgctcggcgtgctcggtccgctgggcagcggctatccgatctgtgcggaagaagaggcggtcctgctcatcggcggcggcgtcggtgtgcctcccctctatgaattggccaagcagtatcggcggatcgatcgtaaggtggatgtcgtgctcggcttcaatgacgctcagagcgtcttctatgcggatgagttcgccgcgctgggctgcgcggtgcatgtggcgacgatggatggcagcgccggcgtgaagggcacggtcatcgatgccatcgacgcggcaggcatccagaccgacttcgtctgcagctgcggcccggtgccgatgctgaaggcggtggaggcccggtattcccggggatatatgagctttgagagccgcatggcctgcgggatcggcgcctgcatggcctgtgtcgcaaaggaccgcaaggaggcggacctgtatcaccgcatctgcaaagagggaccggtgttcccgatcggaaaggtggaattctgatggatctgcgtgttaagcttccaggcctggacctgaagaacccgatcatcccggccagcggctgtttcggcttcgggcgcgaattcgcccagctgtatgatctcagcctgctgggcggcatcgccatcaagagcgctacgccgaaggcgcgctttggcaatccgactccgcgagtcgccgaaacgccgatgggcatgctcaacgccatcggcctgcagaacccgggcgtcgaggtgatcatggaaag

SEQ ID NO: 3729 - DNA, 10905 bp, Unknown
  16S sequences of unknown bacteria
gaccaccgagatctacactctttccctacacgacgctcttccgatcttcgctttctttggacttcatttctgacggattcaatgatatgctaggttcatcaaaacgaggaacgttccaggaaaaataaataaggaaggaaagcaatggacttattaaagaaagaaaatgtgcagatcgttgaaagtgcaacagactggaaagacgccattcgtatttcggttcagccgctggagcagcatggatatgttgagtctcgttacaaagaagaaatcatatccaatgtggaatccatgggtccgtacattgttctggctccgtatattgcattaccgcatgcaagaccagaacagggtgtgaaagaaagccagattgctgttacactgcttcagaatgaggtcagatttgcaggtgaagagaaaccggtaaaacttctgattgcactggctgcgtcggataataaccgtcatctggatgcgctgatgagcatctcggagattttgcagaatgaagataccgtacagaaaatattaaattccaaagacaaagaagaattatattcctattttgaataaggagaggggagaaaaaagatggcagtattgaattttatacagcaggttttatctacacctgcgattttcgttggattactcgcattattaggtcttgcactgcagaaaaaagatgcacagaccatgatcaaaggaaccattaaaacaatcttaggatttatcgtattgaatgcaggtgcatctgttgtgcagcaggcgatcattccgtttggagatctgtttcagcttgcattcggagtacatggcgttgtgcctaacaatgaagcgatcacatctctgggactgaccgagtatgcagtacagactgcttccatttttgcactgggtatgtgtgcaaacattgtacttgctcgtttttccaaatggaaatacattttccttaccggacatcatgcactgtatatgtcctgcttgattgcaatcattcttacgattgcaggctttgatggatggatgctgatcgtcggaggcgcactgttgttaggatttgtaatggcactgttcccggcattgatgcagccgaccatgcgtaaagtaactggtaatgattctctggcacttggacattttgcaagctgctgttattggctgagtgcacagatcggcaagatctttggacgtaaagagggaactacaacaacagaagatgtgaagtttccgaaaggattatccttcctgcgtgacaataccatttctatcgcaattgcaatgtttttctgctatatcatcgttgcaggtgtagctgtatttgcagatccggctggaactgctgaaattatcggagaagataattggatcctggtgtccgtgatcaatgcaatcacattctccgcaggtatttacattgtgctggctggtgttcgtatgctgattgctgaaatcatcccggcattcaagggaatctctgagaaactggttccgaatgcaaaaccggcgttggattgcccgatcctgttcccgtatgcaccgaatgccgtactgattggtttcttctgttctttcataggaggaatcgtaggtctgggagtcctggcacttcttggtaatgtaggactggcagttgcaatcatccttccgggagcagtggttcacttcttctgcggagcaagtgcaggtgtttgcggtaatgcaacaggtggccttaagggatgcattgtaggttcttttattcatggaattgtagtgactttccttgcagcaggacttctgccggtgcttggatcctttggatttgcaaatactacgttctccgatgcagattttaccatcgtaggtattatcttcggaaaccttgcaaaagtgctgaatacaactactatgttcgcagtgatcgtggtactgtttgttctgccgatcctgtataattacaccattggtgcaaagaaaaatgaagtaaaaggagaataaaataatggagattaaaaagattttatgtttctgtggatcaggtcttggaacctctttcctcatggagatgaatgtgaaaaaagcactggaaaatttaggaattacagatgtagaagtagagcactctaccatcgatgatgtaatgccgggtgcagcagatctgtttgtctgcggagcagaccttctgccgaatgcattgagtgcaggaaaagccattggtctggaaaacatggtttccatgtctgagatggaaagcaaactgaaggaagcatttggattataaaatgtactgaaaaagtggctgctgtgcaatcttgtacaacagccattttttggttgcatctggttagaagtaccagatataatacaggcatgacaaggaggtgacctggtgaccgtattaaatgacagatgttcacatattctgaatacattattatggagcaacgattatatttctctgccacagctggtggaagagatgaaagtatccagacgaagtatctactatgatatctgcaggatcaatgagtggctggaggaaaatgatatcaaggagatcgccatgggacgtggaaggggaattctgattccagaggaagacagagatcggatcaaagctcttcttctggaagaaaatccggacacaaattactattttcagccaagtgaaagagtgaagctgatcatcatgctgatcttttacagccagactccggtatatatcaatcaactgatggagttctgtcaggtgagccggaatacagtttttggtgatctccgggtcgttgtcaacacacttcacgaatatgatctgacattggaatatgaaagtaaaaagggctacaccattggtggagatacggtgcgtgcacgtgcggtatttttgctgctgtttacagaactccgacgtctgtacgataaaaatgttcttacgtttcttccacagagtgtgatcaatggccatctgaagcagctggaaaccattgagaaagaactggggatgcattatgtggatggatgccttcttggaattgcagctatgatgccggtgattaccagaaataatggtaagctttattttccgggtctgaaaaaacaggagattgagcaatcagcagaatatcatctggtaagcagacattatgcggaactggaagaactggagagaatttatcttacgctccatcttctgggagcaagaatcaccactgcttcggatgatattttcgagaatgtcattgatgaatctgtatatgggattacaaagtcccttgtaacagagtttgagaagatttcctgcgtgaattttgaagacagagagaatctggaacgggatctgtttgtgcatatcaatgcatccatgtaccgatatcattatggaattcagctgggaaatcctttgtgtcaggatattaagagggaatacccacatgtgtttgaaaccacaagaattgtatgtaaatatctggaaaaaatgattggaatcccgatgctggacagcgagattgcatatctggccatgcattttggggcacatttgaaaatagtggataaggaaaatgaagaacttcgtattctgatcgtatgcgcaaatggggtttccattggaaatatgctcaagagagaggtacagaatctcctccctcatgcaagaattgtgggagtggcagcggcagtggatctggtaaacgtgcaggatatttgtgatctgattatttcagctataccggttcagtgtattgtacctgttatatttgtgcattcagttctaacggatgaagaccgcaatcatattctgaatcatcggttagtggtgaagcagagcaaagtggagattgaaaaatctttgttcgacattatgaagaaatatgtaccggaaccggagcaggagaaagtaaaagcagagattctgcattgccttcatggaaatgaagcagaaaatcatcgtacgttatggatgaaaaatggacttctggatcttctggatatttctatgatacaggtcacggatgatacatatttctggcaggacagtatccgatatgcaggaagagaactattgcagacggatagtatcagcaaaaaatacctggaaacgatcatatcacagacactgtattatggaacctatatgtttttaaaccagtcgatcatgcttgctcatgcaaaacctgaagatggtgtctgtcatatgggcgtgcagatgacggtgtttcggaagccggttgagtttcctaatgaccaccatgcaaagattatctttgtgctcgcagcggaggatcaggaaaaacatctgaacatgctcaatgacattttcaagatagtatcggatgcagagctttgtaataagattgcagagcagacatcaccggagggaatcttatatttactaaatcaggcattaaaataaaaaaactgcggattttgctacgttggtaacaggatccgcagttttgcctgtattagattcggatgggagaacgatactctttgcccatcatctgtttcttcttctcctggaattcccagaaataatcttcccgtacatcggaccattcatgggtggtgcggtcatagacctgcacatattcctcaatggtcggatgcttccggaccgtgttggtcagatattcttcaccggtcagaggattgatctcaccaactggacgggtacgtcggaaggcatcgggaatctggaaggtcgggtgtgcatcggaggtgaccgcagcttctgccggactggtggaagcggagtcatcatgaacggattctgtggatgtctctgtagatgtttccggtgcatgatccagcgtattctcattgatatccgagactgcttcttccagtgcttccgcagaaggtgttgcttgtgcctgttcctgagcagcaagtgcagccgggaagagttccgggacttttccatctgtgggttccagctgaatcgatacctgatagccgagcagcgctgccaggatccgcatgtcctgttcagggaagttatcgcgtctgagccgctgtgtcaggttctgccgggacataggcatgcctgtcttctctacatacagatctgccagctccttgatcgtcatatttttccgtttcaataaaatcttaatctgttctccgaaggaaagttccatggtacgccctcctgcttatgctgtctcttaagtgtctgttctgattataatacattattcagaggttgtaaattaaggaacacctgcagatcagatagattttataaactgatccgcataaaacagtgcagctccgatggcaggtgtatactgaccgtgaacaccgaccagaatctgggagcgtttcatagaaaatggggtagaagcattgatccggtccagcagataattgatgtcatcctctgtgaaataaggagccagatatccgctgatgaccagaggtgcatcaatgatcaggttcagatttctcatggcaaacgccagatgattcaggtaatcttcccagatctgtgtcagttttgaagaagtctgctcgcgtaattgtgcaaaaaattccttgatggacagaccggatgcatgttccagagagttggcagaacagtaagtttcgaggcatccccggtttccacagtaacaaagaggaccttctggattgacacacatgtgttcaatagttccgctgtgcatggaacttccctggtggatctgatgattggtgatgatagcccctcccatattacggttcaggaggaaaatcacagcactgtccagttccgggtgattccaaagttccagaaaggcagcagatttggaatcatgttccaggtggcatggatagggaaggtaacgggaaaaatcttccagatccatatccgtattctgcatgatatttccatagatcacagtcgtgtgatcaggggaagtaattccctgtgtggcgatggaaataccaagaatcttttctggttcatactggttgagggagataaattccttgatcttgtctgttacttcctgatagtacgtacttgtattggaataagcaagtggaacggtctcggtattgatgacttcaccatacagatcaacgactgtaatatgaaacatatttttcagaataccgatgccgatggacagacggaaatcagagacgatccgaatagcctgagccttgcgaccgccggtagagtcgaaatatccatttcgctcgatcaatccttcctgttccagaagattcagattctgactgaccgttgacagccccatctgcagatcctgaacgatctggagcttggaagttacttttgatttgtaaatgtattgatatactttggaacgattaattttttttagattgatcgttgttaatcctttttcactcataggcttctcctgctgaagataggtatttctcataatagtaagttttaatcatatattagtataccctgtggcaaaatgcaatcttcaacaaaaatccagtaaaaatgcacaaaattagtaaaagaaaattgtaaaatacgttgattgaaaattcatatcaatagttatatactacacttacagttaagacataaacttaagtaagaacaaaatggagggtacagacatgacagaaccgatatttgcggcagatcctgcacgtttactgattgcatcagcagcgggaattattttattgttgctgctgatcatcaagttcaaggttcatccggtattatcattattgatatcggcactttttatcggactgggggcgggaatgccggttccaactctggtcagcaccgttgaaaaaggagcaggggacacgttacagggaattgttcttctgatcggacttggatctttatttggaggaatcctggaggtgtcgggaggagcacagtgtgtggcacatacgctgatcggaaaatttggggagaagaaagctggtattgcccttggaatcacaggattggtggttggaactactgtattctttgaagcaggtgtggtgatcctgattccgctggcatttggacttgccaaaaagacaaagaaatccacgctgtattatgtgatcccgctgcttgccggactggcgactggctttgcattcattccaccatcggctggctctgtattagttgcaaatatgctcaatgtggatctgggagtgatgattgcagttggtgttccggtgggaattctgtcgttgatctttgcaggtatcctgtggtcaaaatttattggaaacaggatcaatacaggtcttccttccagcattcaggaagtaagggaagcagaggaggaaagtcttccagcattttcaatggttcttatgattatcctggtgccgctggtgctgatcctgtgcagtacagtatccgcctatattccggggatcgatccggtacggccggtattggaattcttaggaacaccgtttgtggctttgattatagcggtgctggcggctatgtattttctgggagcaaaacagggatatgatggggaacagttaaagaagattctggatcgtgctttacgtcccaccggacagatcttgctggtaatcactggaggcggaatcattcgctgggtactgcaggactgtggtatgggaaatattatcggaccggttctggaaaaaagcggactcccgctggttttggttgcatttctgattgcggcactgatccgtgcatctgtgggagcagctgtagtagcaatgaccatggcagccggaattatggcggccatgccgggggtggcacagttatcaccggtatatctggcagctatggtctgcgcgatcaatggtggggcaactgcattcagccatgtaaatgattctggattctggctggtaagctctctgttggagattgatgaaaagaccacgttgaaatcatggaccatgatggaaacaattattggattgacaggtctggtctgtgcaatcgtgatcagtttgtttgcctaggagggaaagatgattgtaaaagttgttttgggaagcatgcaaagagcgagaaaactggtaagcattgcggaatccattccatatgatgtggagttgtgcagtggccgttatgtggtggatgccaaatctatgctgggtgtgatgagcctgcctggatttgatgtgggagagcttcatattcatacggataatgaagacgaatgtgaccggatccttatgcagctttttgaagaggaattgctggaagacagcaacaatgcggtacagagatctatctatgatattactgtatttggcgagatcctgattgattttacatcacagggaatcaatgaagagggacagacattatatgcgagaaatcctggaggagcaccggcaaatgtggcagtagcggcatcacgtctgggagcccatagcgcatttcttggaaaagcagggaaggacatgcatggagaatttctccggtcagtactggaaaaagaacaggtggagaccagaggaatgctgttggatgaaaaatattttactacgctggcatttgtcaatgtaaatgaggcaggagaacggactttttcatttgcaagaaagccaggtgcagatacacagatccagaaggaagaaattgatgtggatgtgttggatcataccagtatttttcatgttggctccttgtcgctgacagatcagccggcaatggacactacattttatgcagtaaaacgtgcaaaaaagaaaggcagcatcatatcttatgatccgaactatcgggcatctttatggaaggatgaagtgactgccagaaagcagatgagaagcctggttccttatgtggacctgatgaagatttccgatgaggagacggaacttctgacagatgataaagaagtggaaaaagcagcggaagagttatacaaacagggcgtaaaagtggtcgtggtcacactgggaggaaatggtgcctatatatatggaagagaaggaggcgtgatggttccgggatttccagtcagccatgtggcagataccaatggggcaggagattctttctggggaggatttctctatcaggtcaatgcatcagggaagagaccggaggagctgaccaaagaggagttgacagaatttgcacgatttggaaatgcagtggcaagtctgtgtgtggagaacaaaggtgcgatcccggcaatgccgacaatggaacaggttgaaaagcgattggcgcataaataagaatataaaaggaaaacaggaggtaggatatgaaactgacaatggaaggaatcaaggatcagaaagcatgggaacaggcagggatcaaactgccaggttatgatgtggaagcggtagccgcaaaagcaaaagaagcgccggtatgggtgcactttggaattggaaatattttccgtgtatttattggtggtattgcagacggacttctggaggaaggtgcgctggatcggggacttacctgtgtggaaacctttgactatgatgtggtggataagatttacagaccttatgacaatctggggctgagtgtgatccttcatggagatggaacccgcgactataaagtactgggttctctggcagaatctgtaaaggcgcaggtttctgatccggcacagtggaatcgtctgaaggagatctttaccagtccgtctttgcagatggtttcctttacgatcacagaaaagggctatgcacttcagaaagcagatggcagctggcttccttatgtggaggcagatattcataatggtccggagaaaccgtcaggggcaatggcagtgctggttgccatgctgtatgagcgttataaggcaggaaagtatccggtggcactggtgtctatggacaactgttctcagaatggagccaagcttcgtcagtccgtgctggccatgacagaggaatgggaaaaagcaggatatgtagatgaaggatttgcagcatatgtagggaatgaggatatggtggcattcccgtggacgatgatcgataagatcacaccgcggccgagtgagcagatcgcagcagatctggaaaaacttggtgtggaagatatgcagccggtgatcacaggaaagaagacgtacattgcaccatttgtaaatgcagaaaaaccgcagtatctggtgatcgaggatcatttcccaaatggaagaccggcattggagaagggatttggtgtatatatggcagaccggaatacagtaaatctgtctgagcgtatgaaagtaactgtatgtctgaatccggtacactctgcaaccgggccgttgggtgtggtcctgggctatgatctgtttgcacatatgctgaataccaatccggacatgatgaagatggcccgcacgattgcctatgatgagggtcttccggtagtggcagaccctggaattctgtctccgcaggcatttgtcgatgagctttttaatgaccgttttccaaatgagtatctgggagatacgaatctgcggctggcagtggatgtgtctcagatggttggaattcgttttggtgagactatcaaggcttatgtggcgaaatacggggatgcttccaggctgactgcaattccccttggcattgccggatggcttcgttatatgctggctgtggatgatgatggaaagcattacgaactggcaccggatcctatgaatgaggagatcggggatcagttgaaggacattgtaatcggaaaaccggagacatttaccgatcagctccgtccgattctttccaatgagcgtctgttctttacggatctctatcaggcaggcgttggggagaagatcgagcagatgttccgtgagatgatcgcaggccaaggagccgtgaaggcgacaattcataaatatgttggctgattgggagtaatctgcataggataagacggggtgatccgtttgaacagtcagaaagtagaagatgaattaaatctggcactggatgccacgcaaa

SEQ ID NO: 3730 - DNA, 2968 bp, Unknown
  16S sequences of unknown bacteria
cgcggcgctggggacgaagcccgagagcacgcccgcaaggcccacaccgcacgacatgacgatggctatcgcaagctcggcgtgcccttcgaagcgcctccgcacgagctcgatggcgcccgccgcagctaggcacgcgacgacggagcccgcgacgggatcgacgccggcgatgagcccacctgcgacgcccgcgagcgaggaatgcgaaagcgcatcgcccatcatcgacaggcgcttcaagacgacgatgacaccgatgcagggaatggccgcgcccagcaccatccccgcgatgaacgcgtggttcatgaacgcgtattcgaacattgcctcacgctcccatccgcacaggcgtgcgctcttcgacaatgccatcgtgcaggcaggcgacccggtcgaacaaatcgggcatccgcgcgaggtcgtgggtgaccagcagcgcagacgcgccggactccttcgagatgctcgagacgagcctcaccagcgagtccgcgctctcggcatcaagattgctggttggctcgtcgagcaggagcagcttcggagccgagacgagggcgcgcgcgagcagggcgcgctggaactgcccgccggaaagctcgccgatgggccgcctcgccaggtcctcgatccccgccgagcgcagcgcctgcagcacagcctctctccggccgctccgatcgctccggctgttccgccggcccccgagaacgggcgccttggggagcacggcgccgacaacttcctcaaccgaggcgggaaaatgccggtagtcgtcgggcgcctgctgtggcacgtagcccacggcgccgtcgattgcagcggcagacggagcgcgccccagcacctcgacggttccttgatcgggcgcgatctctcccaagatgagcctgatgatcgtggacttccccgccccgtttgggccgacgagtgcgcagagctcgccgggggcgagcgaaaggcttgccccttcgagaacgggggtgctgcgatacgaaaagcggatgtcgtcaagttgaactgccggctccattacgagagcgccttcacgagcttgtccagatttgactccatgacggagaagtaatcctcgcctgcggaaatctgctcgtcggtcaggccttcgagcgggttcaggacctccaggctggctcccgtctcgtcggaaatcgcctgcgccgccttggggctcaccagctcttcggagaagatcgtcttggttccgttctccttgacgaagtccacgattttggccatggtcttggcatccggctcggaatccgcctcgatgccctcgatgggcacctgcgtcaggccgtagcggtcgcacaggtagccaaacgcctgatgcgagacgacgatgttcttgcttgcggtgccggcgagctcactggcgtatttctgatccagctcgtccagcatgcccgcgtacttctcgtagttcttctcgtaagcgtccttcccatccgggtcggcctcgatgagcgcgtcgcggatgttcgccatctccaccttcgcgttagcgggagaaagccacacgtgcgggtcgtactgcccatggtcgtggtcggcttcgcggctgccttcatgctcggcttcgtgctcgtcacctgccgcggggagcaggtcgacgccctgcgaggcctcgaccgagacgaggtctttgttgccgacagcactcgtgacgtcgttcacccaatgctccatcccggcgccgctgtacacgagcacctgggcggacgcgatggtcttcatgtcggcggtggacggctcccagtcgtgcggctcggtcccggccggcacaaggcaggtcacgtccacgcggtcgccgccgactttctgggcgaagtcgtacatggggtagaaggatgcgacgacggagaccttgtctccggattcggaacgggtgctctgagcagtgccgttcgtcgagcagcccgcgaagactgcaagggatgcgaccgccgcaagcgccgccagagcgagcgcgaggtgtttcttacgcatatgtgtttcctccaaggaagggtgtgtgacgccggcgtctatgccggcgctattgagtgttgggtgtccttagtgcttccgcgtgaaagcggcagggaaactcaatcgttcatccgcaccctgagggaaaccggcgtatcaaccgcgagaaggagggtcctgcgcaggcacgcggccaccgtcgcggccagcaggagagttgccacggcgagtgcctgggggacgtctgccccctgctgctccatctgcacggcgcccgcgatgaccttgcacacggggcactggtcgcccgtgcagtcgtggtggctttccgcaacgatgaacagcgagggcatcaagagcacgagcacaagggcaagtgccaggccggctcgcgtgatttcgcgccttctcgacggcgttcccatactagcgggctcccttttgccggcagtcgcggcagattccgtagagcaccgtcctgcccggatccacggcaaagccgtgcccgtcgagcaggtgcttttcggtctccgaaagctcgttgcagttcaagtggatgagggctccgcattcctcgcatttgaggtggtagcaatgctcacgatggcaatgctcccggtcgacgagctgaaagcaggcactgcgctcgccctcgggcgtgaacctgattacggcgccttcggcgacgagccggtcgagctggcggtaaacggttgcggtggagatgctcgagccgtcctgcttcagagcgcgacagacatccgctgccgtgaggtgtttgcctccggcagcgacaaggcaggaaagtacctcttctctttgctctgtgttgtatttgccccgcacagctcttccctctgtaatatgagaacgattctcaaattaacagaaggagcgatcccggtcaaccgggggaacatgacacgatacccacggatgtgcggactcagaatgagacagtttggagttcgca

SEQ ID NO: 3731 - DNA, 18162 bp, Unknown
  16S sequences of unknown bacteria
aagcgagtgtcctcacagcttttcaaatgctgtaagaacactcgccatggtgccgcaggcgggacttgaacccgcatgatgttgccaccgagggattttaagtcccttgtgtctgccgattccaccactgcggcgtggggcacacctatcatagacgttttttcgtccgctgtcaagacagggcggccgaaatatcggccgccctgttctagaacgttaccattcgatgccgggacgggcggcctgaccgcgctggtaggggtggcggacaacccgcatttcggtgatgtaatcggccagctccaggagctcgggagagggatcccggccggtgaggaccagctccaggctgtcgggccggttctttacgaaggccagcagggattcctccggcaggatgccggtgttcaccgcgtcgagcacctcatcaagcaccagcagatccaggccggacgcggccgattcgcaggcgcgcaggagagatgcgtagaaatcccgggcttcctcccgctcttccggcgtcatggaaaaggtaaaagggacatgaggcagggcatcgaaaaccgtgacgcccggcaggactttcagcgccgcgcattcgccggaggatccatccttgagaaactgggcgaagccgacacgaaggccgtggccggcggcccgcaggcagagacccgcggcggcggtggttttccccttgccgccgccatgatagatatgcagcaatccagcgcgcatgatgcaaccgttcctttcgttatggggggctcagcggccgagggcggccagcacccggtcgggaacattggtgatgatgccgtccacctcaagggcgatggctttttcaatggcctcgggggcgtccaccgtccaggcgttgatgagaatgccccgttcgcggcaggcggccactatcgcgggggtcaggccgcccagctccggatggatagcgtcggcgtgacagcgttctacgagggcgagggtttcctccacggaataatgctcgccatagagcaggccgaggcgcaggtcgggatgcagctccttcagccggcggccccagtcgtgccagaaggtggagatgatggtgcgctcgacgcagccgaacttggcgatattggcgtagaggaggtggagggcctcgtccagatcctggccggcggccaaggggcctttcagctcgatgttgaccacgtccatatggtgggtcagctccagcagctcgtccaaggtggggatgggggtgccggcgaatttcgggttgaatttcacgccgaaatcgaaggctttcagctcggccatggtcatgtcctggatatggccggcgccggtggaggtacggctgatgtcatcgtcgtggcagacggcgtactgcttgtcggcggtcagatggacgtcggtttcgaagccgtcggcgtgcatatccagcgcgagctggaaggcgggcagggtgttttccggcgcgtatgcactcgcgccgcggtgggcttgaacctgaatcatgcgatgaccccttttctgcacaagatatgtctcattatacaaccgggccgcgggggatgacaagcctgaatcgacgggggctcgtttgaattttctatagggcgataaaaaacaggaatagtaataggggaaattcgattctttacgggatactatcccgtgtagtatactgttagacagaaaacgagattgccggaaaggaatgggcgcggccatgagtgaaaaacgggcgggcaaggtcgtcagcgtgacggacatcggctccaattttgtgcgcatgggggtatatcaggcgggcaagggaggcgtacagcggttggactatctggaagttccgctgcggctggggcacgaggtattcgccaccggccggatcagcgtctccacggtgcggcagctgtcctccattttgcggggatacgcccaggtgatgaaggaatacggggtcactgaataccgggccatcgccaccacggccatgagggaagcgaaaaaccgggcctatgtgctcgatcagctgcggatacagaacaatctggtggtggaggtgctggaggacggagaggaaagctccctggtgtacagcgcgctgtgccgttcgccgctgctgcgggaggaatcgctgctgtcctacgtggggacgggcagcgtgggcctggcggtgtggcggcagggggcggtggatctcagctgcaatctgaccatcgggttcctcaaactcagcgaaatgctgcggggccaggaggagctgacggcccggttttacagggtgctggaggaatatgtggagaactatttccagcgggtggccctgcggctggatgggcagaccttttcgcgcattctgctgtctgggcggcagctggattccatcgcggccctatgcggcggccgggaggagaagggggcgctggtggtggaacgccgccagctcgaggaaatgtatgccctgctcaaggggatgaacgcctccacggtggcccgggaaatgcagctaagcgaggaggtggcggaccaaatcgcgcctatgctggccatttaccggcggatgttggatatcacccaggcgaaaaagctggtggcgccgccggtcaacctgatggaaatcctggccgcccagctgctgcttccggcggaaaaggccgccttcgagcaggcgcagcgggcgggggccgtggcctccagccgccggctggccctgcgggagggggcggacgccgcccacgccgagcgggtgcgcagcgtcagcgtttttctgttcggcaagctcaaaaagctccacggcatcaacgcgaaacggctggtcctgctggaatgcgcggcactgctgcacgagctggggcaccgggccaacgtcaaggacgaggcgcaggcggcctatgatttgatcaaatcctcttacatttacggactggacgacgaggagaccatgctggtggcggaaatcgcccggtatggcaaccctcaccggacgcccgacgcggatcggcccctgcccgaaaagcagcggctgctcatcgacaagctggcggccatcatgggcctggcggacgccctggatatcacccggaaggggcggataagcgatctcaaggtgcgcctggaggaggataagctggcggtaaccgccgcggcccgggacgatctgctgctggagaagtgggcgttccaggaggggggcgcgttctttgaggacgcgttcggcatccggccggtactgacgcacaaaagcctgctgctgtgacagcgggacgggaaggagcgggaatacgcatatgaaaaccgagaaaaagggaccgggcgtcccgtatatcaaccgagagctcagctggctggacttcaacgcgcgggtgctggaggaggcctatgaaaaggagaatccgccgctggagcgatgcaaattcctgggaatcacggcctccaatctggacgaatttttcatggtgcgggtggccggcgtcaaggaacaggtgcgctccgggtacaaggagacggatcccgccgggctgtcgcccgaccggcagctgcggctgctggcggagaagatccacgcctttgtagagaagcagtacagctgcctgacccgctcgctactgcccctgctgcggcagaacgggatcgccctgctcaagggggacgacctgaccgccgagcaggagcggtttgcggacgattatttcgaaaacgtgctgttcccggtgctgacgccgctggcggtggatcgcagccggccctttccgatgctgtccaacaagagcctgaacctgggcgtccggctgcgcaaggaaggggaaacggcctttgcggtggtgcaggtgccggccatcctgccccggctggtggaggcgccggcggaggagggacgggcgttcctgctgctggagagtctcatcgcccggcatttcggggatttgttcgagctgcacgacattgtggcgtacacagcgttccgggtgacccggaattccgatctggacatcgacgaggagtcggaggatctgctcatcgaaatccaggaatcgataaagaagcgcaagcgggggcggccggtgcgcctggagctgtcccgccactgcgacgccgagctcaaggagttcctcaccgagatgctggaggtggaggagtccgaaatttacgaggcggcggggccgctggatctgaccttctgcttccggctcagcgggctggacgaccggctgcgcctgccgcccatcgtgccggcggccccggcggatttcttcgggtacgacgacatgttcgaggccatccgggagggggatcggttcgtccatcacccctatgagagcttcgactgcgtggtggatttcgtgcgggcggcggcggaggatccgaacgtcctggccatcaagcagaccctgtatcgggtcagcggccattcccccatcatcgccgctctgatgcgggccgctgacaacggcaagcaggtgacggtgctggtggagcttaaggcgcggttcgacgaggagaacaacattcactgggcccttaagctggaggaagcggggtgccatgtgatttacgggctggcggggctgaaaacccattgcaagattctgctggtggtgcgccgggaggaggacgggctgcggcggtacgtccatctggggacaggcaactacaacgacagcactgcccggcagtacaccgacatggggatgttcacctgccgggagagctttggggcggacgcgtcctctctgttcaacgtgctcaccgggtattcccggccgccccggtacaaccgtttcatcacggcgccggacaacatgcggcccttcttcgagcggatgatcgatcaggagacggccaacgcggagcaggggctgcccagcggcattttcgcaaaggtaaattccctggtggatccggacatcatcgcgcggctgtaccgcgcgtcccaggcgggggtgccgattacgctggtggtgcgggggatctgctgcctggtggccgggctgccgggggtgagcgagaccgtcacggtgtacagcgtggtggggcagctgctcgagcacagccggattttccgctttgaaaacgggggaagcccgcggctgtatctgggcagcgccgactggatgcagcgcaacctggatcggcgggtggagctggtgttcccggtggaggacgagggcattgtccgccgggtggaggaggtcatctccctgaccaccgaggacacggtcaatgcccgggtgcagctgccggacggaagctatgagctgcaggatcggcggggacggcccgtgcttaactgccagaccgagctggccgcgcgggcgcgccgggcactccagcaaaaggagaaggatattaacgaaggattaatataacgaatgttaattaaaatgaggattcgggaaccgtttcgatttctgcgaaaagggatgttataattatgaaaaaagtggggatattaaccagcggcggcgattgccagggattaaatgcggcgatccgcggcgtggccaaggcgttgtatgaggcgttcgacgaggtggagatttacgggatcctggagggctacaaggggctgatcgagggaaactggcggaggatgaagccggaagatttttccgggattctgacgctgggcggcacggtgctgggcacctcccggcggcccttcaagctcatgcgggtcatcgaggacgacagcgtcgacaaggtggcggccatgaaaaagacggtggcggatttggggctcgactgcctggcgattctgggcgggaacggcacccacaagacggccaacctcctgcgggaggaaggggtgcatgtggtgacgctgcccaagaccatcgacaacgatttgtggggcaccgacatgaccttcgggtttcaaagcgcggtggatatcgccacccaggtcatcgactgcatccacaccaccgccacctcccacgggcgggtgttcatcgtggaggtcatgggccacaaggtggggtggctgaccctgcacgcgggcatcgcgggcggcgcagacatcgtgctgctgccggaaatcccctacgacatccagaaggtgggcaaggccttggacaagcggaggcggcagggcaaaaccttctccattctggcggtggcggagggcgccctgtccaaggaagaggcgaagctgggcaaaaaggcgctggcggccaagcgggcggcggaaggggatccgtccatcgcctaccggatcgccaaggagctggagccctttgtaggcacggagacgcgggtatgcgtaccggggcatttccagaggggcggcagcccctgcgcctacgatcgggtgctggccacccggctgggcgcggcggcggcgcggctgatcgccgaggaaaaatacgggtacatgtgcgccgtcatccatgatgaaatcgtgcccgttcccttagaagaggtggccggcaagcttaagaaggtgccggcggactgcccggccattcaggcggccaaggaaatcgggatgagcttcggtaattgattttcagcgcttatgcccgcacaataacggaatttttgtgaaaaacagaaattgttttccattcggcccggatttactggacagacggctgtttgtccggagaaaaacggcagcgaaggaataaataccaagggatagcagcattttatgtttgattttttcccttttggtgatataataggaatgttaaaattccggaggagtggggccgattggaaaaatatagagtatatggcggccatcggctggtcggcgacgtggaaatcagcggcgccaagaacgcggtggtggccattcttcctgctgtgatccttgccgacggcgtctgccgtattgaaaatataccgaacattatggatgtggctacatcccttgaaattctgtcttccatcggcgcgcaggtgcgccggctgaataaaaacacggtggagatcgatccccggccgatttccactcatgtggtgccgcacgatttggcgcggcacatgcgggcttcttattatttcatcggcgcgctgctgggccggttcggcacggcgcgggtttccatgccgggcggctgctatttcggcgtgcggcccatcgatcagcatctgaagggcttcacggcgctgggagcgacggtggcgcccatggagcatggcatgatcgatgtagtggccgagcgtttggtgggcaactccatttatctcgacatggtgtcggtgggcgcgacggtcaacatcatgctggccgccgtgaaggcccggggaattacggtcattgaaaacgcggccaaggagccgcatatcgtggatctcgccaactttttgaactccatgggcgcggatgtgcggggcgcgggcaccgatgttatcaaggtgcggggcgtggagcatctctacggcgcgtcctattccatcatccccgatcaaatcgaggcggggacctatatggcggcggccatggccaccggcggcgacatcgtggtgcgcaacgtcatcccgaagcatctcgaatccatcaccgcgaagctgatggaaatgggggccgtggtggaggaatacgacgacgcggtgcgggtgcgccgggacgggccgatcctccactgcaacgtcaagaccatgccgcatcccggattccctaccgatatgcagccgcagattggcgcattgctgaccatggcggagggcacgagcattgtcaccgagggcatctgggacaaccggttccggtatgtggacgagctgcggcgcatgggcgcgcaggtgcaggtggacggcaaggtcgccgtgttccagggcatcgatcagctgacggcggccccggtcaaggcggtggatctgcgggcgggcgcggcgatggtgatcgccgggctggcggccagaggctgcaccgaaatcgaagaaatccagtatatcgagcgcggctacgaggatattgtggagaagctgcagagcctgggagcggatatccggcaggtaaccattcccgacacggtactgcggcaggcgctttaagaggttgaggtaatacatggcgcgttattgtcccctattcagcggcagcagcggcaactgctgctacataggttccgccgcgggcggggtcctggtggatgccggggtgagcgcgagacggatcgaaaccgccctgcgggagcgggagatcgatcccggcagcatccgggccatctgcgtcacccacgagcacagcgatcacgtggcggggctgcgggtgctgacccggcggtacgggatgccggtctttgcctcccggggaacgcttgaggagcttttgcacgccggtattttgggggagcgggacgccttcgccgtcatcgacgaggagggcatcgaggtggcggacatggaaatcaccgcgtttccaacgccccacgacagcgccgaaagcctggggttccggatacatactgccgacgaccggcggattgcggtggccaccgacatgggctatatgacgccggtggtgcgtaaggcgctgcgcggctgcgacctggtgcacatcgagtccaatcacgatatccgcatgctggaaaacgggccctatccctatttcttgaaaaagcggatactggccaagacaggtcatctgtccaacgaggcgtgtgccgccgagctgccgcagttcgcgcaggaggggacgacgcggttcgtgctggcccatctcagcgcggagaacaatctgccggatttggcatacgtcacctcgcaggcggcgctgcaggaagcggggctgcgggccggggtggattttcttctccaggtagcggaacgggtatccaccgaaaaagtgacggtattttaacgaatgttaattgtataggttgttgctgtgagacatatatcgctgctctgtgtgggcaaactgaaggaagcctattggcgggacgcctgtgccgaatatggaaagcggctgtcggccttctgccgcctgacggtgacggaggtggaggaggagcggctgccggagaatccctccgccgcgcaaatcgcgcgggcggtgcaagaagaggggcgccggctgctggctaaggtgcccgccggcgcggcggtgatcgcctggtgtatcgaggggaaagagctggattcgccggcgttttccgaaacgctggacaagctggcggtggacggggtgaacgcggcggcgctggtcatcggcggctcttggggcttgtccgacgacgtgaagaaggctgcgcggctgcggctttccatgtcgcccatgaccttcccgcaccagctggcccgggtaatggtactcgagcagctctatcgggccatgcagatttcccaaggagggaaatatcataaatagaatcacggcggctgataccgcaagaggttacgaacgggggttatgcccccgttttgttattgtaggagaaaacccgacgcggtatcgtcaggcggattccctgcgtttggcatcggccttgttttgaaggtatggccgaccggggaatgaacggacggcggtgggacagactaacggagaagcagcccgttccagccaaacgtatccggcgggccggggaacgaccgcctacaaagaagttcgagggacgggagccctgacaaaacggcgacaattccggttcggccgcggcacaggtttggcgatctttctatggcgggaaaaggggaaatatggtacactattttcgttgccgcgacagttaggtaagcggcttttctttccacttagctgactatacatctcctggaggtggcccatttgtccctgaagcctttcggaccctttctcaaaccctaccgcgtctattgcattctcggcccggcggccaagctggcggaggcggtgctcgagctgtatctgccgctgctgatggccaaggtgatcgacgacggcatcgccaagggagatacgggatatatcctgaaaatgggcggcgtgatgctgggtatcgtgacagtggggctgctgtgcgccctggtgtgtcaatacgtggcctccgtcacctcccagggctttggcaccggtctgcgccacgcggtgttccgccggattacatccctgtcccacgcggagctggacgccttcggcaccccgtccctcatcaaccgggtgaccagcgacgtcaatcagctccagtacgcggtggccatgctgatccggctggtgatccgcgcgccgtttttgtgcgtgggtgggatcgtcatggccatgaccatcgatctgcggctgtcactggtgattatcgtggctatcccgctgttcgtgctgattatcaccctggtgatgcgtaagacggtgccgctgtaccgcacggtgcagggccggctggataagctgacccgggtgctgcgggaaaatctgtcgggcgtgcgggtgatccgcgcgtttgcccgcacggacaaggagcagaagcggttcggcggcgcgacggaggaacacaccgccgcctccatccgggtcggaaagctggcggcgctgctcaatcccggcacccagctgatcatgaacctggccattctggccatcgtgtggttcggcgggctgcgggtggaggccgggggcatgaccaccggcgaaatcatcgcgtttatcaattatgttaaccaaattctgctggcgctgctggtggtggctaacctggtgggcaccttcaccaaggcctatgcctccgccggacgggtgctggaggtgctgggagcggagccgtccatccaggaggaagagggcggcgagacgcagggtgtcccggggacgccggcagtggagttccggcatgtggatttttcttacggcggcgaccgggtattgaccgacatctccttttcggcgcccagaggggccatggtgggcattttgggcggcactggctcgggcaaatccacgctgatgcatctgctgatgcggttctacgacgtcgaggcgggggccgtgctggtggaaggccgggacgtgcgggagtatgcgcccgacgcgctgcggcataaggtggggctggtgccgcagaaggcggagctgttctccggcaccatcgcggacaacatccgctggggcgacccgcaggccgacgatcaggcggtgcgggacgctgccgtcatggctcaggccgatgaattcatccgccggcagaaggacggctatcaatccctggtggagcggggcggaaccaatctgtccggcgggcagaagcagcggctgaccatcgccagggcgctggtgcgccggcccgccatcctggtgctggatgattcctccagcgcgctggattatgccaccgacgcggcgctgcgccgggccatccgggagggcaccgaggggatgaccgtattcatggtctcccagcgggtcagtgccgtcaagcaggcggatctcatcctgatgctggacgacggcgagctggcgggggcgggcagtcacgaggagctgctggccacctgcgaggcttaccgggaaatctgcgagtcgcaggagaaaggaggcgacggccgatgaaaaccgacaagccgcgcaccatgcggcgcctgctcggctatgtggggcggcacaaggcggctctggcgggtgtgtttgtgttcgcgctcatcggcaacacgtcgctgctgctggcccccaagctgattgggcgggctatcgaccttatcctgccggggacggggggcggctatctggccgctctgctgaaaacgctggcggtcatcggcgtgctgtacctggccggctccctgttcaactggctgacggccctgtgtgccaatctggtggccaaccggacagtgcgggccctgcgggtggatttgttcggcaagttggggcggctgccgctgcaatactacgacacccattcccatggcgacatgatgagccggttcaccaacgacatcgatgccatctccgacgggctgaaccaggggatcgtccagctggtgtccggcgtgatgacggtgctgctgtccctggcgttcatgctgtccctcaatcccatggtcacgctggtggcggtgttcgtcacgccgctctgcttcctggtgggctttgccatcaccaaatacggcagccgccgttttaaggagcagagccgcacgctggggcggcttaacggctacgcggaggagctgataagcgggcagaggacggtcaaggccttcggctatgaggaccgggcggtggacgggttcgacgccatcaacgccgaactgtaccaatgtggataccgggcgcagttcgcttccgccctggtcaacccttccacccggtttgtcaacaatgtggcttacgtgctggtgggggtgttcggcatcctggcggtgctgaaaaacgccctgacccccggcggggtagccagctttttgacctatacggcgcagttttccaagcccttcaatgagataacggccatcaccatgcagctgcagctggccatggcctccgcccggcgggtgttcgccgtgctggacggggaggagcaacggcccgagccggccgacgcggcgcggctggaggcggcggagggctccgtggctttcgagcacgtacgcttcgcctaccagccggaacggccgctgatcaccgatttcaacctcacggtgaagccggggatgacggtggctatcgtgggacccacgggggcgggaaagaccaccctggtcaacctgctgatgcggttctatgaggtggacgatggccgcatcaaggtggaaggacaggatatcaccggggtgacccgggacagcctgcggcgcagcttcggcatggtactgcaggacacctggctgtttgccggcaccatccgggaaaacatcgcctatggcaagccggacgccaccgacgaggaaatcgaagcggcggccagggccgcccatgcgcacagcttcatccgccggctgcccgacggctacggcaccctaatcgcggaggacgggggcaacctgtcccaggggcagaagcagctgctgaccattgcgcgggccatgctgctggattcgcccatgctgatcctggacgaggccaccagctcggtggatattctcaccgagatgcggattcagaaggccttccggaagatgcgggaggggaaaaccgcctttattatcgcccaccggctgtccaccatccgggatgcggatctcatcctggtgctggacaagggcgacgtggtggagcagggaacccacggcgagctgctggaaaaaggcgggttttacgccagtctgtataattcccagttcgcgggggaagaagcctgaaaaaacgcccggaggtaagattacctccgggcgtctgtttgtttatatagtcccgctgtgccgtatcgcgacttgcataacctgctactaataagtcaagcaggtgggcgccgcccaggacgttccgactcccttcttcccgccgaagcggggaggtctgtcatccggccccggagctaggctcccgaagtccaagtgtagtagggttaaaaagccgcagtccgcgcacacagcaggagggcggacgatggaatcagttaagaggctcctcgtctgccggggattccagttcctcgacctcgtacaggtcggacaggcgttcctcgaagatttcggcgatctcatcgaacacggcgtcgtcttcgatgggcaccagcagatcctcgccgttttcctccgccacttccaaaataatcagctcgccgtcgtcgttgacggattcgtccgcatcgtcatagacgggaagaagggccacataccgcccgtcgtccgtctcgatggcgtccagcagttcgaactggtgctcgtttccttcgtcgtccaggacggttaccaaatccgcgccgtattcatccgacatagtctttctcccatccgcagcggtcccgccgggggacacgttcgttcaattttacgtaccggcgggtttgcccgcaggacgttaccaccattttaccctgtaaaccgggtttcgtcaagagtaggagattggaattttcaataagttaataattccacttttcatcttttattcacaaataatatattgacaattcacaaatgaagtgctatactacaatcagcgaaagggaacagagaagaacctcacagggtgaggaacctgagcctgatcgtgaaggcgaaagaaaggggtgagtcccatgcacagcgattcagaagcacagcagattgcctgcgcggggcggaacccgcagcaggcggaacagcggatcgaccctgcatagaggccataccgggaaggaaagcatgcgcattccggcaaacaggcaagcaaaatccatacttgcagcctgccgcgttttgcagcatctccatccaaatcaatcggtgtatcaaaaatacctcttggcgacgttcggtgttccggcgcgaaaagcgccagcgatgagaggatgacggcccgcgttccagtgttgcggagcgtgttccaccagggccggtgactaaagtatccccatcgtacaagtaaatatgcgcaaggtcctgactggctttcccggagggaaaggccgataccaatgatttcttcatataaaatagcgtgaccaatcttcccgggaggcaaaacctccgtatcgtggcaggctatgaaatactctttccagaacgggattcgaaaccttgattccagatgtttgatgccgaggaagcggcataagggaaagtcaaaaaggtgagtccaatgccttaaacaacatgtcacttggaaccatgcctaggcgatgccctatagcgagtttgtcagccgtggatgtcacgcggggggaccggaacgggtgcccgccgaaaactgcataagaaaggtgagtcccatgggctaaacgcttccgcaaggagcaaacttcgcatagaaccgactgccggcatatttcacgcggggccatcccgcgggaaaaggtgagtcccatggattaagaaatccaaccctttgaggttgagaaatcctaaaaaactggaaaaggtgagtcccatggtgtaaaatggcagcgtatcccgtaaagacaggggagtacgcttcttgagaacgggcatatccgaagaatgccgttctttggtcggcgggggcgccgaacggatgcgtcggcaaatgactggacgtgtccgagctgcttcttacaaaggaggatcatgatcacaccatttcgataacctcctctgccgtgttgtgcagaggaggttattgtattataccgccctctgggtaaaccgtatacaaaaaggctgtggaattacggtcatagcctttttggagaaatcggagcgacagcttcgatttctggaatgcggcacaccgcacttccgattctccgttaagtctatgccgcattctccacagcctttttgttatcgaggggattattcccaatcggggagggcatgggtgcggatatacgtgaggattgcttcgccggcggcggcgttgaaatgcaggccgtcccctttgtcaaaacggggatccagattgttgtccgcgcccttgagagcctgtgccgtgtcgagatagtacaggtttttctcttccgccagcttaagcagctgctggttgtaccagtcgatggtatcgttggccatgcggggatccttctgggcgtacgctttcgagaccggcaggatggactggataatcagccggctgtccggcgactgtgcgagcagggcgtcgatgaattcctcgtagcttttcataaagccggttttccccatataggccaccccgttgatgccgaaggccacgagcatgatgtcgggctttcggatgcccaccgcctggggaatcgtcagcagcttgcctgtgcccaggtcgatgatcgctttgttcaaggcgacgctgtggctcagtccgttttccgcaaaggtgttggcggaagagatctgacggctgtacagcatgccgttgatgcgggaatcgcccagaaacaggattttttgcgtgtaagcgtccccggcatccgcggtctttgcaagcagcgtggaggaggggggcgtcgtggttttggcggggctcgaggaacccgtggacacggagacggtggtcgacgcggacgagggggaggcgccgccggaggccgcggacgaggaaagtccctccgccattgggctgatagtggggatctgcctttgcaggccaagatatatggcgaacagggagccgccgcccgccaggacgatgaccagcagcaggctaatcgttctccaggcggcggagggcttaccatgccgcccggttcgtcgggaggtggaggacaaagcgcgtcacatcctttgaatgcctagcagtttagtaaggggcggcgaaaagtccgcccggggtgcagtataccataaaccggcgaacgttgcaacttttggggagaaggcgcgtttccatgccgggatatcgaaacacccacgcggcggtaaagcatcttgcgcggcggaagaaattgtggtatactgttccaggattatgcgggtatggcggaattggcagacgcgctggatttaggttccagtgccgcaaggcatgcaggttcgacccctgttacccgcaccaaaccaatataatccgaaccaaatcttcttaatcggagatgggttcggattatttgttttcttcgagaaattcgaggatacgcatttcagaaacggcgtggtaaagcgtcccgaatccaaacccagaggtccgagaaaaccaaagctggcaaaggatgcaaaggataaggagggcaattatgaaaaccatcaaaagctgtgaattcaacatggacactggctgtgtggagctgcggtttcaggacggtagcatgatctccatcgactgcaccgccgtggaaaacgaagtggcggataatctttatgagcggtcggagctggactatctcatctacaacgacccgctggcttatgcagacctcattctgaacggcgacgttgaggcgtatctgaacgccgtcacggagtataagccctacgaaaactgaataaacgcacaaaaggggatggcggtcgaccatccccttttgccatgctgttttaggagtatatatcccttggatttgtcttatatctatcgtcaggcgacgttctcgccgttgctgtctttgcccgtttttgctgcgtcccgtgccgccttccattcggcaaagtcccgctgcccttcctcactctcgtaaaaggtgaggatatccggcagcagaattcgggcgatgttctcgatctcatgctgcgggatgccgctgttgttggtgagctttttccgcctgctcaagttgcacctccgaaaaagtattttgccgcagctttctcccgtgcggcggaggaatggcgtcttgagcgtcttttgccgtctgtgctttttcccttcgcatccttcctttcctatctgaaaataaaaatgcagccgcctgtcaagcctttcggcccgtctgcgtctgcatggtgtcctgtgtctgaaattgtgcttttattataacagtgtccaggttgcccgtcaataccacgggaacggaagcggctgacagcgtaatttcggcagcggctaccgaaattgttttgtggcttgcagattggcaagggccgtagcgcagcagccgacggccgtcaatggtcaagatgaacgcttcgcgccattgactgccgccgcccgccgcgcttttgggcggacaagacgggcaggcacagcttgtgcctgcccgtccatacacatgctggcgattgtagatgttggattttcaaccggagttgtagtcgggtgcgccctgttttggggcgtacccgccgctgttgcttgctacctatcttcgtatggtggcggcgcgggagcgtttgcgtaaagcagggtttgggaaggcactccccaacaagcttccgatgggacggaatgagcggcaggcgaaatccggctctggaaattcagctctgcctttgtcgtaagctgcttatttcttccttttataacctacaacaccagatgcccgatagatgtgtgttgactgcattagctttttcaatgcccatgctgtgattcttggtctaaggtcggtagaaatcgccgctcccgcatgatataataaatttggaaaagttatttcctgcccacgcaatgaacggcgatttttgttgtctatataggtgaaaggcctttacgcagagagaagggagggcgcaatgagagaccatgagatcatagaattgtactgggcgcgtaacgagagcgcgattaccgcc

SEQ ID NO: 3732 - DNA, 32759 bp, Unknown
  16S sequences of unknown bacteria
gtcccgccgcacgaagggcggcgcggccacccagcgcctgatggtgtctatcgatggcggcgagcatttccatccctacgcgcacaaccccatcctgcccaatttctgccgtgggaatcgggatcccaaagtgttccggcaccgggatagcggccggtacatcctggtcatctattcgggtgaaaagtacctctattatgtatgcgcttcgacggatctgctccattgggagcggctcccggatttccagtggtcggactgggagtgccccgatgtcatggaagtccctgtggaaggggaggaccggacacagctggtgttctggtcggccaggggatattgggcgccggtggatttcgacggggaacgctttacgcagctcgcccccgcccggcctttcgatgagggacatcagatccagtgcggacagagctttgccggtatgaaagggcggtgcgtccagctgcaccgtttcaatgttgggttgtcgggcgcgccctggtacggagcctataccctgccgtatgagctgacattggcggcggggccggacggttcctacgctttgaaggcggctttcgccgccgaggtggcctccctcgaggccccggcggacattcagcgggatatcgtgctgcacaacggcgcgattaccctgccggctgcctcgccttgccggatccggatcgacaccgagctcgaaaagggcggcaccctgcggctgcgcttcggcggtttcgaggctgtgctgtcccacggcgagctctcctgcggggagcatcgggtgacggtggggacggacggccgttatcggctggatatcgtctgggacggccctctcgccgaaatcatcgaaggaggatccggccgactgcttccggcggtgtcctgtgaaacagggcgggatacgctggagctgtccgggagcggcgcctgcatccttacgcaaagcctggccgcactgtccctgtagggtgcgaatcgggatacaaaaaagaggggaaaatcggatgatttcccctctttttttgtgcgttttccgcctgaaacagcggctatttggctattttctggtactgtctgagcaggcctagatactcctggcggtatccgcccgggtcgtgcccgatatgatcggcagccagggagaggacgctttcgggcgtggcgctgccggtatattccgacccgcgcagcagatgcccgaacgcagcgaccgagcaggcaaagctgaaatcggtactggccggcgtatcgaggccggagtcgagggtgtctttggtcacgaggcggctttccgtcccgcccggatccttgtaccggatatgcacctcaaacgggttcccggttttggccgggtcgcggagctcgatttcgaacaacgccaccacgtcggttccggcgccgatttcgcccgcgtccttccggtcatcatcgaagtcctggttgtccagaagccggttttcatatccgatcaggcgatagcttcccaccatttcggggtcaaagaccacctgggccttcacatcgtctgccacggtaaacaggtttccgcccagctcctccaccagcacctttttagcggtctggacggtgtcgatgtaggcgtagttgccgttgccgtttttggagagggtctccatgatgtcgtcccggatattgccggtgccgaagcccaggatgctcagatacaccccgctgtcccgtttttcgccgatgaaggcggctaggtcgtccgtcttgctgatgccgacgttgaaatcgccgtcggtggccaggatcacccggttgttgccgtcttccctgaagtttttagccgccagggaataggcggtctggatgccgtccgccccggcggtggaccccgaggcggtcaggttgtagatggcgtcgaggatcgcggctttatcggcgccgctggcgctgtccagcacgaccgcggagctgccggcgtaggtgacgatggagacccggtctttttcggtgagggtttccacgagcaggctgaacgcggttttcaagagcggcagcttgtcgtaggaatccatggaacccgaggtgtcgatcaggaaggtgaggttgcaggggggcaggcggctctgatcgatctcaggggttttcacccggataaacgccatctgccggtcggtatgcagaggggaggggccgatttcggtgtagacggcgaagggagcgccgtcgtcgggctccagcggttcctcatagcggaaatagttcaggagttcttcggtccgcacggcgtcttttgggggaagctggccgttgttcaggtaccgggctacattgccgtaggatgcggtgtccaccttgagggagaaggtgacggtggacgcggccgcggcggaggtctcggcgttttcacgaatcggcagataggtctcgccgcccggggcctccatggggtacgcctcctccggcttcgcgccccccgtagtatccagaaattttccggcgctggagcagccgcatagcagcagcgctccggccgccaggagcgcgagtcctgtgcatcgttgttttttcatgtttcgtgcctcctcataatcacagatcagggcctttcatgaagaagaacccgggagggcggaaaaatatgacaactatttcaaaatttcttttccaatggcgagcagatggtcaagctcgtaccggcaggtcagggtatagcctatgccgtccttctgcagcagcaggagctgatagtcgggggtttggcgggtatagaccgtctggccgccgaggctccgttcggcaaggccatctcccgccggcggtccttccgccggctccatgaccaggatgacgtcgtcggccaggctgtccttgagatagcagatggttttcgcctcatcctgttccgccgacatcagcaccaggcgggccggcagggtgaaagggaggcgaggggtatccgccgacacggccggaatggacgcgggggagacgggcccgggtttttgaaaaacgccgggcagggccagcaccgccagcaggcaggccgcggcgcaggagaggcccagggagaggcgccggacggatccgccgcgggtggagcggcggatccgcctgtccagttcgggcgggaacaccggtgtaacccggctcccgagttcctgccgcagggcatggccctcaagttccgcgtaccggccagccaattcccgaaacaggcggtcggcgtcaggcttctgtttcaacggcatatccctccttgatcagcatggccatgagccgctttttcgcccgatggagccggacggtcgccgtgttttcccggatgccgagcaattgcccgatttgtttatggggcaggtcgtaggcatatttgagcagaaagacgctccgcagctcttccggcagcccgccgacgagctccaggatcttttcggaggagatctcggagaggacgtatcgctccaggtcaaaaggatcggccggctcgtcctcctccggcagggcggggggctgccgccgttcccggttatagagtgtcagggccgtgttgcgcacgatggtcatcacgaacgacaggctgcggtccgatgcgggatcgtccactttgtggcggttccgataaatccggagaaacgcctcgcttacagcgtcctcggccagcatccggtcgtgcagaatggcataggccttttgcaacatgaggcccttgtagtgggaatagagataggcgaacgcctcttcctcccctgaagccagaacgaacagcagaatcacagccgcacctccccctccatccggtataacccgcgggccgccggtttcgttaccatcatgccataaaaaagtggaaaaaacaaggagccgcaaaacaggagatacggctccggcatgtcgaaacacgccggccgctcttgtcgggcggcggttcgccatcgctcaccttgctcccactgtccccgacaggtcggcccctgctcttaaaaaatggcggaaacacaccgtgtttccgccatttgtcgcttatgaggcgtgttttcgaggcacgtgtcctcgaaaatacggatcctgaactccccacagccgtttgggccatcgactgctcattttctgcttttttgacagacggaagccacaaaacagggaggacgggtcagtcggccatgacctgttcggttccggttttgaccggggaaccgaaaaccggcgtggtgccgtcccagccgaatttctgcgcccggacgctccggccccgccagccgctgcccgagacctcattggcgtggtagacgatccagtcctcggccccgtcgggggaggtggtgaaggagcagtgccccggcccataagcggtctcggccttggtgaagaggggggccgccgtcttggtccaggcggccggatccaacggatccggccccgtcagggtaagcagaccgaggcagtagtcgtcggtccagcttccactggccgaatagacgatatggaccgtgccatcttttttcagcacctccggcccctcgttaaccgtgggacggccgtggcattcccagtcgtgttcgggccgggaaatgcaggtacgctcgccgcaaacggtaaagggatcggacatgggggcgatgtagagctgctgggagacatccacatccccctcccagcccgaccagatgaagtagaggcttccctcgtgctgcatcacggtgccgtcgatggcccagtgatcgtcgggcgaggtaaccttgcccaccatccggaagggttcctgcgggccgtccgacgtcagggcatacatacggtgacaggcgttccggccgtcgtccgccgcgacatagatcacccagacgccgccgatgcagtggagttcgggagcccaatagcttttggaatacagtgtgccctccggggcggtatagacgcacaccggttcggccctgccgatatcgcacaagcggccggccttggcgacacagagcgaattgccgccgcgggagaagcaataatagtaggcgccctcgtgatagaggacccagggatcggcgtggggggcaggggcaatggggttgacaaacgtcgacatagtcactcgtcctttcatcatatcgcgtgatcgggctgaaaatcctgtcccgaccaaacggccctggaggtccaggcggtgtcgggatccgaccagaagggatcgtccggggaaaggcccaggggcaggaaagcggtggtgcagagatacaggctgccggtggaaatataccgttctccagcgcccggctgatggccgtatacgcctatggtgagccatccgccctcatcgaacatgccgggggctgcctgcacccgccggatcaccgcgtccagggcacagcgtgccttcgcgggggggaggccttcgggcaggcgatgctccagcgccatctgggcgagaagctggaacgcgccgtaacgataggcgatggagcgcccgacaatgggataggagccgtccggggcgatcaggcgttcctcgatggccgcgtagcgggacgcgcggcggaggatacgttcctgcatggcctgccagtcccggaagcggccgcccacggcgtccaggatatctaccagcatgggctggatgacgaagctgttgtagtaatcgaagtggaaggcggcgccgtcgccgtacatcccgtcccccttgtaccactggtcgtgctggcggagggcgtaatcgatccgcatggaatcccagtcctccacccctgccacgcagaaaaaggcctcgatcatggcactgaacagcagccagttgctggcgaagggcttttgggcccgggtgcgtttgagttcggtgacgagccgcgtcttggagacgggaggcagctcctcccagagggcatggggcgcccggagcagcgcgtgagcgaggaaggccgcgtccaccagccgctggccgccggtggcgaaattcaaataatcgggagaatccggatccacgccagcggcgatcgcctgccgggccaggagacggaggcgctgctgttttttccgttcttctccgtccagcccttccagctccagccagggggcgaggccgcacagggtgcggccgagggcttccagataggtgcaggttttccggtcgtcgatatcgttgacgctttcgaccggcatctcctcccgcagccgttcacgggacagagcgtcgaggaccggacaggcgattttgaccagggagtctacccaataggcgcgcatgacgtcagcccctttccacggcggtatagggggtgtagcggatggcgcgcacctcgggcgaaccgctgacccattccacgaacggctcgccgtttttgacaccggcgacgccgtagccgaaggccgtggagaggaaagaggtaaaatccccctcgatacgaggctcgatggcgaggatccccgtgacggcatcgtaccggatgccggtgcaggcctgcagcagggaataggaggccagcgcccgctgataccagtgcccgcattcgtattcgttgtagggattgcgggcccggccgttgtagcggctgcgggtggagcggacgatggcgagcccctgttccacatagcccttggatatcagatgggcggccacctggtattccaccccggtccacacctcattgctgtagataaaaggcagggagggacgtccgccgtgaggccaggtgcagttgagcaggccgctttcctccccaagggcgtatccgggccgctgcggatcggcgtgatcccggaggctcgtccggaagttgtagcggaagacggagagcaggtgacgccggacgagagcgtcgtccacgctgcccggcaggccgcagacaaagcccatccaatccccgatgatgccgtcggacaggcagccggtaccgtactggtagtgggggccttcccgttcgagcagggcgcggctctcctccgacagccggaaccggaccgcttcgaagtcctcgcccaattcccggaactgcaccttctgaataaaatattcgccgtcaaacagctcttgttcgagatacgccttggcctgcgcatacaggcggcggtattcgccggcaggttctccgagctcctctgccagctccgccatggcccgcagcgccgcggcatagatggattggttcatcccgtcgggaccccaaaattcgatgtcgtatgtattgtgatgggggtaccggaggacgccgctgcattcgcggtcccacaggccgatgcagtagtccaggctctgtttcatccgcggccacagaccggcgagccagtcccggtcggcgccgatgtggtaatctcgatagaccttgaggataccgccgagctggccgtccgccgcgggatggtgctgatgagcgggcacccggatgggcagcggcgcgcggaagcgctggtcgccccgttcatcctggcattcgtggaattccgtgtcccggaggctgcgttcgaggtcggggaacagatggcacagggcctgggcgtagttgagcacatgggtgcagcttccatgacagcttccctgccggtccccgctgccctcccaggaccagaaccgcccgtccgcctgccgcatgacggtgggagacttgaggatgctcaaattggccgccaccgcgtccagcaccgcctcatcgagggtggtgcggtacagcgtgtcggcgaaccgggcggaggctgtccgcagggattcgtattccgccgcccagtaacgggagagcgggccgatgccgtcaaacagggtagcgtaatagggagtataggtttccatatgatccttatatatgctgttgccgtcggcgtccaggggatcctccccctcccggagcgaggaacggggcacgtaccaggaaagcagaagccgcagggtacggctctcgcccggcccgagggtaagagggagatacaggctgccgcccatgctctgcctcgcgtcttcttcgggatagggcggggtgtccactgcctcgccggcctcgatacggttccatacctcggtcatgccgtcgaacatgaagccgcggaaccagcggcaatccacggcggggctttcgtcttgcagcgcgatccggcaccagccttcgtcaaacggcttctcttcgggaggctggtaatagagctcgagcgcgctgccgtcccggcggacaaagccgcgtccgcccttccggtcgggagggccgatgaaattgatggtgtggaaggaaaacagcagatcgagaggggtacttcccgcgttggcgatccggtattccagcgccgccaggggaagggaggcggaccggctgtcgcccggctcaaacgggctccagccggtgatgcaggccgtcacgggcagggcgtcgtcccgcagcgtgacggtcccaaaggggaaccgggaggtgaaggaggcctcccggaaccggggaaggccgaagttgcgcccatgcagaccgtggccgccgcccggggcccggaaaattttccgttccggaaccgggccctgcaatacgaccgcccggttgccctgcgggcggcggatggttaaggcggcaaaggcgttcggctcatgaagaaggtcgggacggtggtagagcgagacatgagagagcgcccccgtgccttccaggcagatggtgcccgcgccgatccctcccatgggaaaggcgacgagctggttctcttctccccgatacatccgcggcatacaattcctcctaaaaaatttcaaatttttaccaaatccccaaaaaaccagcagccatgggctctcagcggctttcagtatatgtgaaaattatagcgtttatgattgttgtggaaaaacacaaaaaaatgagattggctcttgacaattcatgagaaattgtatatactcaaggtgagattaacgataacgttatcgataatgcctggaaacacttgctattgtataggatggggcgcctcttgtcaatacggattccgggcagaccgtacgtagcggccggcagggagacccgccggtttggttttggggaggaaacgggatggaaacgcaacagaaactggcccgtctgagacaatttatgagcgaaaacgacattcccgccgtggttgtccgccggcagccgaacttttcatggctgacaggcggcggccgcggatttatcggcctggcctcggaaatggcctgcggcagcctggtggtcacgtcggacaaggcggtcctggtggccaataacatcgagtgcgggcgcctggtcggcgaggagctgccggaaagggcatttacatatgaagcggttccctggacggaggacggcaccattccggcggtgtttgaccggctatgcccggatggatatcaggaggacggacagttgggggccttttttgtacaggaacgcacccggctgtgcgatgaggaggccgaacgtttccgtgagctgggccgggatgtggaccggtgtatgctggaggcgtcccgcggagtcgctcccttgatatcggaattcgaaatggcgggccggctgtcggcggccatgtgggcgaagggcctggagccgattaccatgctgattgcggcggacgaccgcagccggcgggtgcggcactatgtaccgaccgacgccagggctcagaacgggctgatttgttccatttgtgcgcggcggggcggcctggttgcttctgccacccgtatgatcgcgtttgacaggagtttcgccgccgattacacgcgcctgctcgaggtggaggcggcagccttcaacgaaaccgtacccggaaagacgatgggggaggttttccagaagatctgcacggcttatgacaagatcgggatgccggaggagtggcgccgccaccatcagggcggcctgaccggttatctggcccgggagatccgcgccgacaaatccaccgggcatgtggtccgggtgggggaggcgtatgcctggaacccgtcctgtgaaggcgcaaaatgcgaggacaccgttcttgtgacggaaaacggcctggagatcctgacggccggcggaggctggccgaccatcagtgtgtacggctatcagcgccccgcggtcctgaaattctatgaagcgtaaaggtgaagtgaccggttagattatggacaaaaagtcttcggggctgctgctgaccctctcattggtatgggccctctattacatattcagtcagaaactggtggcggcggtcacctccttcccctccggactcatcatccgggtcctcacgtttttcatcctgatcgtcatggcggcggtcagcggccggataagagacctcaagccgcccccgccccggatgatgctcgtgatggtgctcatcgggctgttaggctttcttctcgatttcaccgcgttcctcggcctgcggtattcgagcgcgggcggcggcacggtccttctcaaaaccgatgtcctcatggcggcggtgatcagcgccgtcgtgttcaaggaaaagttccggctctgggatatcggcgcgatcctcatgatgttctgcggcgtactgctgacgatgaacgtctttcatctgcagatgtccggggtcaacgatctgttctttatcctcagcgcgttttttgtcaccctgaacgcctttgtcatccagtgggcgctgcaccatcccaaaaccccggtcaaggggatgaccatcgggttttacaacaatttttacgctatgctcctgttcggcatcgcggtcctggtcagtggtacgggaggcgacctggcggcgggtgtcacgggagacggcgtatgggcgatcgccttgatggcgggctttggccagagctttgtctatgtattctactacgcggcactcgggcggcagccggtgtggctggtcaaggtgttcctgctgctcatgccggtctttacgacggtgattgaaaccgttgccgagctggtcacgaccgggacgaccagcatgacctggtcccgtctcggcggtatgcttctggtgctggcaggggccgctgtcctgcttttaaagaagaaaacgccgaagccggcggaacaaaaggagtaacagacagatggattttcagttttacatgccggtaaaggtgattttcggccaggacgcgatgagccagtttgcttctctcgccaaggagccggtcctgattgtgagcaccgagatcctgacgcagctcggcgtgacgggcaaggttgcggccgcctgcggaggatctcccgccgtttacgatcaggtggaggccaatccgaccctctccacggtggaagcgatcgcctccgcgatccgggagcagaacattgccacggtggtggcggtcgggggcggcagcagcatggatgccgccaaagcggcagcttccctcgccgcaggcgatacgccgctgcgggactgcctctatcacggcgccccggtcccggcccgcaaggtgtccctgctggtggttcccacgactgccggaacgggcagcgaagtgaccaatgtcgcggtactctccgatcccgagcaggacagaaagacgccgctcgtctcccacagcctgtgggccgacgcagcgatggtgatcccggaaatgacagtgacggccccgaaaggggtgacggcgtcgaccggattcgacgccctgatccacgcggtcgaggcctattgggcgacctccacccagcccgcgagcgaagcgctgtccctgcaggccgcccggctggtctgccagaacctgcgccgtgcgtatgacaacggggaagaccgggaggcgcgcgaggggatgatgctcggcagcttgctcgccggcatgtctttttcccagacccgcaccacgatcctccacgcggccagcttcccgctgacgagcgatttccatgtcgaccacggacgggcctgcgctgtcaacatgattccggtcctccgctatgtcagccgtcacattcccgaaaaaatgagggcgatggctgtgttctgcggctatgccggcacggaggaatggatcgacgcccttgaagacttgatggcacactgcgggatgcccctctccctgagtgaggtgggcgtaaaggaagacgatatatcccgtctggccgctgtgaccatgagcgcccccatcgccaggctcacgcccgcgccgatggatgaggatattgtacgcaagctattggcggataacctgtattccggcagggaaggaggtgccgcaaactgaccttgcaatctatgaacgccaatctcaaacaacgatcaatttatgggagggaccaatctgtgaagaaaatcatttccgcctgcgcggccctggcgctcgtcgccatgctggccgcggtgccctgtgtctcggctgcggaggatgccccgaagctgatcgcgcattatgaattcaaaaacggctccgtcgggaaagactccgccgggagcggcgacatgaaggtcgtcaaacccgatgcgcaatcggccgccgacgccaaggtagtcgaaggcccgaaggggatgagcgccctggaattcgacgccagctacgcgctgatcaccgacaaaaaggatgtgctcgatcccctcaaggaatacaccgtgaccttcttactgtccccgaacgaggcgggcaatctgctctataccgcgttctcgaccggccagacgaactggaatgccccgatcaacaagggctctattatcctgttcaacaaggaagccgggaaccctgaggtccgggtgtacggcggggatcccaccgcggccgacggtaccaagttcgccgaagaccagtttaaaaacgacgacggcgcgaagggcctcgagaagtttgccgagcgtggcaccaaaaccgccccctacaagtatgaggcgggggtctggtaccgcgtggtgctgactatccaggtcgccgacggccggacggccggcaaacaggaactctacatcgacaagatggacgccgtgacctccaaggccagcctcgtgaggagcaaaaactactattccgattcccttccggccgggctgaccgacctgaacaattcccagcggccgatctccctgggcgcctgctacaactgggagagcggcaaggatcagaatcagtttacggtcgataataacgaaaaattggccgaaagaaagaacttcagcatgttcatgggcaagatggccgacgtgcgtttctacgacaaggccctgacccaggatcagatcgtcgagctcttcaagaacaacaagatcgccggcgaggaaggcagcagcgagcccccggtcacgaccacggcggcgaacaatgatgcgaccacggcggcgaacaacgatgcgaccaccgccgcgggcaatgacacgaccaccgccgcggatgtggccaccacggcggccgccaaaaccaccgccgcggccaacacctcgaatccggccgacgacggggagaattccaacaccggcctgatcatcggcatcgtaatcgccgcaatcgtggttctggcgggcgccggcgcggcggtgtacttcctggtcatcaagaagaagaacggcgatgtgccgccggccggcccggacgatgacgcgtcctcctccggcacggacggcgagaacaagtaagcttcccaggatgcaagctttgacggtttcttgtaaatcgaaccgttgaaaaatagagtgaagaaaaggagagaaaaatggctatgaaaaagcagctcattccctgcgcactcctgtccgcctgcctgatgctgggggccggtgccgccgcgatggcggagacccccgctgccggacccaagctggtggcgcattacacctttgccgacgagaccaatgtgggcaaggattccgccggtacacaggatctgatcgtccagggtgccacggtcggttccgccggaaccgcgaaacaggtcgaaggccctgccaacatgaaagcgctggaatttgaccagacctattccctgatgtccgacgccgacgacgtgctcgacgatatgaaagagttcaccatcacttatctggtctccgcgaacgacgccgaggtgctccgcagcaacgtgttcagcaccggcgccgccaacggcaacagctttaaaaattccggcctcaaccatctgattgataaaactaacggtatcccggatttccgtctcttcggcggcaatcaggaggacagcgcgcaggccgacggcagcaaatgggacgccaaccagcgcaagaacgatgacggcaagaacggcaagaacttctgggcgcagcgcattgcctacgatgcggattccgatacggtcggcgcgccttgcacctacgaggcgaacgactggtaccgcgtggtcatcacggtgaagctcagcgatggcaccaagaccagtgaagaaaccgtcctgtggccgaacaagagcgcgggcgacgcgttttatcccggcaccggtgtccagagcgtctacatggaaaagatgaacgccgtcaccggcaaggcgagcctggtcgagagcaagaattactatgaggttacgctgccttacaacctgaccagcgtcaagaatgaaaaccttggcctcctgatcggcgcggcgtataaagtcaacagtgatacccccgtcatcgatacgaatgtcaacaactatgcgccgttcatcggcaagctggccgacttccggatctatgacaaggccctgaatcaggatcagatcgttgagctctacaccaccaacgacctggacgacggttccaccgagtcgggcagcagcacagaatccaccggcagcaccccctctacgggcagcacgccgtctacaggcagcactccttcgaccggcagcaccccctcgaccgcttccaaggctccttcgagcacggccagcgcgcctcccaccggtgtggcgggcaacatgctgcccctgctggttctgatcccggccgcgggcgtcgccggtgtcctggtagtccgccgcaagggtaaagcgtccaaataattgggtttaaacgccggaaggcgtagagaaaaggaggttttcttatgaaaaagctcgtttccgcctgcaccgccgtggctctggccgcgatgctgggagtcgtcccggcggtttcggccgccgatgcggccccgaagctcatcgcgcactatgagttcaaggaaggcgccgtgggcaaggactccgtcggcagcggcgacatgaaggtcctgaagcaggacggcaaatccgaagcgaccgccaaggtcgtcgagggcccgaacggtatgagcgccctggagttcaaccgcgattatgccctcgccaccgacaaaaaagatgtccttgacggcaaaaaagagtacaccgtcaccttcctggtggccgcgaacagcgaaggcaagctggtaaacaacatgttcaccaccggcctgtccgaccggaacagcatcggccagcgtggcatcaacgtcctgatgcatgaaaacggctatccggaggtgcgcctgtacggcagcgccaacgattccacccatcagtccgacccgaacaagtggagcatcaaccagttcaagaacgacgaccgggaaatcggcaaatcgaactggaagaacgcgacaaagcccaccacgaccgactggtaccgcgtggtcgtcaccgtgaaactcagcgatggcaagacgaaaggtgacgagatcaccaacgccaacaatgagaagtacacggccggcagcggcgtgcagacctgctacatcgagaagatcggcggcgtctctgccaaatccgacctggtcgcgaacaagaactactacagcaccgtcctgccctatgacctaaacaacatcgacaaccccaaccacggcatcgcgctcggcggctgctattcctggggtgacaacgatgacaccaattccttctacaacaagaaggaaggcgagtacagatacgatatgttcaagggcaagatggccgatgtccgcatctatgacaaagccctgaaccaggatcagatcgtcgagctgttcaccaaaggcgacgtgaccgtggccggtactccggacagcaagccctccggcaacaatggcggcggcagccccagcaccggtgtcggcatgaatatgatcccggtcctcgtggccctgcctgcggcggcgatcgcctgcggcctggtcctgcgcaaaaagaaggcttccaagtaaggcacatttcactgacggccatacggcggcgggatgccgccaagaatgatgggattcccggggggcggacagcttccgctccccgggtggatcccataaaatggagagagacggtatgagtcaatatcgagtggcggtactcggcgcgggcgaccgcggcaaggcctacagcaaagccctcaaacagctggacaaggactgcgtgctcgtgaatatctgcgacctgcaggaagagcgcgcccagaaagccaaagaagagtttggctatgaagagactttctacgattacaaggacgccatcaccaaaaacgacatcgatgtcgtcatcgtctgtacaccggcttattttcacagcgaaatggcgatttacgccctcaatcatcagaagcatgtcatcagtgaaaagccgatggacctttcttttgaaaaagcgagcgaaatggtagcctgcgccaagcgcaacgggcgtgtgctggcgattgggcaccaatatcataatttcaagaatttccgcaagctgaaaaatgtgtttgatcagaacgtgatcgggcgcccggtcatgatgcggtgtgaggatacccgccccgtccggccgaaaatcgcgatgcacgacgccgagtttggcaacggcggccccctcaacgatatgtcctgccatttcaccgatttgatgcggtggttctttggagcggagccggtcagcgtcagcgcgcagtgcatggttctcgcggaaaacagccccaccctggcgacaatcgccaacaaggcggtggacacggtcaacattaacgttaactttgattctggagacgtcggtgtgatcacggtcagctgggcgtatccgaagaacaagcactggaagcagcaggtgaccgcgtacggcccgaacgggacggtggaggtcacgggcgacaaggtgacggcctatctggaagacgacaacaacgtcgaatacgagctggatagccaggacaaggacgagaccgaaaacgccgagaaaacggtggtccgtcatttcttcgacgagattgccggcgtgggcaaggtgcaggtcacgggagacgacgctctcaaagcgttcgccgtgtcgttggcggccatcaagtcttcgcagctcggccgcccggtgcttctgagcgaaatctacaacgaaaagcccagtatttacagtgctatgcattgcggggggtaaccccccgccggaaaaacaccccggggtttttcatcccccgcggaggaaaagggcatgatgcggggggtaacccccccgccggaaaagcgcctgcggcggttttcatccctttcgtgaaagatcgtcacgtacgggaccaaagcgatttatcctttaaggagtgaacctacatgtataaaattgcctgccagaccatcgttttcggcgatcatatcaaggaaaatatcgagaccatcctgcccacggtgaagaaaatggggtacgacggcgttgaaatcggtgtccgccatctggacaaggaaaaccccggctattaccgcgacctgctgaagaagaatgagctggagctcctggccattcacgtgggcggcaacttcctggagccggattcggttcagaagcagatcgaccagttcgaggacaccctgcgttttgcctgcgagctcggcatccactacatcttcatttctggcttccacaaaaagggcaagaccgaggaagactacaaggaagaggccgccgtctacaaccggctgggcaagatgtgccatgataaaggcgtgaagctctgcttccataaccacgactgggaaatctggaacgatgagatgggcttccgtacgctgatggccaataccgatccggagtatttccgtctggtgcccgatgtgggctgggtcacccgcggcggttccgatccggtcaagttcctttcggaattcaaggaccgcatcgaggtcctgcatttcaaggagttcacggcggaaaattccttcaccgagcttggccagggcgtcgtcaagtttgaagaagtcctcaaagcgttcggcgatctgaagaacccgctgtggctggtggccgaacaggacaagacgaccaagggcgctgaggtcagcgcgcaggaaaactatacctacatcgccggtatctgcggccgctgatccgcggcgtatgcccgcaggggtgacagaacgacgccatgttagggaggaaaccagatgaaaaaaacggtttgcgcgcttttaatcggcgccatggtttgttccctggtttcgtgcgggggggagaagctcccttccggatctgagacggcggacccgccggataccgcatcctctgaaccggatgatacgcaggacgtcacaaaccctgtcttcgatcatctgattcaaagctggaatgcgcgtacttacaccgcggaagacggaaccaatctcccctttcagctctatatacccccggattatgacgcgaacaagtcttatccctgcatcctgtacatgcacagcgcgggggtgaaatgcgacgacaattcgcacatatacaagggtgaagcgaagttcctgcgcaacctcgaaagcggcccctatgcaaaagaagcgatcgtgattgcgccgtgctgccccgaaggccagaaatgggtaccggccagttcatggaatcagatcacatatgattttgtgaacaccgggcccgccaaatacatgaaggcgaccatggagcttttcgccgccgcgagagagacgctttcgatcgatgatcggagactctatctctacggcatgagcatgggaggctttgccgtttgggatatcctcaccagaaatccggatatgttcgcggcggctattcccgttgcgggcgcgggagatccaagcgcggccgatacctttgatggaacggccatatggatattccacggcgccgcggacaaaacggtgcccaaggagagcgcggacaagatggtagaagcgcttgaagcggcaggccgggaggatatccgatacacggtattccagggacaggggcacggtatatgggccctgactgccaataccgagggcttgtacgactggctgttctcgcagaagagagacatccccggttaaagccggcacagatcccatgcgggcgcgttacggagcggaaccggatgcgggaacccgccaaacttgaaaggaacgatcaaccatatgaaacatcctgtgaccatcggcgtgatcatgctcgcgcggaacaccttcgatttcgaggcggcccgcggtctctacgccgacatcaaaaagaatctcgccgccattccggacgccaccttcgtctgcgcggacgacctggtgttcgaggttccggatctcgacgagccgatcgacaagatcaataaggcgaacgtcgacggtatcgccatcatcagcggcaccttccatctcggccatctggcgcttgagatcgcgaaacggaccaatgcccccctgctgctctggggactgcccgagctgccttacaacggaggcaagatccgcctcaattcggtctgcggcgtcaacctgaacgcctccaatctctacaaggccggccgggacgacttccattactgcatctcgaacgatatcgatatggactgggtggacgccgtccggatccgcgccaagctgaaaaacgccaagatcggcatcctcggcttccgtgcccatggcttcttcaacctcgcgtttgacgagctgacgctgtacaaggaaatcggcgtcctgattgaccactacgagctgaccgatatctggaaccagccggtggacgatgccgccgtcgaggcccgcaaaaagcagattgccggactgttcgacctctccggcgtcagcggcgagcaggtccagcgggtggccgagctctgcgagcgtttcaaggccttcatggaccgccagggcctcgcgggcctcgccgtgcgctgctggccggaattcgccgccggttacggtgtctccccctgtgcggcgatgtctatcctgcagagcgaaggctatgtcatcggctgcgaaggcgacgtgcagggcgtggtctcccagctcatgcataccgctatgggggtggagcagcccttcctggccgacctctcccaggtgaattttgaaaccgattccgccctgatgtggcactgtggcgtcgctccgtgcggcctgtgggatcagtgctgtgtccgttccctcgattcctactatgcgggcggacggggcgtaacggcggactttgtgctcaagagcggcaaggtcaatgtcctgcggatggatttcgcccggggcaaatcccgcctctttatcgagtgcggcgatgcgatctcggtcccgaaggaactcaagggcacctatgtgaaggtagtcttcgacaagcccatgcgggaggtcttggacacggtggtgcgaaacggcattgcccatcatgtgtccctggcctatggcgagaatgtccgtcccctggagatctatgcgcgcatgagcggcatggacgtgattcggtgagaaaggcagattagaaagatgcaagcaacggaaatcaagaggctcgacgacaagtcggcggaaatccgccgcctcgtcattgaggaaatcggccggctgggcgtcggccacatcggcgggtgcctctccatcgtggaggcgctggtcgtcctgtactacaagcagatgcatatcgatccaaagaacccggccctggcggaccgtgaccggttcgtgctctccaagggccatgccggccccgccctgtatgcggttctcgcggacaaagggtatttcgacaaggaatggctttggaccctgaacaagcccgagacccggttgcccagccactgcgaccggctccgtacccccggcatcgatatgacggcgggttccctgggccagggattctcggtggccgtcggtatggcgaaggccgcgatgatggacggcaaaacccaccgggtttacgcgatgatcggcgacggcgaaagccaggaaggccagatctgggaagccgcacagtttgccggccagcataagctccggaatttcaccggctttatggattacaacaatatgcagatcgacggcctggtttccgatcagctcgacgtgcagccggtgaccacccgctgggagtccttcgggtttgcctgcgaggtggtggacggtcacgacgtggccgccatcgacgaggcgatcgagcgttccaaaaccgccggccgtccgaccatgatcatactcaagactatcaagggcaagggcgcctattttgcagaaggcaaggtcgaatcccacaacatgccgataacggaagacatgtggaaggcctgcgtggaagggggagaccgccatgttggataatcaagagctgcgtgcggtatatatcgaggagcttatccgatatgcggaaaccgacgaccgcatcaccctcgtggaagccgacctgtcaaaggcgctgtcttctccgaaattcaaagcggcttatcctgagcgtctgatcgacgtgggcatctgcgaagcgaacatgatcggcgtggccgccggtctcgcggtggaaggcaagctgccctttacccacaccttcaccccctttgctacccgccgcgtctgcgaccaggtcgcgatttccatcctttacgccggtctcaaggccgtcatggtgggatccgaccccggtatctccgcggagctcaacggcggcacccacatgagcttcgaggacatcggcgtcatgcgctcactgccgggtctcaccattgtagagccggtcgacgcggcgcagctcaaggcggcgctgccccagattctctcctgcaaagaggccgtatatctgcggctgttccggaaacaggcccgcaagatttacgatgagggctgtgccttcaccttgggcaaggtgagcacgctgcgggacggaggcgatgtcaccatcatcgccagcggcatcatggtcggggagtccctcgacgccgccgaccttctggcgaacgagggcatcaaggcccgtgtgctcgacatgcacaccataaagcctctcgaccgcgaggcggtcgtccgcgcggcgaaggagaccggcgccatcgtcacctgcgataaccacaacgtcatcggcgctctgggaacggccgtggccgaagtcaccgccgaggaatgtccggtgccggttgtccgtatcggtgtgaccgaccattttggcgaagtcggcaaaatggatttcttgaaggcgaaatatcacatgaccgcggcggatatcgcggcggccgcccgcacggcaattcagaagaaaggaggcagataacatgagagtagcactcggctcggataaatccggctttctcctcaaagaggcgatcaagacgtatctgacggaacagggaatcgagtttgaagacatggggacgcaggatctcgagcacggcaagccgtattacgaggctgcgccggtcgtggcgagagcggtccagtcgggcaagtttgaccgcggcatcctcatctgcggcaccggcatgggcatgtctctggtggctaacaagttcgacggcatctatgccgcgtgtgtcgagagcgtctacggcgcgaaaatgtgccgcgcgatcaacaacgccaacattctcacgatgggcggctggatcatcggcccggagatgggcgtggaaatggtgaaagcgtttttgaacactggttttacccaggatctggaaccctggcgcgcggaattcctcaccaaagcgtttgatattgtgaaagggatggacaccaaataaccatatcataaaggaggagcaaacacatgaaaaaggtaacccggtttctctgcacggcccttgcatgcgcgctgatcgcccttccgatgtccggctgcggcggaggcggaggcgaaaaaaatccgtccggcgacaaagacggcctgagcggcgagctcaccatcggcaccctgcccaagtgggtggaggacgtcaccgcctatgtggaaaacttcaacaagatctatccgaacgtccaggttgaagtggtcggctttgaaggtaagggcaatgattacctgaccgcccaggccgccatcagcgacctgcccgacctgatctacggcttctcgtcggacagcaacgtccgctattccgtggagcagggctgggcctatccgatcgacgagtatgtgaacgccgacgaggagttcaaggagatcaaccaggcctccctgcaggcgtatacctacggcggcaagctgtatggcctgccctatgagctggagttcgatgcctttgtcatcaacatggatctcgtcgatctcctcaacctcgacgcccccggtatggattggaccctgaccgagtatttggaattgctcaaggcggccaccaccaacgagtattccggccagaacgcgctgggcaacttctcccagaagctgacgggcgtgtacggttcccagggccagctcggcgcccacggctacaaccgcgacaagaacaccgtcaccctgaccgacggcgcctgggtcaatgcccagaaattcatcaaaacgatgaaggacatcccccagctcctttccgataccatgaaggaccaggccaaacggaacgccggcgagctggacgattaccagaagaaattcggcgaaaactcggacgctgcccgtgaaggcaaggttttgttcatgttcaaggccagctgggattgggcctgggtcaactccctgtcgaacgactggcagtacctgcccctgccccatccggaaggacagcccagccgccagtccatgcacaccaagtgggcgatgatgatgtccaccaccaaatatcccgacgcggccttcgcccttctcaaacaccttacctacggcaaggacggcaacgtctccaagctggagtacctgaagggcaagacggacgaagagggcaagcccgccaaccagttctacatcccggtcaccagcaacgacgcggtcaacgcggcgttccgtgatctcggatttgttccggaaggcctgatgtggctgtacgagaacatggataccgacgcgtacgagaccttccgttccgactggtacaaggatgtcgccggctggggtgacgtctcctccaacatgagccagcaggcggtcaagtgcgagagcggcgaagtccagcccgaagcggtcgccaaggaaaccgaaaccatgtgcaacgagatcctggcgagggaaaaggccatcagtgaagaggccatcgccgccgcccaggcatcctttgccgacacccgcgcgaaaatcgaaggccagtaacccgatttctgtacgatcctttcgcaaccgttaccccaagtcttgtctggatgtccgcaggccggtaccggcgacttgcagcgccggtaccggcccgggcggaccctatcgcgccgtttcccccttcatttatggcgaaaattgtcgaatcccgtttgatttggagcctcctgccgtgtccatggcacggaaacccctgggactgaacctgccctgcaggcgggtgcagcagtctcacttaaagttgaaaattctgttgatggagcgggtgcaagtcctgtggtagaaaaggacagtgcttgtactcgccatattcaacccttttttgaagcaatcggtggataacttctatatagcttctctaaaacaggcctccatccctccgccgcgggatggaacgccccgattctggtgttgcgcggcggagaaaaggggcttgtatgaaaaagcggatgagagtgtgttcatggttatcctgcatggcggtgctggcaggtctgtttcaagtgctgtctttcacagccggagccgagtccgcagcccccgaggcggcatggttgcagatcgaggacagggacgtgatggcccagcaggtgttcgagggcggccgtctcctggcgcagaacgaggtgctggaggtttcgctggatcttccggcggcaggggactaccgcgtggccctcgtatacgaacagacggattacccgacctttggaaacagcggggaaatccgggtcaacgacaaaacggcggctctcactctgggaggcgtctggtacgacctgtataaggagcgccagctcgaccgctacggcaatgagacgatcagcaacagcgcgtttgccaccggcaaaatcacgcagtttttgtccggcgacaccgactacgaccgggtggacagcgtttatcccttccagcaaggagccaattccatccgcctgacgttctccgagatgccggtgaccgtgtacgagattctggtcgtcaaggcggcctcgtacagcggcctttcgaaaaccgctgagaacaacggaaaacagatcccgattcaggcggaggattatgtctggaaatcggattcgtatatccacgccggcaatgcccaggacgcggacgtcaccccgtaccaggtggacaagaaaaagatcaacgttctcgacggcgccgtattcgacacccaccggcaaaaggtcctgtaccagttctatgtcgagacggcgggggattatcaaatcgccctgcggtacaaccaggattccaaaaaggggatgagcgtttaccgcaacatcgagatcgacggacggacgcccgacgcctgctttgagaatatttcttttaaatacaccggcctcgactatcagacccagacggtcacgaacggcgacgagccggcctacatccatctgaccgagggatggcacaccctgtccctcatcgtctcatcggcgccggtggcctcctaccaggagcgactgaacaccaccctgcgtgaaatcggtgaggcgggcatcgcggtcaagatgatcaccggcggacaaaaggacaaaaaccggacctggaacatcgaggagtatcttcccaccatcgtggacgatctcaatcgctgggccgatgagctggacgcggtttatgacgagctcgaggcgctcgccggacgcaaaccgtccttcgcggcttcccttccgaaatccgcgcagtatctccgcaaggcggcggaatcgccccggaccctgcccaccaaaaccaccaaaattttcgagggtgccggctcggtcgcccagatgatcggcgaccttatcaccccgctgctccaacagcagctgaccctcgatcagattttcgtttacagcgctgaggagccgcaggaatcctatccgggtttctttgaaaggctgataaacggggtcaagcacttcctcctgtccttctcggacgattacaacagcttcggcaatgtggatacgagcgcggatgtcctggacgtgtgggtcaatcgtccgctgatgacggtcgaaaccctccagatgctcgcggacgcggaattcacccccaaaaccggcatcccggtcaaggtgaccatcatgcccaatgaagagaagatcattttggccaacgccgcgcagcagacgcccgatatcgccatgggcctgacgctcggccggccgtatgagctcggcctgcgggatgctgtcgtggacatgtatgagtttgaggacttcctcgattattacgatgaaaactacgaccttcgcctgctgacccccctgtgggtggacggcaagatgagcggagtggtggagagccgtaatttccaagtgttgttctaccggacagatatcctggagcggctgaacctcgaagtgcctgatacctgggaggatgtcaagctcatcatgcccgaactcaagcgcaacggcatgaatttccatgtggcgctcgcctcccacaccggtaacaagcccattgccactacctcgtattatttcgcgcagaacggcgcgccgctctattccgaggacggcatgaccacggcgatcaacgaggaaaagggccaggaagcctttgacctgctgacctccctgtttggcacctattccattccggtcacgacggaaaacttcttcaacagcttccggtacggacggatcccgatcggtatctccaacctggatacctacatcaagctgaaaaacggagcccccgaaatcgcgggtatgtgggatatcgccccttcgcccggcattatggacgaaaacggggtggtgcaccgcgatcagacgagcgcgggcgaaaccgcggtcatcatgaagcggacgactatgaaaaatgaagcctgggatttcctcaaatggtggctgtccaccgaggtacaggaggaatacggcttcattatgcagaccaagttcggccccacctacatctggaacacggccaatgaggaagccttccagtccaccgacatcgaaaagcagcatatggatgtgattttcgagcagtggaaatggacctatgaggttccgctgcatcccgcttcctacatgctcgagcgcgagctgtccaacgcctggaacaatgtagtggtcaaaaaccgcgaggcgcgcgcgtctctggataaggctgtaatcaacatcaaccgcgagatggaacggaaactgcaggaattcggttatttcgagaacgggcagatggtgaaaccctatcggatagcctcacttgatctgattgaggaggacgggcgttcatgaaaacctggctggataaaaaggcacattggctgctgctcgcgcccttcctgatcttgtttgccatcttcatcctgctgccggtcctggcggctgtcggactgtcgttcacctacttcaacaccgtacagaccccctccttcgccgggctgcagaactacatttccttgatgacgaaggatccgatcttcttgcagaaggtcctgcccaataccttcaaattcgccgtgatcgtcgggccaggcggattcatcctctcctttttcatggcgtggctgctcgcgcagctcacccgcggcccccgcaccgtcctggccgtcatcctgtattctccgtcgatgatcggcggtgtcaccatgtcggtggtgtggaaggtcattttcagcagcgaccaggccggttatctcaacagcatgctgctgtccctgggcgccatcaacgagcccatcaagtggctgcaaagcgaaaagttcctgatgcctatcatgatcctcgtttctctgtggagttctatgggcgtgggcttcttggccatgctctccggcgttatcaacggcgaccgggagatctatgaggccgcctatatcgacggggtgtccaaccgttttcaggaaatcatgtacatcaccatcccgacgatgaagccgcagatgctgttcggcgccgtcatggccatcgtcaacgccttcaagaccagcgacatcggcgtccagctctcgggttccaacccgacgccgcaatacgcgggcagcctgatcgtcaaccacatacaggactatggattcatacgaaatgaaatgggctatgcggcagccttgtccgtcgtccttctccttctgatcttcttctcgtcgcaggtcgccaaaaagctgttttccgattaacgaatgaaggagtggacttgtgatggccatgaaagtcataggggtcaaccccagtaaattccacagaagccaaatcaaattttacatcatcctggcaccgatcatcctatttatgatgctgcccatcctgtacatcgtcatgcacgcgctcaagccgattgacgagctctatctgtatccgccgcggtttttcgtgcagaacccgactctcgacaacttcgcccggctgttcaaccagacggggctcagccagatcccggtgtcgcggttcctgttcaacaacatcgtcatcgccatatccacagtgctggccaccatttatgtcagcgtgtcggccggatatgcgctttccaaaatccgtttccgcggccgcagcaccattttcaccatcaaccagctcgcgctcatgttcgtggcggtggccgtgcagattccgcggtatctggtgatcaccaaaatcggcctggccgacaacttcctggtccatatcctcccggagcttgccatgccggtcggcctgttccttgtcaaacagaacatcgaccagatcccggattccctgatcgaggcggccgagatcgacggtgcgacgcagttctatgtgctgcgcagggtcatcgtccccctggtcaagcctgctctcgcgacggtggcgatcctctctttccaggctgcctggaacagcgcggcggagtcgaacacctttatcaacaacgaaagcatcaagagcttcgcgtattatatgacccagatttccaataccggaaacgcgttggaaggccagggaatggcggccgcagccgcgctgctgatgttcctgcccaacctgattcttttcatcgtgatgcagtccagggtcatggataccatgacgaatgccggaattaagtaaaggagtggtacgcatgaaaaaaggtggtatgctttgcgtactgctggcggctctgctggtcttcctgtgcgcctttccggtttcggcagggaattccacggcgaatacctacacggtgtcggtcaactgggaatggatcaagactcaggacgcctatctgccgggacaggtctatttcaaggatgagggcctgaataggccgtccgatatcgtggtcatgaacatgaagatgtatgtggcggattccgacaacggccggatcctaatcaaggatctgaacgaccgggagaaaccgaccgagatcttgggtgagggaatcgtcaaccgtccgaccggcatttatgtcacggctgacggcaccatttacgtggcggatgcgggttccaagacggtggtggtcatgggccccgacggtggggtccgcctgaccatcggcgaaccggattcccccatgtttggcgcggacgccatgtgggagccctccaaggtggcggtggacggccgcggcaacatctatgtcatgagtgaaggcggctttaacggcctggtccagttcagcaagacaggggagtttctggggtacttcggaagcaatcagacctcgaagtccctggtggaaacgatccaggatatcttttttacggccgaacagatcgcccagctgtttaaccggaagcctgcggctttcaccaatgtcgccatcgatcaagacggcctcgtatacaccattacggccaatggtgaaggcaacgtggtcaaaaagcacaacgtcgccggttccaatatcctgccggcgtcgaaaaaccgcaatatgttcgacgacacgaacttcgccgacatcacggtcggcaaatggggccagatttacgtcgtatccaacacgggtgtcatcaacgaatacgattacaacggcaacattcacttttccttcggcggtctgtccatcgccaccgatctgaacggcctgtttacggtaccctccggcatcgcggtggacgacaacgactgcgtgtatgttctggactatgagaaagggatcgtgcagtcattctatcccaccgccttcgccaacatgacccatcaggccctgagcctgtatgaccgcggccagtatgaagacagcatggtttactggaaacaggtgctccagctttcaggatcctcccaggtggcgcactacggcatgggcaaatgctatatgaatctgggggactatgaaaacgcggcctatcatttcaaaatcgcctccgacaaggcatcctattcggacgcctactgggagctgcgggatcagtggatgacagagcatacggtttttgtggtgctggggatcgtgatggtggtcgtgctgctgttcgtcctggtccacaagcgcaaacataaagagggcaagtacgtttactctccgtatgtctgtcctcccggcaagggcttctgggccgatatgaaattcatggccttctcctgccgccatcccatcgacgcggccctgtacatcaaaagcgggcagaaggtgtcgaccttcagcgcggtggtggtcgggattctgggggtgctggtctacctgttcgactatgtttaccgcggcttcatcttcaaccacaacagcctgcggtacacccagtatacggtagtgcttgcgacggtcgtcatcccggtggtgctctgggcgatctgcaactatatgatcgccactatccacgcgggcgacggcaccttcaaaaaggtgttccgttccaccatttacgccttcagcccgtatatcctgatcacgccgtttaccacgattctctccatgttcctgaccaacgatgagggctttatcctgaccattatcagcaatgtcgtcgtggtttgggtggtcatcacgctgttcctctttatcaaaaaggtacaggatttcaccttctgggagacggtcaagaacatcctgatcaccatattcctgatcattgtcatcctgattgccgcggcgctgatctattcgctctggaattcgatttccgagttcctcgtctctgtctacagggaggtgttctatcgtgggctcaacaagtaagctgctggccggtgtggcggccgccgccctgctgtgcggttccgttgtcctgggggataatcccgtggccggggacgatatcggatatgacctgccaaacgtgatcgccaacctggaggtgcattccgcccggcactcccgtgtggaggatttcgccgaatcgctggcggcgctctcgaccgacggctacacgctgttgatcgaggacaacgccgttgccgtgtatttcaatgaggaaaacgcctccatccgggtgatggacaaaaaaagcggctatgtctggggatgcctggagccaggagccgaagcgaacaaaacctggtcgtcggtcggcaacggcatcctggcggtcgatctggtcgattccaagctggtggccaaaaaacagggcctcggctatccgggggaaacctccttcgactacaaggtcagcggcaagacggccgcatttaccgccaggttcaccaaatatggcgtcaccattccctttaccatgtctctcgtggacggaaacctgaagtttgagatggataccaccaagatcgaagagaccggcaaatacctggtccagaacgtgtatttcgtccctttccttggaagcacgaaagaagatgaggtgccgggctacttcttcctgccggacggttccggggcccttatgcggttccagaaaagcagctcctataccgtcgtctataacgaaaggatctacgggaaggattacgccatcgaccagacggcacagacgaacgatttgaaatcctcccgtcccaacgacttcctgacggatgcgaacaacgtgaccctgccggttttcggaggggtacagggcgtgaagcagcacgggtttgtggcggaggtgaccggcggggcggaattcgccgcgattatggccacgccggccggtatgaccaccaaatataactggatcacctcccgctttatcgtccgccagaactatatgcagccgacgtcgaaaagcggttcgggcgtccaggtcacccaaaaggtgcccaacgcctatacggcctccatcgagtaccatttcctggatggcgacgacgccgactatatcggaatggccaagtggtaccgcagccgtctgcaggaacggggaatcctgaccaaaaaagcggacgacgcggccgccggaatcccgatgcaattggatctggttatggcggatgtcaaaaaggggttcctcttcaacagcaccacctccatcaccaccaccgaccaggtggccggcctgatggacgccttgaaggaacaggggatcgccaatacccaatacgtgctcaaaggctggcaaagcggcgggctgggcggctataacccgcagaagctcggctttgaaaagaagagcgggaaagcgggggattaccggaccctgtctgaaaaggccgcggagctcgg

SEQ ID NO: 3733 - DNA, 13411 bp, Unknown
  16S sequences of unknown bacteria
cttcagcatgcctctattgtatcatgcttatgtgtatttggaatttctcattttgacttgtactatttatattctagcaccattgtttgctctagttgtgtaatactcatacaatgtccgagactccgaactcttcgctattagcagaatcattgcattgaacagtactgcttgcagcttttataaatcaaatgcatcatttgactctaagaacgcctcaaattcatcaactgtatcaaattgagttgtaccacctaatgtttttgttatagtattcgcactcataataaatgagtctgcatcgttcatattaattgctaaagccatattccttaaagaatccccaaaagtttcaactaattcatttgtatatgcgatgtatgtatttctaaaatcccccctatactgttctaattgcaaatgaagttcttcacattcccgttcaacttgtaatctctcttgtcttgcaataccaggttctttaagggttttaacagcataatcataggtggcgtctataaccacacccgcaactacagaacccacaattgcacctacaggcccaccaaaggctcccatagttccaccaaaggttcccatagtttcagaaatcttctttcctatggtttttccagccatctctcccacagcacctgctttaaaagtaccaataacccctattcctgactttgcaatgttatgaaaacactcttcatcagatattttcccttccattctatcattgacaattttaaataaacttgtagtaaatgtcacaatttgtgctggtgcacttgaaccacctagttttctaagtgcctctcttgatgaatttctcatgactgcagaaagcgcagtatttgcttgtcctgtaacatatcctatcattgccccttttgttgtttcaacggcaattttcttagcggcctcatcggctgtcatttcaccattcacaactttatttaggcacctcgcaaatgtcatagagcctttgattacagctgaggatttagcgtactgcactcccgcatcatgtcctaattgaaatacttctttcgtagtaaccactttaggctttaaaacagcattttcagcctctgctaatgtcaatttactctttactaatttcttttctgcatctttgacatatttaagccgttcttctaatgtacctgcaagttgtacattccctttttttcttgcattctcaagctgttcttccaatgaactagctttatcagccatcgcttgttttattgcatcatatctatcagcaggaacagaatactgtgcatgaggatatttttcacgaaagttttttccgaccaaggtatcaacaacatctgcaggatttccctgattaaatttcatctgagttcctaaagatgcaatttcattaccttttgtatcaattgccataatatcgaaaggtgtctcattaacagcatgacctggtaagtcatcgactcttgaatatctaataccactctccttcaaaatttcttctgcgtttctctttgctacatcctgtacctccgcagcatatcctctttgtcctggcatattgggttttccatttgcaatacctgaaagcgatttttgtaattgtttccccgtagtgccatcataacccgaaaaggccttaacaaattccctgccagcatcactatgtctttctaaatttccagcattaattcctaatgcaatctgatcctcgatatttttttgttcagttttcttttttcttttcaaaaactcaagcataaatccacccccagtttttttatgaaaggatatatgtatttaactcattttgaagattaaagtattctattaattttttttcgcaatactttccaaagtttgtttctaacccaaatagggttagcgctttttttatgatttctcgttcattatcatcataatttgaatcagccatcgctaaccctatcatttcaaatataattattttcttttcacgcttcccacaagtctgatttatattattaatgacacgatttaaatccttatctatctcctccattttaaattctattttcatttccatggaataaccatcaattacttgcctctcactttcactaaagtccatatccgatgaagctaaatcataggctatacttaaaaataatttcttttgttccgtgttgagtaatgataaatacataattatcctccatatttttctttaagttttttacaagattcataatttaaattataatactcttctttagaaaactgactcgataaatattcttcataaaatttgtctacattgcaaaatattggtcttttaatataaatcctacacagatgcgtattttcatcaaaaaatttacatacaccatctcctctattcatcccttcatccaaagaagattcgtctatatgcatacagcacaaaccacatttatcacaaataaacatcaataaatttctccttagtttttcacatcctattatctcgaaattttactgattactgtttctccaattcttatattcccagaagtcacacgaccagcatatgctttcctgttaaaattagtactgcccttatccgtggccactggaagatcccagcctcgagacgtttgtaagaagcaggaaatcatcttcttcccaaacaaggcccttgattttccgactgctcgaaccacagaagcgaaagaggaaaccaatacagaagagatccggatgaagcttctgctttacaagggttgcaaggtcgtcatccctttcctgaaaacaaaaacatatgcatgtcggaactaggaaacatctgcatcattcagcatgaacagttacctcaatgactatagaaagcgtctctttctgaacagaaagagaaagggatatctgtaaatgtccagtttggatcataattgactgtccgaataaaggcgggggcttcttagacgtttcctgttttgtgtggattgtcaagttttttgtgtaagttttgaaaaaatattttggggagggaatcctccccattcttatagtgcggcgttttttaaggttaattcgctaaagcatcttttaaaagctcctccaactcatcgcttatttcacgcgcttcctgatacgcagaaatcaatctctcgtaggcttcactgagtagaccagcttcgtcttcttgatccgcagcatccaacatccttaaacgatgatctatttttcccatttttcatgaagggtcattttcagaaacctccattctcatatttacggatccgttcctggatcttgtcgtccatatccagctgattccggacaagcgccagttgctttgcggccgtttattccatttcttatataattcatttacccttaaatatagcagcttcagcaacgcattctcattcgggaaagccccctttttcgttactttgcgtaaacttgagttgacactttctaccgcatttgtagtatacaggattttccgcactgcacttccgtagctgaaaagctgggctacatgctgccagtttcgcactcacacatcaacagctccgggatactggctccaggcctgacggaaacgttcaaattcggactccgcagctttcagactggctgccccatatacttttttaactgggctgtgaatcgtttataatctttgtttggaacatacttgatgtagttccggatcaggtaaacaagtcatccataatacttattataatattatctacgtcaacatccacaccattaatcaacgtactctttccactcgacatcgtcgctacaacagctaccggaaaaatattactttcatcaatttttatgccatctggaaaaaaatctttacttatcaatgactctttcaaattattttccataactttccccttcttatgagtagattttttatattttaccaatactattctccttccattaaagtcactgtatctccctgactcctcaaccacatctcaatcccctttccaaacacctccgcctcgatcacatatcttccatcttcttcctttatgatccgcgcggttggcaggcgatccagtacggcatctacatctgttccgctgtattcgaactttactttctgcagtttgccgccatacatgaactggatgcgtttgcggaattcgccttcttcgaagcgggagctgtaggggatgtggaatttttcgtccagaagtttcagctttttgatgcgatccagacggtagatggtcgggaaggcatcgttcagtacatcgaagttttcctgtacttctttgtcgtcgatgaaggcggtcaggtagaagtagtattcggaaaataggatcgctaccggctttaatttgcgccgcacgatcttcttgtctttcgtgcgcatataatcgatctcgatatactggctggcgcggatggcctgtccgagtgtccagagcttgtcgatgaatacggtgtgatgccgtggttcgacatagtggaactcttcgttgctgatcagatccatgacgaccttctgatttgtctgcgggacacagcattcgacaagcttgtccagcagcaggagcatctcttttttcgtaaaggcccggctgtcgagcaggattttgcagacagccagaatctcactgttggaaaggcgtgtcttgtagagctgctccagacggtagccttttgcactccgatcatagatgactgaattgataaagccgatgtccgccgtctcgttctcaaaatattctctgatatcgtcgatgtcccgctggatgctccgctcatttactccatattgtcgggcctcttctgctttgtttacgatgccgccgttcatcagttttgtataaatccctaaaattcttgcgatcttatcgcttttcacgttctcatattccagatctctcatagacgtctccttttctctcattgtactcacttccaatgacatattctgtctatctaaagaaattccggtaattttttgtcacttttattatatcataaagttttgtccttgcgctctttatgttacgctagatcgcacaaaatttacgatctgtttttatgcattttcataagcataacaaataaaataaatgtacgatgttgaattttattgcatgcaaagtctcattaacaacgcggtacccattttgacgaattctcatgagtaacctgcaataatttatataacaaaaagaccatgcatctctacatgatccctgtcatttatttctcctggtccgttttttatctgcaaatcatgaatgctattccttccggtatttctcaatcattcactgatacttcttcattcacagtcttttttcactgcttttctcagctcctgtcgaatctcttcgttcgttataaaagccatctcattttctcctgtttaccagcatttcacgttttaaccgagtcaggcaatccccctgcttccattgcgcgaaacatatgcgaatatccgctttgacgctctctcacaccgctcccgcatgccccacgcactccgccgcacacttcgtccctttctcacagcactcccacaggctcttctgctccagaagccctgcgatgaagccagcgacgaagctgtcgcctgctccggtggagtcgatggctttgaccggaagggcgggcatatagaagcgttctgtgtcgctgcaggcgtagcagccgtcttttcctgctttgacgatggcggtgcggatgcccatcgcatgaagtgcctcggccatttccatgtagtcctgcctgccggtgaagagagcggcttcgttttcgtttggaaacaggtaatcgatcaatggaaggatctccgaaatgtcctgcggcgtaagctgccggaaggtcgggatctttgtgtcggcacagaggatcgcgcctgctttttttgcttcccgggccagattgatgacagtctctttctgatccagcggcgcgcggaacaggctcgcgagcgagacgacggatgcgccgtgtacgacggacggatccgggatgtagccggtcagcatcgtcgcctcgctgttgcaggactccctggagccgtccggatgcacggtcagattcgcgatcggagtcgccagcttagaaaggcgagatacgtgtgatacgtcgataccccgttccatcgccgtctgatatacgaggtttccggcgacgtcttctcccagtccacagacgagtgagaccggaacacccattttggcgagaatcgaggcttcatttaatgcatcgcctccggtatttaagctgatggactgtgcccgatacacacgctcccgccacggctctttgccacgggtgatgcagtctacgagcgcctgcccgatacatacgactcttttttccatacacattcatcctttttacatcataagtaagaaaatttaaccgaagtcaaagcggatattcgcaatccgcttcgctacttgctcataaccgaatagctgcttcgcagcttatcaggagtggcttgtaccactcctgatacaagcaagtcccaacccactgcttattgctttgcgcaattgaagcaggggacttgcttgattcggttaaacaaattccctgcttcaattgcaggaaacaatcagcagtagatcatgacacattgcttattttatctttgaaccgctcctactctcccagaatctccgctttccgctccagcagctcattccccatcagctgctgctccacgttctcgaatccgattcgctcaatcatatttgcgaagcgctcgcccggctgtccctgctcgcggtagagaaggattgctttttcgatgacattcagtgcctcttctttatcggtaaaaattttgcttaaggctcttcctctggctacctgcttgccccagcggccgccgatgtaaatcttgaagccgtactgtccgtctgtaatcgaatcgaatctgcaattgccgatgcaccgaccgcagtgattgcatttttcctcatcacggtgaaggacgccatccacaactttggacgcgccgatcggacaggccgcagctacgctgcactttttgcatcctttgcagcggcttttatcaaagttcgggatacgctggccgatgatgccgagatcgttcagatccggcttgacacagttgttcgggcagccaccgaccgcgatcttgaatttgtgcggaagcgcgacgccatggtagccctcgtaaaagcgatggtgaatctcctcagacagtgcaaaggagtcaagcaggccgtactgacaggtcgttcccttgcaggagacgatcggacggacctttgcaccggtaccgccggtctgcaggcctgcctttgcaatgtaagcctgaaacgcctcgacattttcatatggaatgccctgtacctccacagtaaggcgggtcgtaaacgccatatttccatttccatatttttctgcggcttctgtcaggcacgtcatctgcgctgtatttacctttccatttaccgtgatgacacgggctgaaaaattgtccgtccccttattatttaaaaacccaagtccctttaaacgtttttcttcttctttgctgatcgtaagcgctgccataatttcgtttcctttctgatcttctgtattttttgaacgcaaataagcattcccccgtttccagtgcgcggagcactaagcggcgagtgagggggatgcttattgcccatgctccaaagctgcgagaatcctgccggcagaactgccgacatttccagatattgtaacatctcccctcccttttgtccatgaatgtcggtcatcaaagattttttcgttttcgctgtcctctttttctattccatgatagaatgatgatgccagggtccaaaggtcaaaaagccgttcatgcttgcatgaaaaagcatgacttattgacccgcaaaataccttaatataaccaatccgcgtcaggagggtttctcatgaagcacatccgcacctgttttcacacgctgctcgaccccggtctggattttcgggttcggctttttaatattctggcgatcggcggcatggccgtcagtctgattatggtcttttgcagcctttttatgggggcatggccaaatgtatgcctgaattttctactggcacttgtctccggcggactgtttctctactcgtatcacagcggccattatcaacgctgctatctcatcacaattgtgctgatttttctcatctttttcccggtcatgttttttacaagcggcggatatcagggcggaatgcctttgtttttcgtatttgccgtcatttttacgattctgatgctggaaaaatgcctggcgatcctcgtttccatcacggaagtgctgctctactttctgctctgcctgctcgcctatctgcatccatcgtacatcacggcgtttgtcacggaagcagatcggctgatcgacgtactcgcggcgtttctctcggtcagcatcggctgtggaaccgtgctctattttcatctaaaggaatacaatgagcagcaacggcttctggcagaacaaaatctgcgtctgcgccagtatgacaatgcaaaatccacctttctcacaacggtggctcatgagatcaagaatccgctgaattctatcttgcttcatgcacgcgacacctccgagctgcttgcggagacaccgcttgatttttctctgatgcaggaaaatctcagcacaattgagcagtctgtgatgcgaatcgaccggatcgtgcttgatctgatggacaccgtctcgatcgaacaagggcgactggcactctctttacagctgacggaccttgcctcattgctgcagatcgtccgacacgattatgagcaccggcaaaatgctcacacaaaccgtctcctgctgcagcttccggaaaccttaccgaaaatttccgtcgatccggaacggctgattcaagtgctcgataatctgatctccaacgctgagcggcacacgaatcatggcacgatcacgatttcactctcacgtggtgagcatgctcaggtgatctgtgtctcagacaccggctccggcatgtccaaagagatgcagaaaaatgcattccgcggctatgtctcagaggatcaggattactggcggcatggcatcggactgtatgtctgccatcagatcgtgacggcacacggaggaagcatctggatcgagagcagggaaggtgcgggaacccgcgtatttttctcgcttccggaggatgtataaacatcaccactgaaaggaacaaaacaatactatgaatgaaccacatgcccgtatcttaatggtcgaggatgagccacaggtactggaaatcaacagccggatgctgcgacgcagaggatatgaggtgctcaccgcgcagacggctatggaagcttatgaacagctggatgctgggcttcccgacctgctcattctcgatatcctgctgccggacggtaacggtctggacatctgccgtcagtttcgaaaaaaatgcctccgtccggttctgtttctcaccggaaagagtgatgtgaaagataaggtcgccggtcttatggaaggcggcgactactatctcacaaagccctgccagtttgatgaatttctggcggtcattcagatgctgcttgcgcgggaacagcggcttatggaaaatcttcagtcctcccgtcagatcacgatcaaaagcctgatgctggatctttccatcgggcatgcttatcgaaacggctgcgatgtcggtctgacccgaacagaattttctctgctgcgtcttcttgccgaacatccggaacagatcttttccgcaaaggaattgtatgaggccctctggggtacgtctgccgatggtgacaccggcacaatccgccgccacattttcaacctgcgcaccaaaatcggcgcagatgaaactgatgaatacgacatcgtatccgtctacggaaaaggatatcttctcacgtgccggtaaatgtccctttttcttcacatttacaaaggctggcatttatgtggtatactaaaagcagaagcagcaggacttgatttggctaactattataaggagggttgcatatgaaaaaatattatctgctactcgcagcgggcgcactcggctgcgcacttgcttcgcttccggtgctggcatccgatgcccccacggatgagggaaactacatctggcaggatgaaaacggcgacttctggtggcgcaacggatcagaggacgaatacctcggagatggcaattatgctccggacccggacagcggcgagctgatggaggcaaacgatgccggatggactgagcaggacggctatttcgagccacactattattatgaggacggcagcgtctggtgggaaaatggcgacgaacagacatacatcggctcacgggatcagtattacattgatgattacggaaatctgcaggaattttccagtcccgcatcggatggaaatgacagcagccaggtctcctctgattccaatagtttctctgacgatacgcagcagcgcacgggcgagctccacctgatggttgatttccagtcgacagaccagattctggaatctatgccggatggaaaactgggctactccgagctacgcatgaccaatgaaggaaaaagtatggcgctcgcactgaaggtcgcaaatacagaggcgcacacgaccggtaccccgcaggattttgtatcggaatattatgcgatcaacggggcagtcgattcagaggagtctctctcaatcgcttcctatccggccacccgctttcactatcagacagcactcaatgaggatacgagagacgtcgacgcgctcgtctgccagacggatgattatacattcggacttctcattctgacgccgccggactactatgatgacgcagcaaaagctgctgccgatcagctgattgcatctgcggatctgatctacgcggagcgtattgatcttgcacagacggattattttgatgtgctcacaccggagcgctggaaatatctctgccattatgagacgactccgacagaaaatggcggctatacactgacctattacaatgaggatattccggtgctgactctggaggcacgctactatgacgggacagatcagccgctcgacagtgtctggcagggatatctcggccggattacgacctgggatggctccagctatgatctgctcgccacgatcagccagtattccgaggatgctgccgatggatggaaggaaatgtacaattcttacgaggatgtcataaatggaatccggatcatggatggctgctcgcttacggaaggcagccacgcgtgaaaataaaagcgaactatataaaatccgtcaggaacacactgcataaatcagcagatctgtattcctgacggatcttttttaaccgaatcaagcgaagtatctattcgattatgacatatcataatttcttatgatcctgcaagcagcgaagcggatttctcatgtttgcagaatagcgcaagctgctttatattttatatttcttcctttcccgtcttcgcccggatcgcaagcaggacgcagatcaaaagcacgatactcaccggaagggcgatccaggaaagagcggacgcaccgatggcctgcagcacgccgatcaggaaatacccggtcaggcagacggctgcgacaacaagcacatacggcagctgcgtggacacatggttcacgtgctcacagtgtccgcccgcggaagccatgatcgtcgtatcggagatcggggagcaatggtcaccgcacacggcgccggccaggcaggaagcgatcgagatcaccatcatctgtccatccggaaatacaccgatcacgatcggaatcaggatgctgaaggttccccaggatgtgccggtcgcaaaagcaagcagcgcagccacaaggaaaatgatcatcggcagaaagccctgcatcgcatttgccgaacctgctacgaggtctgcgacgaaaacttttgcgccaagcagatttgtcatgccggataaggtccacgccatcgtcagaatcagaatcggcgcgatcatggagcgaaaaccatccggaatgcactcggtaaactcctgaaagctcagagtgtcacgcatcatataataaatgaaggtaaagacgagcgtcactgcgccgccgagcacgagaccgaccgacgcatctgaggaagcaaatgcatccacgaaggaggctccgtcaaaaaatccacccgtataaatcatcgcaataatgcagctggaaatcagcacgacgaccggaagcaccaaatcgagcacatgtgcattttctttctggatctcctcttcatttccctcatacgggcgtccgatcgtcgtaaacagatcgcctgcgattgcattacgctcatgcactgccatcggtccgaaatccacgcgcagaagcgtcacaccgagcagcatcacgagcgtcaggatcgcgtagaggttgtacgggatcgtctgaagaaaaaccgcgaagccattgataccggaatccgatgggacggaggaggtcactgccgccgcccaggagctgattggcgcaatgatacaaaccggagctgccgtcgcatctataatataggaaagctttgcgcgcgataccttatgccggtctgtcaccggacgcatgacgcttccgacggtcagacagttaaaataatcgtccacaaagatcagcacaccgagcagcatgactgaaatctgtgcaccgatccgtgtccggatgtgcctggatgcccattttccaaaggccgccgagccacctgccttgttcagcaaggatacaagaataccaagcataaccagaaatacgagaatacccatattccaggcatcggcaagtttgtagaccataccgccctcttcctgaaaaaagatcgtgttgatcatcttctccaggttgaaattcgagtacagcagtccacccgccagaattccggcaagcagggaggtgtacacctccttcgtcacaagtgccagtccgatcgcgatcaccggcggcagcagggaaaaaattgtcgcatacgcccacggctcctcccctgctgtccccggcatccagatcgtgacggccagcagcacggcaagaatcgcaagaagcgcgagcattgcaagctgtttctttttcattttcacattacctctcctcatctgtttttcagacagacaatacaaaatctttctgtccgcattccttatacaaagctattttctgctgtgccgctcatcagaatgcagcagcacagacacagaaacgttttcagtataatgagattccagggagaaatcaagtgtatattttatgaattgataacaaaactgcccaggcagcaggctcttccgccaccagctgccaaatacccgcttctatattcaagaatgcctcggcattcttgctgcgagatgcgcgtcatgcaatgc

SEQ ID NO: 3734 - DNA, 8432 bp, Unknown
  16S sequences of unknown bacteria
cgatctgaaggtcgcgggaggagaggaacaacgcctgaccgccgagctggtacatacccgtctcgaacgagacgcgggtacgggtcgaagccttctggaatatcatgccgagcgactttccggcgaggagcttgtgctctatgccgttctttctctcatatttgagctgggaggcgaggttaagtatgtcgatgatgtcctctttcgagaggtccgccatcttcaggagatcgtttttcatttgagttccctttctggatttaatttatttcagcacgtcggcgagtatctctacgccgccgtctatttcatcgttcgttatcgtgagcggcgggagcagacgtatcgcgtccttcccggcggtcagcacgaggagcccctgctccgcgcactcgagaagatactctttcgggtccccctcgacgacgagaccgagcatcagtccgtctccgcgtataccggtcagcttcgacggcttctccacgaagagcttttccttcagatatccgcccttctcgcgcacggcttcaaggaacgccggatcagacaccctgtcgatgacctcgttcgcgccggcgcagacaacgggattcccgccgaaggtggaaccgtgcatacccttgccgagagtttcctttaccttttcgcccgcgatgacggcgccaatcggaagaccgccgccgagccctttcgcgagggtcacgatgtcaggtttgacgttgccgtcgccgaaacgctcatacgcgaaaaactttccggttcgtccgacaccggtctgaacctcgtcgaagatcagaagaatatccttctcgtcgcagagcttcctgagcgccttcacgtagtcgtcctcgagcggcagaactccgccctctccctgtatcggctccgctatgacggcgcagacatcctgcgtcatcgcgctctcaagagcgtccgcgtcgttcgccgggatgtacctgaacccttcagtgaacgggaagaagtagttgtggaacacgtcctgtccggtcgccgcgagtgtcgtcaccgttctgccgtggaaggagttagtgagcgagattatcgtcgcccttccctgtccgtatttgtcaaacgagtactttctcgcgatctttatcgcgccctcgttggcttccgcgccggagttgccgaagaagacctttgcgaggccggagagctttatcagcttctcagcgaccttcgccgccggctcgcagtagaaatagttcgacatatgctggatcttgtggagctgtccctcgaccgcttctatccacttctcgtcgcaccagccgagcgagttcacgccaattccacttgtgaaatcgatgtatctgagcccgtccgcgtcggtcatcgtcgcgttctttcccttcacgggaacgatcggaagacgtccgtaggttgacattatgtactcgttgtcaagtgagattatatcgtttgtgttcatatgaagcacctttttgccagtattatttcttgaagagagttccgataccttcgtcggagagcatctctatcagtattgaatgcggtatccgcccgtcgaggatgaccgtgtggctgatcccgcccatgaccgcctcgacgcagcactcgaccttcggtatcatgccgccgctgatgacgccgtcgtcgatgagcgtctgcacctcgtcgagccgtatctccggaatcagcgtcgactcgtccttcggatcgcgcatgacgccgagcgtgtcggtcagcagcatgaagttcgacgctccgagggcgaccgctatccggcacgccgccgtatcggcgttgatgttgtacaccgggctgtccttgtcaccgtaagcgaccgtcgagacgaccgggatgtatcccttgtctatattgtcgcggattatcgacgcgtcgacctcgattatctcgccgacgtttccgaggtcatgctcaccgatgagcttcttcgccttgatgagcccgccgtcgatgccgcacagaccgacggcgcgtccgccgatgcgctcgatcttgttgacgaggtccttgttcgtctttccggcgagaaccatctggactatcccgaccgtctcgtcgtccgtgtacctgagaccgtcgatgaacttcgattccttgccgatcttttttaacatcgacgatatctccggtccccctccgtggacgagcactgtgtttatgccgacgagcgagagaaggacgatgtccgagatgaccgcctctttgagctcctcgttgaccatcgcgtttccgccgtattttatgactatcgtctttccgtagtatttctgtatgtaagggagcgcctgaatgagtatcgacgccttgtcgcggttcgtgagttccatatttcgctccttatgacctgtagtcgccgttgatatgaacatactcatagctgaggtcacagccccatgccgtcgcgctctcaccgccggacttcatgtcgacgtcgataatcacgcggttctcgaggagtatttccttcgccttttcctcggagaacgggtaagcgcgtccgtcctcgcagacgagaatttcgcccttcgcgctcgcgaacttcacgtctatcttcgacgtgtcgatatcaaccccggcgtagccgagcgcgcagaggatgcgtccccagttggcatccgcgccgaacatagcggtcttgacgagcgacgagctgatgaccgacttcgcgagcaccctcgcgccgtccgggtcggagaagttccgcacgttgcactgaatcatctttgtcgcgccctcaccgtcagcggcgatagcggtgcagagatcggtgcagagcgtcgcgagcgccgcggagaacacctcaaaatccgcgccgtccgagacaatctcgtcgttcccggcaagcccggaagcgaggacggtcaccatgtcattggtcgatgtatcaccgtcgacactgaccatattgaacgtgtcctttataaccgaagagagcgccttctgaagcattccggaagatatcgccgcgtcggtcgtgatgaagcagagcatcgtcgccatattcgggctgatcatgcccgagcccttacagataccgccgatatgagcggtcttcccaccgagagtcagcgaataggagaactccttcttcttcgtatctgtcgtcatgatggcacgcgccgcgcggtctgaatccgccgcagtatctccaaggtcagagacgagcgcgggtattccggaaacgagctgtccgaccgggagcgacactccgatgacaccggtggacgcgacaatgatgtcgtcgccctttatcccgagctcagcggcgagcgccgcgcaggtcttctccgcgttcgcgtatccgtccggcgtgcaggcgttggcgttcccactgttgcagatcgccgcgcgcgcgacaccgtttgagatgtgcgctcttgtaaccccgaccggagcggcaaagacgcggttctgcgtgaagactcccgccgccgcgcagtccttttccgcgactatcagcgcgagatcgagcttgtccctgttctttctgagaccggcatggattccggcggctttgaagcctttcgcggcgcagacgccgccgtcacatggctttaattcagtgttcatcatcatcgtttcctttccctccggcacggtttctgccggtcgtttcattaaaggttgttatgtcagactatatatccgccgttcggcgagatgacctgtccggtaagatagctcccgccctcggcgagaaaatatatgcacccggcgacctcgtcggcggttccggcgcgctccataggtatctcctccgcgaacgcattgaaatcctcacgcgaaaggttcgagttcatctcggtatcgataagccccggagcgacgcagttcacgcggattccggacggcgcgacctctttcgccagcgccttcgtgaagccgatgattcctgccttcgcggtcgagtaatcgacctcgcaggacgcgccgacctgcccccacatcgaggacagattgacgatcgccccggatttttcgtgtatcatgtgcggcaggacaagccgtgtcagctcgaccggcgcgatgaggtcgaccgcgtagagccgagccgcccgctcgccagcgaggtctgtaaagagcccggaatcggcgattcccgcgttgttgacaagcacatcgatcttaccggtgagcgagagcgcttcggagacaagcctttccctgtccgccgcgtccgcgacgtcggctctgaccgtcattactgttccgccggatttttttatctcttcttcaagcgttttcgccgcggtctcattctttgtatagttcgcgatgaccgcgaagccctccgccgcgaatctgagcgacgacgccctgccgatgccgcgtgttccgcctgttatcagtaccgtcttcatatcagaacgccgggggaacacagagcagtccggtggtctcgtcgagcccgaagcggatattcatgttctgtatcgcctgtcccgccgcgcccttcaccatattgtcgatgaccgacgagatgatgagcgttgaggtgtgatcgtcgaggaaaatcgaaatatcgcagtagttcgacattctgacgttctttatgttcgagtaggttccgggcttcatgaccctgacgaacttctcgtccgcgtaggctttttcgtagatctcatgtatcttcgcggcgtcgaggagcattccattttcattaagtccgacatagatcgaggattcgattccccgattgaccggcagcagatgcggaacgaaagtcaccgcgaccttctcacccgcaagctctgtcagcgtctgctcaatctccggcgtgtgcctgtgacagcccgccttgtacgcggcgaacgcctcgttcgtgtccggaaaatgcgtcccctgtgtgagaccccttccggctccggtcacaccggactttgagtcgattatcacgtgcgccgtgtcgattatccccgcctttatcgccggcatgagccccagcgcgaccgaggtcgggtagcagcccggatttccgatgaccattgcctccttcacctcgttccggtgaagctcaggaatcgaatagacggccttcaggtgaagctccggatgtttgtattccttgccgtaccatttcctgtagtcgttctcgtcgtggagcctgaagtccgcgccgaggtcgatcagcaccgtgtcatgcgccatgcacttcaccgcgatctcctcggacacgccgtgcggcaccgacgcgaacacgacgtcgcagtcggggatgatgtcgtccggattcccgagcgtcatcggaagtatctccgcgaggttcgggtatatgtccgcgatatcctgtccctcatacgagaccgacgctacagccgctatttcgacgtccggatggttcacgagcagtctcgctagctccgctccggcgtatccggtcgctccgattatcccggcttttatcttcttcatggtcgtgttctcccttaaaatattatttgttgtcttcgaggaacctgtcgacaaggcctatctgatagagaaccgactccttcgccggtccgccgtgcacctttctgccgttgacgcagttctcaaggtttatcgcctcgtatactccgtcgtcgaacaggtcgcagacagccctgtactcgtcgagcgtcagatcctcgagcgtcttgtcgttgtcgacacagtacctgacgagcgttccggagaccttgtacgcgtcgcggaagggcattcctttcttgacaaggtagtcggcgcagtcggtggcgttgatgaagcccttcgcggcggctttcctgagtcggtcggcgcggacagtcatcgtcgcgaacatcgacgtgaatacctcgatcgagatcagcgtgttgtcgatggcgtcgaaaatcgcttccttgtcctcctgcatatccttgttgtaggcgagcgggagggatttcatcatcgtgagcagggtcatgaggtcgccgtagatgcgtccggtcttgcctcttacgagctcggcgacgtccggattcttcttctgcggcatgatggacgagccggtcgagaacgcgtcgtcgagctcgatgaagccgaactcggacgagcaccagaggattatttcctcggaaaatctgctcatgtgcatcatgagaatcgagagcgccgacgcgagctcgattacgaaatcgcggtcggatacgccgtcaattgagttctcggtgactttcgggaagccgaggagttcggcgactctctcgcggttgatcgggtaggtcgtcgaggcgagggctccggagccgaggggcatcacgcgcattctcttttcgcagtcgcagattctgtcatagtcgcgcatgagcatctgcgcgtaggcgaggatgtagtgcgcgaaggtgacgggctgcgctctctggaggtgggtatagcctgccatgacggtgtcgacgttggctttcgccttttcgcttatcgcggcgaggagaccgaggacgcgggcttttacgagttttgtctcgtcgagcaggtacattcttatatcgagagcgacctggtcgttgcggctgcgggcggtgtggaggcgtttgccggtgtcgcctatcctttcggtgaggatggtctcgatgttcatgtggatgtcttcggcgtcggcggaaaattcgagtctgccggcttcgatgtcggcgagtatgcccttgagggcttcgacgattttttcggattcgtgcttttctatgatgccgcactcgccgagcatggtggcgtgggcgatggagccttcgatgtcctgcttgtacattctgccgtcgaaggagatcgaggagttgaagtcgttgacgcgcgagtcgacgtcttttttgaatctgcctgaccagagtttcattgtattacctttcgggtttaatatgagtggcggaggtgaaagtaaacttccgcctccgagccttatagttgtttgaagttttttggatggggtgtggggaaggactttttttcaaaaaagtccttccccaccgttcccttactttctcttagcgtcgagcttagccttttccttgatcgggagaccgaagaggttgatgaagccctgagcgtcgtactggttgtagtcttcgtcgacgccgaaggacgcggtctgttcgtcgtagagggtgaacggggaggttacgccggcgttgatgaggttgcccttgtagagtttgagtttgacgtcgccggtgacggtttcgttcgccttgtcgacgaacgcgcagatggcttccctgaggggggtgaaccactggccgttgtaggtgaggtcagccatcttcggcgcgatctgagccttcatgaagtggaaggtctctttgtcgagggtgatggtctcaaggacgtcgtgagctttgtagaggatggttccggcgggggtctcgtatacgccgcgggacttcatgccaacgaggcggttctcgactatgtcgaggagaccgattccgttttcgccgccgagtttgttgagatactcaacgagttcgacggagcccatttccttgccgtcaacggcggtcgggatgcctttttcgaagtgaatggtgacgtaggtgggcttatcgggagcctgctcgggggatacgccgagttcgaggaagcccttcttgttgtactgcggctcgtttgccgggttttcgaggtcgagaccctcgtgggagaggtgccagaggttcttgtcctttgagtagttggtctcgcggttgatcttgagcgggatgttgtgcgcttcagcatagtcgatttcctggtctctcgactggatgtcccactcacgccacggagcgattatcgccatttcgggagcgaaagccttgatggagagctcaaatctcacctggtcgttgcccttgccggtgcagccgtgcgcgatggcgtcggcgccttcggccttcgcgatctcgacgagtctcttcgcgatgcaggggcgtgcgtgcgaggtgccgaggaggtagtcctcatacttcgcgtcagccttcaggcagggccagatgtaattctctatgtagtccttcttgaggtcctcgatatagagcttggacgcgccggtcttgatagccttttcctcaagtccgtcgagctcggttccctgtccgacgtcggcacatacagcgatgacttcgcagttgttgtagttttccttgagccacgggatgatgatcgaggtgtcaagacctccggagtacgcgagaacgactttctttatgtttttcttgtccatttctgttaccttacctttcatataatgaccggcgttcctttattttgttttcgccgaccttatgtttttcttatgcatatattatacgcctatttcgaaaaaaatacaagaccaatactgtataatcatgtataaatattcatagcatattttcgtcacttcgacaaaaaatgtataccagcgctgtataaaggcggttttatgcactcttgtcgccggaatcattgcatatcgattattt

SEQ ID NO: 3735 - DNA, 2623 bp, Unknown
  16S sequences of unknown bacteria
gtgctggccgttccggcccagcaaaaacaggttctcaagggaatgttactgtcaagcaaaattgggccagttttggcaaataattttcccccacaattgttaaaaaatctgttttctgtgagcgaggcgccagctctcatcatcaaagttcagtacctggcacttatgcgtcagcctgtccagcaaagctgttgtgaggatagcgtcgccaagaagctccgcccagccatcaaagcctttatttgacgtaattactacagaagctgattcatagagctgcgatattaacccgaaaaacaaattggcttccgttttgctgacaggcaaataccccacctcgtcgattatcacaaggtcacacttgtttatccatctcactttcgcagcgcttttcagtgatatttcctgagtctttaggatgtgcatcatggtatccatagttgcaaaaaacaccttgtagccttcatgtacggctttgtttccgatcgccaaagctatgtgggttttgcccgtccccggcggtcctataagcacaagattgaatatttggtcaatccattccagctttgccagggtgtcaagctgctctcgggttatccctttttgaaaactcgtatcgaattcatcaaagcccttgtatgtcggcaatcgtgcctgctttattcgttcagcctccgcctttttgtcccttgattccgcttccgcccggagtatctcaagaagatattcttcgttgctcaaaccttgctgaggcataaacttgccccgtgacaatacgccaatatgaaactgttttgcaagcgtcataatttccgggttcatacagcgccgcctcctcccgctgaatggacatagctttcaacgcttcggacttttggcttcaccatctgatatttttccggcagcgagatctgcttcggagtgattttgggttcatccgccctgaagaattccaaggcatcacggaagtcatttgcgcttatcaagtctcgctctgtgcagtaatttaaggcattttccagctcatcacggccatattgctcaacacagctgttcataatacgcagctggtcgcgggcatatctgggatacgcttttatgagggcgtctatgtaatcttcagcaagagttaacccgtccattctctttaataccgtatccttaagctcatcatatttggtctcttgaaaccgccgcatgtttttaggaaaccgaatgagcttgccgaccccctgggcaaggcggtgcgttgccagcagttccccggtttccttgtcataaaagcaaaccatgccattttgcccgtcagcctcaatcctggcctgccttcccgggaagtatgtgcctttaggaacctcgtatcgattctgccgataatgcaccacattggtcttgcgaataatcgccagcttcggctcgataggttttgacagtgtcggcaccggtgttaagtgcttgatttcttccgcaaacagcctgtccggtaccattctggtcgtctcgtgaaccttggcgtttgccgtacggtcaagccatgccagcccttcgctgtttaatgcggatatgccgtgacatatcctgcaggagagaaagttattcttaacatattttacaacgctttcgattttacctttgctttcagggtcaaaacctcggcagagacggactgaaaaaccggcatactttttgtagctttcaaaggtttctgtcaggatcagatcgccggcattctctgaaaccgtcataacacggtcctggtcatagacgatttcctgggtccggccgccataatatttaaatgccagatcatgagcctccacaaattccgatgcgctgaacggatgatcctgaaagtacacgaatttcttgcgcgacatactcatgaccatggcgaatatgtagatttttattttgctcccaaaggggtcggtcataaccttctgccccatatctacctgagcctgaaatccgggcggctgttccgaaacctcagtatattgccggacttttgcctctgtaggtataccaagctcttcacgcagtgtcattacataaagcctgacacttctgtatgacggtgtaaaagcctcatgccgctcacacagatggtcgtaaattattgccgaagtaatatcagggtaggtttcaagctccgaaatgatttccccgcgatacgggtcaagtattttagtccgttcacggctcgcggccagatattttaaatattcttctgcgttcatattccaatactttcggactgtctttctgtcgattccggttactcgagcacacttcctgattgtatatcctatttgcttgtaagcttgtatttcgttgaacatttttcccttcaccattacctttccgcctttcgagtataatgttaactaacattatactcaagaggctatatttggtgggggatttttctttgccattattggtccattttagtttaccagttacagcgggcatatccgtggttctcgaaaccagcggatatgctcaaacggaatgttttttggaaatgacgccgttttgcgattgcttttactttgactgcaaagcggattctgctctgcacagcgcctgcacaggcgtggaagacacgttgattttgcaa

SEQ ID NO: 3736 - DNA, 2949 bp, Unknown
  16S sequences of unknown bacteria
aaaatgtttttcaatctctcagtcagctacgctgacagctctctttaccaaagagagcctgtcttgcgatttgtcatagatgcttgtttatagtggaaaaccgttttaaacaatctgcaatgaggcgaccgatggtcgcccctacgggctatctgtaatttaccgctgtcggttgcagaataatatttcaaaaaaattaagtgtcttgccgatcataaacagtaattataaagttaaatcataggggtgttcattgaacgcctatgcaaaccgcaggtttgcacatagtcagccctctgtcaccggcaagcccgtgacatcgcccttgcattatatgccatgtgggtgcagagtgagcaagttttgcggtatgtatcagttgttgtttcacggaagaattcaaagataaatcccacattttcttccccttaatccgtatcacaaatttttcttgatttttaaataaaaaaacacattgtgttttcaatctcgtcacataaaagggttactatatacttgtaatttttattgatgtttctccttaataaacaaaataaagtacaacaaaagaccggcggatccgtcaaaaccgtcggtctttttattttgttacattttatttataagccgtaaaaattcccggtggctgtttaccacgggagcgccggtttttaaaagtctttctttgctttggtggcctgtggaggtgagaacgcagcgaacccccatgccggaagcggtttcgtagtcgtgtacagaatccccaagcataaccgtttcccgtgggttgaggccggatttcgccatccaatttttgcctctttctactttacttacggcgtgtatgtcgtcaaggcctaaaagctcgtcaaaataatcggttatgccgtagttttcaatctgccggcgcaggtaatcctcttggcttgcagataaaacaaccatctttttcccccggtttttaaggcttttcagcatctcggccgtgcccggcacaaggggacattctttgtagcggcttaaatacatatccataaattcaacggataatttttcgtaaggctcttttgtaaaatcatagcccatttttacatagtagtttatcaccggaaagtcaaaccactccttgtatttttcaagtgtcaaggtgttcattcctcgctttgcaagcatttcattttcaatattcattgtgaacagggtatcgtccataagggtgccgttccagtcaaaaataatgttatttatcataaattcaccgccttttagtaatatagggattattatagcataaattttaaaatattcaaagaaccgatggtatgttgattgaatttttaggttaatttcacatttttcataaaattttcgcaatttaaactaaaattatccctttttggtctatataataatatgtaaaatttatgtaaagttaaaatttgaattatattataagaaataagaaggttaaacattatgcacatttttacacaaactcttttagaggtttacaaggaattcccccgggcatcaacggcgaaaatttgtcatcatttaggtgtgccgccccaaatggtaagggaaagccgtgagtatcttcatcggcggggatatttggtcaaggacgaaagcttaaattatcacattaccccgaaaggggaggaggagcttgcccggattgaccggcagcttgcccgccgggagatagagtttatcgccggcgccaccgaaacagcctgtaaggctttgggcaccacaaaagaacacctgcactctttcgcccttatggacaagggaatgaccaacgacagttacatatttttctgcgatgatgaaaaatacatttacaggcgtgccggccggggcagttctcggcttgtgaacagggagagggagtatgtaaattacgaattgcttaaagggctgggactgagtgatgaggtaatttaccacgacccgaaatccggcacaaagattacaaaatttataaaaaacagcagaaatattgacgaaaacaatccggaagatgtggaaaaatccctggaaactttaaggcggctccacaacagcggacttaaagccccccatgattttgattttttgcagaatattcacagatatgaggaactttgcaaggaaaatgatgttgttttttacagcgattatcggcgattgaaagaaaaggtgaaaaatcttttggacaaaatcgatcaaatgggcatagaaaaatgtttctgccatatagattttgtgccgggaaactgccttgttgaggaaagcggaaaagttcttttgatagactgggagtattcgggcaatcaggatcgcctttgtgatgtggccatgttttgcatatccgccgatttgtcaaaaatcaacagcgataaattattgacggcctatttgcagagaaagcctacaaaagaagaatttttcaggttttacacttacatagcctctgccgcccttatgtggagcctttggagcgagtacaaagtaagcgagggccgggtttttgacggctacaccgacaggtgcataagttttgtgcgcaaatataccgccctggcggaaaaaatactttgattttaagtatttgaaaatcaaaaatatttgatttataaatcacagacaaaatacgggggttttccccgtattttttgatttgttgatttattgatttaatcgtgacgggttgcatagggggttggtgaacccgtacggatttattttatagatatatttatttgtagacgaaatttgatgtaagcaggtcgcttgacaacccctcagatggctgacgtcgccagctccccttgcatgttatgccctatgggtacagtggagccaaggtgttgctaacctttgggaatgttattttgtattcgacatttatttataaattatattgtttaaaatggttttccactataaaataacaagccgagc

SEQ ID NO: 3737 - DNA, 4203 bp, Unknown
  16S sequences of unknown bacteria
aagcatacgccgtgtgcaatgcacgatgcaggccatcccggttctttgcaccataatactgtgcgatgataaccgtacttccggctgaaagtcccgtaaaaaatccgactacaaaattaatgatctgagaggacgagccgccgacacttgaaagcgcttccttcccggcaaaccgtccgactaccactgcatccacggtattataaagctgttgaaaaaatgttccgatcagaatcggaaagaaaaaaataagaatctgcttccagatcacgccctccgtgatcccgtttttagctgatttccctgccatttcacacatatcccccatattcggcttcatgccgaccttcctaacctgccaatctgtacttcgacagtatgtttattgttttcacttttttatcgcctgcttattaatcttcgaagcaagcacccctgcaccaaatccgttatcaatattcacaacactgacaccactcgcacatgaattcagcatcgagagcaatgccgccagtccgccgaagtttgcaccatagccgacactcgtcggtacaccgatgaccggacaggccaccagaccaccgaccacactgaccagtgccccctccatacctgccactgcgacaatggcattcgcgtcttccataaccggaagccgatgcaaaagacgatggataccggccacaccgacatcatagacgcgttcaacctgattaccgtacagctccgccgtcatcgctgcctcctccgctaccggcagatcactcgtaccggccgctacgacaacaattttcccccttttttcggtctctgcctcattgacgataccgatctgcggcgtcgaataataggaaaattccagtgctttggcaatctcatccgccttctcttctgataaacgggtgatcagaatattttgcaatcccttctgtttcatagctgacgcaatccccacgatctgctctgccgtcttcccggccccgtaaatgacctccggcatcccctgccgcatatgtcgatgcagatcaatatccgcataattgccaacgagcatatccggctgcaggctgatatccgaaagtgcatccgctgctgtttgctgcccggattctaccttctccagcagtatacgcagttcctcccgttccattattttttctcctttctgacctgctgatatgcgattcgcgacgacccatcctcaatatagatccgcccgcatttcacaaaaccattcttttccagcacatgctgcatgacatgattatcctcatgtgtatcgacacgaagattcggccattgtgcaaggcaccactgtatacatgcagatccggagccttttacatcaccacgggatgcgatccgatgcagcaccgcatacggctcatcatcaagccaggctccatcctcaatcactttataggtcggatcttcaccctttcgatagaaaaatacgacttcgatccttccgttttccactgccacatagctgtcgccggatgcgatatcctttcggatcagctcctcctttggatagccgcctgcccactgggtcgggtttccggtcttacacataaagcttcgtgcaatcgtatagatctccatgatttccggaatatctgccagggttgtttttctgatttccatatatctctccttatttggtcttttcattaataaactgcagcttcgtcttggaatacatgatcttctggctgtgatacagtccgaaatatccggactccagatagctgatcgacaccgcaataagaaagaatggcatgcagtcaaaaccgaacagttcaaagctcagaagcaaggacgaaatcggggagtttgtcacaccacaaaatacagccgccatcccgcaggcagctgtcagagacggcgataaaccggtcacctgtccgaacagacagccaaacgttgccccgacaaacagggtcggcacaatctctcctcccttaaagccacaggataaggtaattgccgtaaagataattttcaaaagaaatgctgcaggctccgtctccccgtgaatcgcccgctccacgatattcatcccggctccgagataatctgtcgtcccgagcacctttgcaagcacgatgacgagcaatgctccgaccaccacccggatccacggatttttcatccgggacttgaacagccgctccgtgcgatgcagcacctcacagaacagaatgctcaccgctgcacacagaagtgcgagtaaaacaatcagcgcaccactctttatatcgagcgtcacggatgccggcaccggaaactgttccgcgcgcgcacctaccagatctgccatctcacgcgcaatcagcgatgcgatggcacaaggtacgagcgccgcgtattccatgataccgatgcttacgacctccatcgcaaagatcgtcgcggtcagcggtgtcccgaacagtgctgagaacgctgcgctcatgccacacatgatcatgaccttctggtcgtactcgtcaagcttcaaccattttccgatcgtaccaccaaggctgccgccaagctgcagagccgcgccttctcttccggccgatccgccaaaggcatgtgtcagaacggtcgatataatgatcagcggagacatccgaagcggaacgtaagtaccggactgaattccctcgagtacccgatttgtgtcactcttgtacggatcgagccgatacagtgccacaatcaccagaccggcaaccggaagaagatagagcatccatccatgagactgccgaaacgccgtcacctccgtaatgctccggccaaacagaccggcgaccagcccaagcgcaacgccgcagactccggccagtaaaagccatcgtgccagaatgtagattcttcccaaacacttcattgcatattctttcataattttcctctttcctgtaagaaaagagccaagcgatcagccgctcagcccttttttcttatccaaagtaatcgatctgcattgcatggcgtacatcacgcagcgtctctgccgcctttgcacgtgcccgttcgcttccttccttcagcatcgcatacacctcatcggtatgcgcctcccagtatttccgacgctcccggatcggtccgagctctgcctgaagcacattgttcaggaacttcttcaccttgacatcaccaagcccgccgcgcgtatagtgcgccttgagctcgtccagattctgataatccggcagaaactcctgaaaatgctccggacgacagaacgcatccagataaatgaataccggatttccgtccaccttaccaggatcctccacgcgcaggtgattcggatcggtaaacatcgacatgacttttttcctgatctcatccgcctcatcggaaagataaatgcagttgccaagcgatttactcatcttcgcttttccatcgatacccggcagacgcaggcatgcctgattatccggaaggatgatctgcggatctgtcagcgtctcaccataaacggtattgaacttatgtacgatctccttgcactgctcaagcatcggcagctgatcctcaccgaccggaactgcggtcgcacggaacgcggtaatatctgccgcctggctgatcggataacagaagaacccgaccggaatactcgcctcgaaattccgcatctgaatctctgcctttacggtcggattgcgctgcacgcgggaaacagtgacaagattcatatagtagaaagtcagctcggtcagctccggaaccatcgactgaatgaagatcgtggacttttccggatcaatgccgcatgccagatagtccagcgcgacctgaatgatattctgccttaccttttccggatgctccgcgttgtccgtcagcgcctgcgcatccgcaatcatgatatagatctcatcgaactcaccggaattctgcagtctgacacgtctttccagtgatcctacatagtgtcctacgtgaagtcggcccgtcggccggtctcctgttaaaattacctgattcatgttgttgtatgactcctttatatttaataattcgtttgtttcccagtttattaatatgatgtcggggtcaaaaggtattttgcccccaactgatgcctacgaattgctccgctgcgaagcagctcccgcaattctgcaaacattcgaaatccgctgatttactacgtaaatcgctactttctcatgtttggcgggtcccaag

SEQ ID NO: 3738 - DNA, 16185 bp, Unknown
  16S sequences of unknown bacteria
tatctgaattaggcgtaactgagcttaccccagcttcaaacgagtagatgccggtcgggacttatagacgctaagcggagcttatctaaggctggtcacgaaaatcccgacaatgaagccgttggataaaaataatggttcgaagagagaagaaaaaacggcagtgcgcactacagaaagcgccgttgcggaagacggtagtgtgtcctcagaaagcgtacatttggatctggcaaaagtgaaaatcgaatcgctgttcgaagatctagtggattttgatactttttcgaaatccgatttccgcgtggtaaaaatcgaagcttgcgaggcggtgccaaaatcgaaaaagcttttgaaattcattttgaatgatggcactgagcgcagacgcaccattttgagtggtattcacgactattacgagccggaagaattggtaggcaaaacctgcgtggccattacaaacctgccagccagaaagatgatgggcattccgtctgaaggaatgctgatcagtgcagtgtatgaatatgacggacacgagggcctcaatctgttgatgctggatgatgtgattccggcaggcgcgaagctgtattaaagcataagcacgatattgtgcaggttgtgcccaatggcacatggagcgatgcgaccgagagactaaaatttgcgaattgtttacaattttcaaatgtttacccaagaaaaatttagtatgataaatatggcccttacaaaggtaagggccatatttatcataaagatcaggggttaaaatatggatcagtttcacttcaaaaaagaggatatccaaaaaagaggctggaaagagtggttggcaaattactggttttattataaatggccaacggtaattgtgctgtgcagcttgatcttgggcggaagtattctttatagtatgcttaaccaaatggagtatgatgctacggtgtacctggtctgccgcagcgatacagccgccgcattggatgtggacaccattcaaaataaatttgagaactatgctggcgattatgatgggaaagacggaatcaatgtctatttcggctattctgctttgcctgttgtaacagaagaaaatactaatgtagacggattggagtcccaagtgatccggccggatgaagatacggaggatattcgggaatatctggcggccacaaccgcgctggctggggagatggacagcgatactgccatctatatttttgatgaaacccagtacaacgaaatgattgaggatactgatcatccgatttttgtaaatttgcgcgagaaatatccggagctccctattgtggacggttgtaaactgatggtaaaggacaccgtcttcgcaaaggattttttggtagtcagcgatgagttgttttttgtcgtacgggatttggcgtatatccgcaaccacgacaaacaaaaggtcatcgaccattatgattatcaaatggatttttttgatgccatcgtgcaagccagtttccccaaaaaataaccaaacaaaaagccccgccaatgggcggtggtcataagacagttgacagacgcagtagtttgaactgctgtagctcttcttgtatattatcctgttatgtgataaggtagaaccgaacagccatacaaatcgggatttttggaggaaaggttaatgtatttgaaattagttcgaccgtcctgtgaatatgcagagcaagtaatgcaatacaaggaagatatgcttgcaaataatgatagttttgatggctgtgcggaccttgaagaagtgatttcttatactgagtggattgactttgaaaatcgattgaaacggaaatatggcgaagggtatgttccatcagaggtatttctgggagttcgaattgaagatgataaggttgtgggcatcattgattatagacaccctttatcaccttttttattgcaatacggtgggaatattggttacagcattttgccatcagagcgtcggaagggatatgccagtgaaatgttaaaattattattagcaatttgcagagaatacggagaaaaaagggttcttcttacctgtgataaaaccaacgatgcttcacgactgacgattgtgaaaaatggcggcgaattggaaaacgaagtaaaagatgaggtcggactaagtaaatgtgggataattcagcgatactggatagccttgtaacttccggtttgtcgaacaggcacaagggcgcacttctatacgggtagtcccagtatgtgcgtttagcgtcacttcgttccgaacaaggggcggcaccacttgtgctgcaaaagcagctgtacccataatgaaaaggcgtgactttcgcggtcacgcctttcctgttttacggtcttacgaacaccccgccaatgggcggggcttttgatttacctgtttgttatttgagtttggaaacgatctccatggtgtctctggcgatcagcagctcttcgttggtagggataacccagatttccactttggagtcatcagcagaaatttttgcttcctcccgaacgttgttgcgctcagcatccaatttcatccccaaaaactccatatcttcgcagaccagtgctcgcatggaactatcgttttcgccgataccgccagtgaaaatcaccgcgtccacgccgcccatggcggccgcgtaggagccaatgaattttttaatctggtagctgacgatttccaaagtcagtttcgcgcgctcgttgccttctttggcggcagcccacaggtcacgacagtcactggaaacacccgacaggcccaggaatccggatttcttgttcatcagatccgacatttggtcaggagtcagaccttctttattcatgatataagtcacgacggaaggatcgatgccgccgcttctggtgcccatgataaatccgtccagaggagtaaagcccatagaggtatctactaccttgccatctttgatggcggagatggaactgccgttgcccagatggcaggtgatgattttggttccttcaacagaaccgtgcaactggccgtatctgccgctgacaaaacggtggctggttccgtggaagccgtaacgacggatggagtatttctcgtaatattcatacggaacgccgaacatgtaggccttgggcggcatggtctgatggaaagaagtgtcgaagatcgcgaccatgggagtttctttgccgaatacttcctggcaggctttcattgcggtagcctgaggcgggttgtgcagagggcccaattcggagaaagaaaagatatcttcgataaccttgtcggtgactagagtagaggttttataaacctcgctgccgtggagtacacggtggccaacagcggagatttcttttacggaatcgataacttttccttcgccctcagtcaggatattgacaacttccataaacgcttctttatgggtggggaaaggcgtattatgggatacagtgcgtccgtcggatgttttgtgggtgatcagtccgtctaccccgatgcgttcgcagttgcccttggccagtacagcttcgttttccatatcaatcagctgatattttaacgatgaactgccggcgttgatgaccaaaaccttcatgtactgattcctccatgttatgtatcatttgacatattgtcatacaatcttatattattacaatagaagagaaaatgcaaggaaaaatctgtttggaaggagggaaatcgatatgaaaatctgtggaattacagcggagtataatccatttcacaaaggccatgcgtatcagattgaaaaagcgcgtcaagcaggggcgacccatattctggcagttatgagtgggaattttgtgcagcggggtgtaccggctatgctggataaatggatccgcgttcgggctgcattaagcggcggtgcagatttggtggtggagctgccgctgccgtttgctaccgcgtcggctgagacctttgcttacggcgcactgtctttgatgcaggcgacaggatgcgtggatatggttagtttcggtgcagaggacgagcaggcgcagctgcaaaaggtgctttcggtacttctttcaccggaattcgagcctgttttccgcctgcggctgatgggaggcggatcctatgccgcagctcgttctcaaacggtggaggatcttgcgggagaggaaacggcggctattctcactcgccccaataatattttggggattgaatatctcaaagccgcccatcggctcggtttttccccgcagtgggcggcgattccccgcaaaggagctggacatgatcagcacggagaagaaaaagggctgatgagtgcctcgtatgtgcggcacctgctggaggcaggagattggtctgaagcccagaaaggtctgccggagatttgcctgcctctttatcaacaggcgtttgtgtctggcgtggctcctgtgcggctgggtaatttggaacggaatatgctggctcttttgcgaacccgcccgctggattggctcaaaaacttgccggatgtcagtgaaggattggaaaaccgcctgtatgcgggaatacggcaagcgcgttccattgtggaattgtatcagctggttcaaaccaagcgatatccccagagccgggcaagaagaatggcgctgcatggctttttgggagtaacggcatccatgcagaaaataagaccgccttatctgcgtattttggggatcggttttggtggggaagagattttgcggcagatgaaaaaaacggctgtcatcccgttttcgcagtcgttggcacggctgtcggaagaatcggaagacgcaaaacggtttgcgcagctggaagcggcggctaccgaccaatacgtgcttggaatgccaaaaccgctgtcttgcggctgggagtttaccgccccagtcgttaaagagaggagaagccggcatgttggataaatccattccttatcaaaatattattatgtgtgcggaacgtgagaatttactctgcctgaaagaaccgactttgccgtcaggattttcttttcgcctgttttgcccaggtgatgaaaaacagtgggctcgcttggaatggcaggtaggggaattcgctacggaaaaagaggcgattgattatttttctcaaaattacctggtttttgaaacattactgcggcagcgctgttggtttatttgggatgaagaaaaagatcaggcggcggcaactgcgacggcctggtttgaacaggtaagtggaggagagagacttgcctccctgcattgggtgagtactgctccgtactgtcaaaggaagggccttgggcgggcgatagttgtgcgggcgctgaaaaccctggctcagacagaaaatagccagctggtttacctgcatacccaaacatggagccatcaagcggttcgtctttacctttcactggggttcggagccgtcagacaggggagcttttcccgttattccaatgactatccgctttatttatccgccttgtgggaaaaaatgcctttgaaagattatgaaacctttctgaaaaatctggtataactttgcttaaacctttaattggggtgaattgacaagaacgattaaaaaagtttttcttgatcaaaaacagcagaaaaaagcgtccgtaccattgccggacgctttttttttgaggcgagttactccgtaattcttgcggcttcagtatcccgaaacagcagcgaaatacaccaaatacccgccagagccactagggtatagacgattcggctgagcattgcgccctgtccgccgaacagccatgccacgatatcaaactggaagataccgattgaaccccagtttaacgcgccgatgatagtcagcgtcaaagcggttttatccagcatggtttccactcctttgttggtttgtcgctcttttgccgaaaaggccccgcaaggtgattccggctgacattagtgtttacctgcattcccaatttatgaggggaaattgttggtcatttccgaaagtaaaacagcgcagtccgcacgtgtgagcggtgtttgatccagaaccgttggaaacatcttttcggatgatgtgccgaacgcggtaaagaaagaagagaaggcagattttttccaggacggatcaaacgtacggtgaagaagttcttctgcctcggaaaaagaaattggttcatcgggagagaatgtgctttcggtaatgattttttgccgaatggccgtttgcagatatggtttgatccacagcgacagttctctatcgttagagagattcgtttgaatcactgcttgctcggtcaaaggcgtgtttttagcagccagcaggcaaattaaaaactgcccacgagtcatggtattgtctgggtgaaaataccagtcatctccgattttctccccgcagagaatatcattttgatgcaaggtaattgcagcagctgtttcggggcgtccgatcatatcggcaaaagaaaaattgtttttattttcctgaattgtaactgaaacggttgcctcagcggataaattaccgtaggcatccatcaaaacataagagaactggtcttctcccgcaagaccggtgaaaggctgataggtgaaagattgtccatcggttttgaccacgcccttttgtgggctgcgggtgatgtggacagaggcggtttgtgtttctgcgtcaaacaaagaggcagtttggattccaatatcggaccaggtatgcagaagcatatcttgcgcctgcggcggcgtgggcagttcatccgcaacatgaacagataaagtagcggtagcacggctgggacagtttggaataaaagaaaaaccagagcggagggcgttttcccctggaacaaagcacagacggtccagttcttccctggtcagctgagaaaattcgctgatccgtgcgccgtccaaaacaagactgccattatccggaagggctgtgatggtaatgcccagcaattccccctcttccaaaccgagtcggatttccagctgtctggctgacagttcagcaacttcccctttggccacggacatttgataagaactttccgataaatcggctgatgccggctgaataagaggctgttcttcgtaaaaaggcgaagataacaaagtacaagagagcatgatactaaaaaagaatttcataacgattcacttcctatttcaatctattcttatcctttgaaagtttcgcctttttatgcagcgaattggaaaggttgaaaatttgaaatgcttttttgtcatttcgtggattttgcttgcattttaacggtaattatggcaaaatgataagaacaaaagggaagaaagcggaggatgcgttgtgaatcaaacggtagtgattttggatttcggcggtcagtataaccagctgattgcgcggcgggtcagggagtgcggtgtttactgtgaagtgctgccttatcacacgccggtggaaaaaatttcaaaaaaagaaccgattggtattatctttaccggcggacccaacagtgtatatttggaagatgcgcctaggtgcagcaaagaagtgtttgaattaggaattcctgtattaggaatctgttatggaattcaggtcatggcacatacattaggcgggcatgtgacttcgcctgattccagagagtatggcaaaaccaaaacaaaatatgacacggcctgtccgttgtttgatggtttgccagtgcaggggattacctggatgagccacaccgattacgtggaccaaatgccggagggattttctgcaacagcgtatacggattcctgtcccacagcggccatgcagaaccaagagaaaaagctttatggcctccagttccatccagaggtgttgcatacccagaacggaacccaaatgcttcataatttcctatataaaatttgcggtgcacagggagactggacaatgggagattatgcccaaaatacaattgatgctatccgcaaaaaggttggagatggcaaggtgctgttagctctttccggcggtgtggacagttccgttgctgcggcgttgttagcgaaagcggtgggtccgcagctgacctgtatttttgtggatcatggttttatgcgcaaaaacgaaggagacgaagtggaagcggcttttgcggataaaggcatgaattttgtccgggtaaatgcagaagatcgttttttggcgaaactggccggtatatccgaaccggagaaaaaacgcaaactcattggcgaggaatttatccgtgtatttgaagaagaggccaaaaagattggacgggtagattacttggtgcaaggtaccatttatccggatgtgattgagtctggcactggagatgcggcggtcatcaaaagtcatcataatgtgggcggcctgccggattatgtggattttaaagaaattcttgaaccgttgcgtctgttgttcaaagacgaagtgcgcaggctggggaaagaattaggtctaccggattatttggtgtggcggcagccatttccaggccctggtcttgcaattcgggtaattggtgagattaccaaagaaaaattggacattctgcgggatgcagacgcgatttttcgggaagaaattgcacaagcacatttggatcgggatattcaccagtactttgcggtgttaacgtctatgcggtcggtaggcgtcatgggagacagccgcacctatgattatacactggcattgcgcggcgtaactactactgattttatgacagcagattgggcacgaattccttatgaagtgttggaaaaagtgtcaaatcggattattaatgaagtgcgtggcattaaccgaattgtatatgatattacaagtaaaccaccagcaacaatagagtgggaataagttggagtatcgtaaaaagccagtgtttatgcgggtttgcggcactttcaaaagtcttttgataacaaattgataacagttgcataagagccattattcttgtaatctagtggttttagggttagagaatgattaacaggcggttgtgcaacaaataaatccatattataaactaagcccttagctgtgggtatgaaactcatggctaagggctttttgtcgtctttatttatctggtttgagttgctcttggaacatttcaactaaagcgtcactaagttcctgtgatggcactttcgcccatctctgtgtggtatcgaactttggatagtggtaacgccagttatcgtattcttccttactgatttcttcggaagataacttgtccgcctgttctttccaagcatagagcattttcagtagttcgtgggcgtctttccctttgtccttgttgactttcagacagacctctccgtctgctccgctgacagtcagcccatataaatcttcaagggtaaacaaagtgtgcattagtccgatatagctgtcaatgtcgggtacatcgagggcatgaggggaaacatcaagtgcctgtgccaatgcagcagtaagttccgccttcggttttcttgttcctgtttcatattgagctaaacgtacatcagcacttcgttcaggaaaaccgacaatcgtaccaagatatttttgtgtcattccacgcagaatgcggaaaaaatgtattctctctccaatcgccataatcatcgctccttgtatatgtagtgtaattagtatagcagatatgtttaggcgaagtcaagataatacaaaacaaaaaagtttaatatttttctcaaaaccacttgacacaaacaaatatgcttagtataataagttcaaaattaaacaaataagtttagataaaaagggaggacaatatatggataacaaatttattcgtgccgaagaagtggcacaggaactaagcgtatcaaagccttatgcctataagttaatccgacagttgaatgaggaactgaaagccaaaggttttattacgattacagggcgtgtgaaccgccagtatttttatgaaaggctctacggagcaggaaaggaggaaaagtaatgccggtatttaagaatgaggacaatggaacatggtatgtgatggcaaggtatgtgaactggaaaggcgagcgtaagcagaaatgcaaacgtggttttgccaccaagaaagaagctcaggaatgggagagaatgtttcagttacagaatgcgtctgaccttgatatgagctttgaagcctttaccgaactgtatatccgggatgtgaaaacccgtctgaaggagaacacatggctgacaaaggagcatatcatccgcacgaagatacttccgtattttggaaagttaagaatcagcgagatttccacaaaggagattatcacatggcagaatgaactgcttacctatcgggatgagaagaaaaagccatactcacagacgtatctaaaaacgctgcataatcaactgtcagccatatttaatcatgcggtacgttattatgagttgcgttccaatcctgccgcaaaggtgggaaatatgggaagtgaggaacacaaggaaatgctgttctggacaaaagaagaatacaagaagttctcttttgagatgatggacaagccagtttccttttatgcctttgaaatgctttactggtgcggtatccgagaaggggaactgcttgcactgaccgcagcggatttcgattttgagaaagaaacggtcagaatcaataaatcctatcagcggctacacggagaagatgtgattaccacaccgaaaacaaagaaaagcaatcgtattatcaaaatgccgaagtttctttgtgaggaaatgcaggaatatctgggtatgatttacggattgaagaagaaagaccgtatttttacagtcacaaagagttatctccatcacgagatggacagaggggcagaagccgcaggtgtaaagcgtatccgcattcacgatctcaggcacagccacatcagtctgctcattgatatgggattttcggcggtggcgattgcagaccgtgtggggcatgaaagcattgacatcacctaccagtacgctcatctgttcccgtcaaaacagacggaaatggcagatagattagatgatttagggaaaggagaggttgaaaatgtcagctaagaacagggataacaaaaatcgttggagaaacattacggtagggtttcgggtatctcccgaagaaaatgaacttattaacaaggcggttgccttatcgggattgccaaaacaggaatactgttaccgccgctgtttgaatcaggatgtggtggtacagggcaatccgagagtgtataaggcactcaaactggaacttgccgctgtccttacagagttaaaaaggattgaagcggggaacagcgtggatgaggaactgatgaatgtaattgaattgattgccattattcttggcggtctgaaaggagaggatgagaatgaagaataacaaagaaaagactgcctttaatccatctattggcgcagatgaaaggcagccaattcaaaaaatcgctgaaaatagtatatccgagtatgaggaaaatatcaagagttttgaggaaatgcagagagaaatgcagttgagtttagaccccttctatctcaaagcagtttccatgaatgaactgtttgacacccagtaccagagcaagccgccgttgattgacggtctgctctaccccggcacttatatttttgcaggttcacccaaactgggaaagagtttcctgatggcacagcttgcctatcacgtcagcacaggcacgccgctttggaattatactacccgaaaaggaacggtactgtatctcgcccttgaagatgattaccgccgcttacaggaacgtctgtatcggatgtttggaacggagagtgctgacaatcttttcttttctgtttctgccagccagctggggaaaggactggatgaacagcttgcaaggtttgtagcggaacacgcagacacaaggttgattatcattgatacgctccaaaaggtgcgggaagttggcggagataattacagctatgcaaatgattatcagattatggcaagactgaaaagttttgcagatgcccacggtctttgtatcctgctcgtacaccacacaaggaaacagacggcggatgataagtttgatatgatttcgggaacaagcggactgctcggtgcggcggatggggcgtttctccttcagaaagaaaaacggacaggcaatgccgcaactttagaagtatcgggcagggatcagcaagaccaaaagctataccttatccgcaacacagaaaccttattgtgggaactacaaagggcagaaaccgaattgtggaaagaaccgccggagcctttactggatgagattgccgaacttgttatgaaggataaatccttttgggaaggctcggcaacggaactggtttcgctgataaaggtagaaattcagccccatgtcatcacacgaaaactgaatgttctttcagggaggttgtatgcggagcatggcatttattataagagcaaccgcacccatgatggaagaaaaatacggttttggaaagatgatacggaaacagcgtgacagttggtgacggttgtgacggtatttttgacagcgggggcggtattaaaataaccgtcacaactgtcacataccgtcacggagaggatgggatacgatgagaaatgtgcaaatatcacaggaattatttatgcagctactccgttttcacttgatggaagatgagagttgcgagaaagaaattaagaaggagttggagaaaaagttggacaggatggtcatgcgtgacctttttggaaaatcaaaaactgcaccgacagaggaagaacgggaacgggcaagaaaagaatatctggacagacgaggagtgttggagagtttctgttggtaattcttccttgatgataaggacaggggtgtggcacacccctgtaaataacagacaaggcaggaaaggagtattgcggatgttaaagcagccggaaagagaaagcagaaatgtgaatgatttattttatgagatggagggcagacagatacaaaaaatgaacaaggtactggcaagagtggaactgacaaaagcagaggaaaaaactctgatttggcttgccggatgggaagaaagtaccgtagatcatctgctgtcagtcatagaaaaagcagcccggatacgggcagagaaaaagggcggatacgcccatatatgaaatcgcaagtctgagtagtaatcagattatgtaatacaaaaatagccctcggcgtttgagagcgaaatacacccatcgcacaaaactaaagttttatgctctgtatatttcgccctgccgggagcaaaccgccgacaggcggataggttcgtaaacaggtgcctatgcacctactcacaataaagtcggcgagagccggggaaggaggatgcttataggcagacattcatttatcagacaaagcaagctgtccgatgtggcaggaaggattgattatatctccaatccgaaacggcaggaatatctctatgcgacctatcagacagaaggggcaacaccggagttttggaaaaatcttgcaagagaaaatcaggtggattttaaggcgagtggttcagcagggaaatgtattgaagggcgtgagtttatcattgcacttcctgaaagttttgttcagtacagggcagatgatgtggtaaggctttttacggagagttttcataaaagatatggggtggagtgcagtgctgcccttcatcacaacaaggcaaagacgaattatcatattcatctggtattcagtgaacggaaaatgttggaacagaccgaagtaaagatagctacccgaaatatgttttatgatgagcaggggaagcatagacgcacaaagaaggaggttttagacgagctgggcaatcttcgggcgggatgcagtattatctccaaaggggaagtttatgaaagccatatcttcacgaaaaaggatgaatggtttaagaacaaagcctttaccaaagaagtcaaggaactgtttaccgatacgatcaaccgatatgtaaaagaggaatcagaaaaactatccgtattccaacaaggcggcgtatatctggcaaccaagaaaataggaaagaacaatccgaaagcagaggagataaaggcagacaatgcggcaaggcaggaatggaatcggacagttgatgtggcattggttgagggtgttcctgaagaagatattttgaagattaagcaggaaaaaatcacagacgaaacgctgcaatctatcaggacacacggttggctgccggatatgttccgtcagattatccgaggtgcgaaagattttttacaggaagtaattttcaaatttaaactgccaccaagacctgtgccaaagattgatttgcaagagtggaaagatatgcagaaggtcatgtatgaattgcagagacagtcaatagagataaaacgcacacagcaggatatttcttctttgaaaaaacaactgtcagagctgcgaggattatttaaaggcaaagagcgaaaatctctggaagggcgaattgaactgttagaggatttggaaaagcgtttgcacaagagtttggaacagatagtaaaacgggaaggttatccgaatgtgcaagcctttcagaaggtttataacaaggcagaagaattgattatagaatacaacgaagaactaagggtatggaaaaatcagacggaacagaagaaagagaaaccgttagaacagccgaaaaaagcgagcgtactggaaaagctacaccgctatcagcaggaaggcagacagcaaccaaaacggtcagttaagaaaaaaactatggatagagaacgataagaaaggtggaacagataatgaagaaaacaatatttgaagaaatgggcggcacttatatcagacatggggattatcttatcccctgtcttaccttgccggaagaagaacagagatttatcggcgtatggggacaaagacatttacgttatctgaaagaatatcgcaggggtgtatatctgaatatgcttacaagtggaaggttgaatgattatttggctgatatagaagaacaggcacagaaacgctttgaaaggattgtagagcagatgaaacaggcacaggggattacagaacagttaaaagcagaaaatcagatggaatgggtagcgagaatgaacaatatacaagtgtgtgcaagggagattgtgaataaagaaatgatttatcaataagtgggatggtggaatgcaagtttgaaaagggcttgctttttgctttacaatgtgggtggctgatgtataattatgataaagagataaactagaagttacggaggtgtcttatgaaacgagaattaggaattgccagatgtggtcttgcgtgttgcttatgcacagaaaatgctgattgtaatggatgtggctcaaacggttgtccagataatgatgtttgtgagaataaaaaatgttcgattgcaaaaggactgacacattgttataagtgtgaagaaaattgcaagaaagggttattaggcaaaatcaaaccctacgcatttactttatttgctaaaaaatatggagaagaaaagcttttggactgtttagagagaaatgagagaaatggagttgtgtatcatcgaaatggcataaacggagattatgatgattttgatgatgtagagcagttaatgaattttatcttgacgggagtgagataacttacagttttggaggtaagaaaaatgaaaaattatagagtgatatctaaagtaatattgactatttgtttatgtggaattgttttagcggttataaatggttttacaggcattatcaataattctatccaaataagcggaacgataatttgcatttctgcatttgttgttgcaagtgttacaattattttattagaaaatggaagaataaaaaagtaatagataaaagctgaattcgtaggagagaatacgatatgaatttaacatacaagagagcaacgcttgaagatatagatatattgacagaaacaagaatagaggtattaagagcagctaataaactttctgctgatactgacatgagtgaagttgaaagacaatcttataattattatcaaaaagctctttgtgacagctctcatattgcatatttggtttttgatgaaaatcgttttgtaggggctggtggtgttagtttt

SEQ ID NO: 3739 - DNA, 30905 bp, Unknown
  16S sequences of unknown bacteria
atgaaagcattgaaggcattgggatatgataaggcatggcttgcatggatcccttttgcatgtacgttcggatgtgcagatgcagtagcaaaagatgaagatttagtagatatgttcggaagcttctcggttcctgcatttgtgttcaagctatggtggattgtgccgctggtagtggcattgccatttgtgccgttcccgggtggattgggtagattgctgacctttgcattgaatattgtatttctgggatccatttatgcaaagatgtttgcagcattggatggaaaaactgaaagcgaagagcaggtgcttggttgcgtatccggagctctgccaatcgttgcagtgtttaaattcctgtgtatcaaataaataataggttgaatgaaactgtcgtaagatgatgataagctccctttcagagaacaagattttggttgaaagggagcttattttatgactcgcacaattattgtttaatagaatttacaaattctcacaaccagatctgtcgcggttttacgttgaaatacctgtccacatatgctaaacttatacccagaaaatgggcaaagcccagaaaacaagcagaaaaaggagatatctcatgattaataagctgatcaacaagattcagaagacaaaagcaccgattgttgtaggacttgatccgatgctttcctatgtgccggagcacatccagaaaaaggcattcgcagagtatggcgagactctggaaggggcggcagaggctatctggcagtttaataaagaaatcgtagacaagacctatgatctgatcccggcagtaaagccgcagatcgccatgtacgagcagttcggtattgagggactgaaggcatataagaagacagtagattactgtaaatccaaggatcttgtggtgattggagatattaaaagaggtgatatcggatctacatcagcagcttatgcagtgggacatctgggaaaagtacaggtaggaagcaagacttatgcaggatttgacgaggattttgcaaccgtcaatccgtatctgggatctgatggcgtgaagccgtttatcgatgtatgcaagcaggagaacaaaggtcttttcattcttgtgaagacctccaatccgtccagtggagagttccaggatcagaagatcgatggaaagccgctctatgagctggtgggagagaaggtagcccagtggggagaagagcatatgggagagagtggatacagttatgttggagctgtagtaggagcaacctatccggagcagggagagatccttcgtaaagttatgccaaaatcctttattctggtaccgggttatggtgcacagggcggaaaaggcaaggatctggttcatttcttcaatgaagatggactgggagctatcgtaaactcttccagaggaatcattgctgcttacaagcaggaggcttatgcaaaatttggcgcagagaacttcggagatgcttcccgtgcagcagtagaggcaatgattgcagatatccagggtgcgctgactgcagcgaaataaacttcagaagagaggacagatatgaagagcagagaatttgcagttgtagctgaacagacagagatcgcttcaggaatcttcagtctctggctggagacagagagcattgcgaaggaggcagttccaggtcagttcgtatctgtgtacagcaaggacaagagccgtatgcttccacgcccgatcagtatctgtgaagcagataaagagaacggaaagcttcgtctggtctaccgtgtagtaggagaaggaacggatgaattttcacatctgacaaaaggagaccagctggagatcattggacctatgggaaatggatttccactgaaaggggaaaagccccttcttatgggtggaggaatcggtgtgccgcctatggtacagctgggaaagacgttgaaagcgaacggttgtacgcaggtgcagacaatagcaggatacagggatgaactgtttctgacagaggagctgggtgcttctggagctttttatgtggcaacagaagatggcagtgcgggaacaaagggaaatgtattggatgctgttcgtgagcagggaatcgaagccgatgtgatctatgcttgcggaccaaagcctatgcttcgtgccatcaaggcctatgcagaggaaaagggaatcgagtgctatctttctatggaagagcgtatggcatgtggaatcggtgcttgtcttgcctgtgtttgtcagtccaaagagaaggatgaacattctcaggtacacaataagcgtgtctgtaaagatggaccggtatttttaagcacggaggtggagctgtaatgaatacaaaagtgacgattgccggagtggaactgaagaatccggttatgacagcttcaggtacctttggatccggtgcagaattcagtgaattttacgatctgggagctcttggtgcagtggtgaccaagggagttgccaatgtgccgtggccgggcaatccgactccgaggatcgcagagaccagaagtggcatgctcaatgccatcggtctccagaatccgggaattgatgtgtttgtaaagagagatattccgtttctgaaaaaatatgatacaaagatcattgtcaatgtgtgtggcaagagtgaagaggattactgcgaggttgtagagcgtctggcagatgagccggtggatatgctggagatcaatgtatcctgccccaacgtcaaagaaggcggtatcgcatttggccaggatcccaaagcactgcagcatattacagagcaggtgaaaaaacgtgcaaaacagccggtgatcatgaaattaagtcccaatgtaacagatattactgttatggcaaaggcagcagaagctggtggagccgatgctctctccatgatcaatacactgaccggtatgaagattgatatccatagaaggacatttgccattgccaacaagaccggcggtatgtccggtcctgctgtgaagccggtggctgtccggatggtctatcaggcagctcaggcggtaaatatcccgatcatcggaatgggtggtatcaccaatgcggacgatgcactggagtttattctggcaggagccacggcagtatctgtgggaacagcgaattttgcaaatccttatgcggcgaaagaagtggcagaaggaatcgagaattatatgagacggtatcaggtggaggatatccgcgacctgatcggtgctgtgagataaggaggttacaggaagatggaacagtataaacaggaatttatagaatttatggtagacagcgatgtgctgaaatttggagagtttacgctgaaaagcggaagaaaatccccgttcttcatgaatgcaggagcttatgtgaccggttctcagttaaagagactgggcgagtactacgcaaaagcgatccatgacagatatggtgatgattttgatgtattattcggaccggcttacaagggaattccgctgagtgttgtgactgcaatcgcatacagcgagctgtacggaaaagagatccgctactgctcagacagaaaagaggagaaagaccacggtgcagacaagggaagcttccttggcagcaaattaaaagacggtgaccgtgtagtcatgatcgaggatgtaactacttccggtaaatccatggaagagaccgttccgaaggtaaagggtgcagcagatgtgacgatcgtgggactgatggtatctctggaccgtatggaagttggaaagggcggcgtaaaatgcgcacttgatgaagtacatgatctgtacggatttgagactaatgcgatcgtgaccatggctgatgtggtagaatatctctacaaccgtccgtataagggaaaagttatcattgatgatacattaaaggctgctatcgatgcatactatgaacagtatggtgcaaaacagtaagttctgaaaaggagtaagtttcatgaacaacgaaaaaacatataaattaatgtctgtgattggagcaggcaatctggctctgggaatcgtagtcctggtagccggtattgtgtccggtattctgatgatcgtcggaggagccagactgctcaagggaaaatcagacttgttgttctaaaaggggatcagacttgaaaaaggagacgggaaaaaaagtccggctgttatgcagagtcttctttgcagggtacattcttctgctgatctatctgatgtttttctcagaggaatggggccggtcgatcttagggggagactaccgttataatctggttccgtttcgggagattcgacgctatctgaaatatcgcgggaccatcggatcatggcgggtgtttctgaatcttgcaggaaatgtagttggttttatgccgtttggagcgttgcttccagccctgaaggagaagcctgcagggttctggaggacagcgcttttcagtctggaactcagcctgttcatcgaactttcacagcttgtgctgcaggcaggaagctgtgatgtggatgatctgatgctgaatactctgggaggatgtctgggttatgcactgcaccgcctggtagtatctggaggaaaacatgaaaaagagaaaaattaaattcacggataagaagcattccagaaatggaattctgtctacgatcctgggagcggtgtctgcagggctcttgttctgcctgctggcggcggcttatctgacgtccgggcaggcgggaaaagcggtggcggttctgggacttctggcattctttgtagcatgcgcaggtgcatggtacggcgtgcttggaagacgggaagaggattcttaccggctgtttccggatcttggaatcggtatcaatggactgcttctggtcggatttgtgatgatttatataatgggatggtgacatcaatggaaatgaatgagactttgagagaacgccagcagcttgcatatgagaggatccgccagattgcggcagatcctgagatcaatggagccgttggcgattattttcaaaagactgggaagtttgccctgttgatcctgaaggcaagagagctggctgaagaggattattttgcaaaagcgtcagttgatgaattaaaagcatggaacgaaaaactttatgaggatattgccggaaatgcttatgagacaagttatgccaatccggcttatgcagttgcagagctgggagaggaatatggaaacgtcctctcttttgtatatacggaactgcggggtatgattgtctatgcatttgagaagcgggatgaggagcttctgatccatctggaactgtttttacagattcacagtgaatttgcagaaggagatctgcccacaaaacggcagcttgggcagaatgtgtactggtttgtcagcgattacagtgatgtactggtaagttaccggatcagggagcagctggatccgaccctgtcttttgcaagagatattattatgaaggcagatcttacggatccgtcctacctttatcagttcggcgagtatatcacagaccgggagatccgcatgagcgaatttctgaaccgtcttccggaagcagagatcgagcggatcgcatctgtatttacggaaggatatcggatcggatttgaggtaaacgaaaaggatctgaagaagaaaagaaccgtcaatatccgttattgcctgggattcgagcggatcatccgccaggcggtaaagaattttgaagaaatgggacttgagagcatcatttaccgtgcagcagtgagcagggttaatatgagagaagctaataaaataggatattacagctcttccccgaaccgccagtacgattacgatcacaagggtgatgcagcactgtttctggataaagcctttgtggagcgaaagcttggtgttatgagaactacctatgagcagtacaaggaactggcagctgtccatggaggtccggctgtgatggagatctttggagagactccgtttgaaccggctgcctgcccggaggcttacaagctggcagaccgtcagcaggagaatcaggtgcttctctatagcaaatccggtcagatgaccaatgagtatataaaaggtgaagagagaagctttaccattattgccttcccagtaccggacattggagacaaatttgaagagatattccgggagacagtgaaaatcaatactctggattatcggacctggcagcggatccagcagtgcatgatcgatgtgctggatacaggagaaaaagtacacattacaggaagcggggaaaaccggacagacctttatgtggcacttgcatctgtcaaggatccggctcatgaaacggtctttgagaactgcgtggcagatgtgaatattccggtaggagaagtatttacttcaccgaaacttaccggaaccaccggccttctccatgtgagcggcgtctatctggatggactgttctataaagatctggtgttatcttttacagatggtatggttacagattacgactgtggcaattatgaaaatacagacgagaaccgccggtatatcagggaaaatgtactgtatcatcatgatacactgcctatgggagaatttgccatcggaaccaataccactgcttatgtggcagccagaaaatatggcattgaagcattgatgccgatcctgatcgctgagaagaccggaccacattttgcagtaggagatacctgttattcctgggaggaagatgtggtaacacataatccggatggaaagaagatcatagcaaaggaaaatgagtgctctgcccttcgtcgtaaggatccgggaaaagcttattttaactgtcacacagatatcacaattccttatgaggagttggatgagatcgctgtgatccaaaaagatggaacgaaagtcccgatcattcagaagggacgatttgtacttccaggaacagaagaactgaatgtacctctggatgagtggaagtaaggcttgacaagatgcagaggtaacggtaagataacttataagtaacaggtgttttattaaaaaaacttataactatcataagcaaaaggagaaaagcaatggcaaaagtaggaattgtcatgggcagcgattcagatatgcccgttatgagcaaagcagcagatgtactggcaaagttaggtgtagattttgagatgacgatcatctctgcacaccgggaaccggatgtattctttgaatatgctaagagtgcagaagcaaaaggtttcaaagtgatcattgcaggtgccggaaaagcagctcatctgcctggcatgtgtgcagcgatctttcctatgccggtgatcggaattcccatgaagacttctgatctgggcggcgtggattctctgtattctattgtgcagatgccgactggtattccagttgccaccgttgccatcaatggcggtgccaatgccggcatcctggcagcaaagatcctggcaacctctgacgcagatcttctggagagactgaaagtatattctcaggagatgaaagaggaagtggaagcaaaagctgcaaagcttgatgagattggatacaaagcctatcaggcacagatgaaatagagagggaggaagacgtaagatggctatggattataagaacgcaggtgtggatattgaagctggatatgagtccgtggaactgatgaaaaaatttgtaaaagggacgatgagaccggaagtgctgggaggtcttggcgggttctctggtgcattttcactgaaagctattaaggatatggaagatccggtactgctgtccggaaccgacggatgtggaaccaaagtaaagctcgcatttcttctgaataaacatgataccatcggtattgatgcagttgccatgtgtgtgaacgatgtggcatgtgcaggcggtgaaccgctgttcttccttgactatattgcctgcggaaagaattatccggagaagatcgcaactatcgtaagtggtgtggcagagggctgtaaacagtccggagctgctctgatcggtggtgaaactgcagagcatccggggctgatgccggaggatgagtacgatctggctggatttgcagtgggcgtagttgacagaaaagatctgatcaccggagagaatatcaaaccgggcgataccctgatcggaatcgcaagtaccggtgtacacagcaatggattttctctggtaagaaaagtgttccgtatgacaacggaagcactgaatacatattacgactgtctgggtgagactcttggagaggcgttgatccgtccgaccagaatctatgtgaaagctctgaaaaatgtaaaagaagcaggtgtgaccctgaaaggatgcagccatatcaccggaggcggattctatgagaatattccaagaatgctgccggagggtgtgcgtgcagtcgtgaaaaaagacagttatccggtacttccgatcttccgtatgcttcaggaagaaggaaatatcgcagaagagatgatgtataatacctttaacatggggcttggaatgatcattgcggtagatccggcagatgtggataagacgatggaagcaatcaaagcagcaggcgatacgccgtatgtagtaggctctgtggaagcaggcgagaaaggtgtgaccttatgctaaagctggcagttctggtatcaggaggcggcaccaatctacaggcgatcatggatgggatcgcatctggttccatcaccaatgcaaagatcgtgactgtaatcagcaataataaaaatgcctatgcgctgacccgggcagagcaggcggggattccggcgtcgtgcatcagcccgaaggactatgccgaccgtgaggcattccacgaagcacttcttaaggcactggtggaatcagaagcggatctgatcgtgctggcaggatgcctggtagtgatcccggaaatgatcattgaccggttcccgaatcggatcatcaatatccatccgtctctgatcccgtcattctgtggaacggagtattatggactgaaagtccacgaaggagcactctcacgtggtgtaaaacttaccggtgcaacggtacattttgtggataaagggacagataccggtccgatcattcttcagaaagcagtagaagttcttccggatgatacaccgaagagtcttcagcagagagtgatggagcaggcagagtgggtgatcatgccaaaggcaattgatctgatcgccaatggaaaagtaaaagttcaggatggaaaagtcctgatcgaacagtagaacaagcgcggaggaaatacagatgaagattttgatcgtgggaagcggcggaagagagcatgccatcgcatggaaagtggcacagagtccgaaggtagacaagatctactgtgcgccgggtaatgcaggaatctctgaatatgcagagtgcgtggatatcggagcaatggaatttgacaaactggtcgcatttgcaaaagaaaagcagatcgatctgacagtcgtaggtatggatgatccgctggtaggcggtatcgtggatgcgtttgaggcagaaggtcttcgcgtatttggaccgagaaagaacgctgcgatcctggagggatccaaagcattttcaaaagatctgatgaaaaaatatgatattccgacggcagcttatgagaattttgacgatccgcagaaagcactggagtatctggagaccgctgatatgcctatcgtactgaaggcagatggactggcacttggcaaaggtgtgctgatctgcaatacactggaagaggcgcgcgagggcgtacagtccattatgatggataaaaagttcggtaccgcaggcaacaagatggtcattgaagagttcatgactggccgcgaagtatccgtgttaagctttgtggatggaaagaatatcaggatcatgacttcttcccaggatcacaagcgcgccatggatggagaccagggactcaataccggcggtatgggaacattttctccgagcccgttctatacggatgaagtggacgaattctgtaaaaaatatatttatcagaagactgtggatgccatggcagctgagggcagagagttcaaaggagtgattttctttggactgatgctgacaccaaagggaccgaaggtgcttgaatacaatgccagattcggtgatccggagacgcaggtagttctcccacgtatgaaaaatgatattgtggatatctttgaggcgtgcgtggatggcacccttgaccagattgatctggagtttgaggacaatgcggcagtctgcgtggtactggcatccgatggttatccggtaaaatacgaaaaaggattcccaatccatggtcttgaacatttcaagggctgcaaggataaatttgtattccatgcaggaagtaaattaaaagatggtcagatcgtgacaaatggcggccgtgtgcttggcgtgacagcgcttggaagtactttgaaagaagcaagagccaatgcatataaagcagtagaactggtggattttgataacaaatattatcgtcatgacattggaaaagccattgacgaggtgtgaaatttttatgaaatctgttgactttcctgcggatacaagatatggtagaatatattttaaaaatccggaaagagagagttatatgaagaataaaaagaaactgtttggaaagacgatgggtctgattgcagctttggtgctgtgctttggcatgacagtattggcggcaccttccgtaaccggggatacagaactgacagtacagaaagataaaattgtatctgcatcttataagatcaccaatgatgattccattgagagtgtaaaactgactttatcttatgataagagtgatctgacctatatgtccggaagtggtggagataatttctccggaagcggtggaaatggtctggtggagttgtccagcaatccaggcagtaaggctgctacatttggagtaaaattcaaaggtctgacagatggtacctctgaagtgacggtatcttcctgtaccatcacggtaaatggaaaagagatcgatgccttaagcggtgtatctctggaggaagaagaggaagaaaaagcagatgcctctgcagaagatgaggaagaggaagaagatgatgaagatcgtgcgacctgggtcatcgacggaagaaccttcctgactcatcatattccggggatagatggatatgatgatgaaaagatagagatccagggaaagcaggtccgcgttctgcataacactgtaacagatgtctatcttgtatatctgttcagcgataacggaagctaccgtgattattttgtatataacccggataccggtaatattgttccctatattgaaaagcagagcggaacagatacggtgacctttattgagccggaagagggcggatatgtgccgatccgttattcttatgtagatatgccgtggggtgcaaaatataccgtaccggcatataagcatgtgatcatcgatggtgtggatgaaatctttgatgatactaaccgttatctggtctatggtgtcaaccaggatggcgaaaaagcgtggtacagctatgactatgataaggattccctgcagttatttgatgatgtggcttaccagggtgagcagaattatattaccgagctggaggatcaggatgcagcccttcgtacagaggcagactatcagcagaaccgctataccacggatatgggacgtcgtctgatgatcattctggtcatgacgctgatcatcattattctgcttaatgcggttgtgatcctgactctgcgtatgaagaagatgcagatgctcccggaaaaagaggatgatgaggaagaagaggatcatactcccaagagcagctcctatgtaaccggcagtctggaggaaaatgagtctgatttccatgacccggaagaggatgaactggagatcattgatctggacaatgcatccgacgatgacgaagactgatcagaggaagcaataaacaaaagaaaataatagtctgacagacaatgaagaatgagcgaaacctgcggggataagagaactgcgagcttcgctcatttctgtttggaaagcttttgcaaagacaggaaagtgttgaccggaaaatgagatgctgttatactgcctatataacaaatgatggatatgttagagccgtgcggatgtggctctgaattatcaataacgtaagaggacatgatcatgtatttagaaattgattttaacagtgatgaagcattctatgtgcagttatatcatcagatcattattggcatcgcgacttccagactgcaggagggagataccctccccagtgtccgtcagctggcagatgaggtgggcatcaatatgcacacggtaaacaaagcctattccctgttgaagcaggagggctatatccggctggacagaagatatggtgcagtgatcgcagtggatgcagataagctcaaagctatggaggacatgaagcagggacttctggttcttttggcaaagggaagctgtaaaaacattaccagagaagaagtgcatcagttaatagatgagatctacgaagaatacggggcataaggaggagacatatgcagatctatacggatgcggcacaggccgcgctccgacaggcaaagagaatatcaggacagatgaaacatccctatacaggaaccgagcatattttgctgggactgttaagggagcaggaaagtacagccggacaggtgctcataaatgcaggcgtgacagaggcgggacttacagatatgatcagtcagctgatcgcgccggaaggcgggatgcttccagaggaaggcagaagctttactccgagggccagaaagattctggatgatgcgcagatggaagcacatcggtttcatgagaggctggtgggaaccgagcatattctgattgcaatatttaaggatggtgagtgcgtaggctcccgtctgctgactaccatgggtgtccgggtgcgggatatctatgtggatctggttaactccatgggtgagaaggcgtctgagtacagtaaggatgaatccaggtccaaagggacccagacactggaacagtacagccgtgacctgaccactatggcaactgaaggacggctggatccggtgatcggaagggaagaagagatcctgcgtgtcattcaggtattaagccgccggactaagaacaatccttgtctgatcggggagcccggggtcggtaagactgccattgtggaaggactggcagcccggatcgcagcaggaaaagtaccggattctatccggggcagacggctgtgtattctggatctgacggctatggtagccgggtccaaatatcgtggcgagtttgaggagcgtattaagaatgtgatcgatgaggttcgtgaggacggaaatattcttctgtttattgatgagcttcatacgatcattggtgcaggaggtgccgagggagccatggatgcctctaatattctgaaacctgccatggcaaggggtgagattcagatcatcggtgctaccactctggaagagtaccggaagcatattgagaaggatgcggctctggagcgaagattccagccagtgacggtagaaccggcatcggtggaacagacgattaagatcctgaaaggattacgtccgtattatgagtctcatcaccaggtacagatttcggatgaggcactggaggcagcagcaagactgtcagatcgttatgtaaatgaccgatttctgccggataaggccatcgatctgatggatgaagcggcagcaggactgagactgggacagttcggcagcaaacaggcaggctctacggatacgatccaggagctgttggatgcaagagcggcacttgatcaggcactgatggagtcagatctggagaaagcccacaattgcaaagaggaagtggaacggctggaacatctgctggagaaaaaagagaaccggcgcgggcgtaagagttccaacattgtgacagaagaacagatagcggaagcggtggccaaatggaccaaaatcccggtacagcggatcgcagaggcagagtcccagaagcttcggcgtctggagaagacacttcataagagagtcatcggacaggatgaagcggtgcaggcggttgcaaaggctgtgaagcgaggaagagtaggcttaaaagacccgaaacgtcccatcggatcatttttattccttggaccgactggtgtgggtaagacggagctttccaaggcactggcagaggtgctgttcggaaaagaagatgccatgatccgtgttgacatgtctgaatacatggagaaacacagtgtagccaagatgataggctctccgccaggatatgtaggacatgatgatggcggacagctcagtgaaaaggtccgcagaaatccttatgcagtgattctgtttgatgagatcgaaaaggcccatccggatgtatttaatattttgctgcaggtgctggatgatgggcatattacagattcccagggacgacaggtggattttaaaaataccgtgatcatcatgacttctaatgcgggggcaggttccatcgtcaatccgaagaagctgggctttgcatcgtcagaaaacgcaaagcaggattatgagttcatgaagaacagcgtgatgaatgaggtaaaacagatcttccggccggagtttctgaatcgaattgatgagacgatcgtattccacatgctccagaaggatgagatcacgcagattacaggacttctgctgcaggagctggagaaacgctgcaaaaatcagctttccattcaggtgcattttacggattctgtgaagaaatggctggctgagaccagttatgatgcgaaatatggtgcccgcccgctaaaacgtgcggtccagaaccggatcgaggaccgtctggcagatgagatgctggatggaaagatcaaggcaggcgatcatgtggatgtgaaagtggtcggaggaaaactgaaaatcaatgtacaaaaataaagagaaaaaaggtggaacgatctttttttgtcagaattgtggatatgagtcggcaaaatggtcgggccagtgcccggcctgccgggagtggaatacgtttgcggaagaaccggcagcaccaaagaccaagggcggaagcagccgaagaagtgccagagaagtccgggaaccagttaccttgaaaggcattgaggctgattcagaaggacggatctccacgggaatgtcggaacttgaccaggtactgggtggaggaattgtgccgggttcccttgtattggtaggcggagatccgggaatcggtaaatccacactgctgctgcaggtatgtcgtaatctggcagagcggcttgacagcatcttatatatctccggtgaggaatcactgcagcagatcaagcttcgtgcggtgcggatcggagagttctctgatgccatgaccttgctgtgtgagaccaatctggatgatattgagtccattgttctgaagaaaaagccgcaggcagtgatcattgattcgatccagaccatgtatcaggaaaatgtatcttctgcacccggaagtgtatcccaggtgagggaggcaacaggagtacttatgcgtctggcaaaggaaaataatattacaatttttattgtaggacatgtaacaaaagaaggaactgtggcaggaccacgtgtgctggaacacatggtggacacggtattgtattttgaaggtgaccggtatgcatcctatcgaatcttaagaagtgtaaagaaccgttttggttctaccaatgagatcggtgtctttgagatgacagacaaagggctcagggaagtgagcaatccttcagagtatatgttaagtggaaagccagagggggcttccggatcagtggtggcatgcaccatggaaggcaccaggcctatgcttctggaagtacaggcgttggtatgccggaccaatttcggactgcccaggagaactgcggcaggaaccgattataatcggctgaatcttcttatggcggtactggagaagcggttgaatctgccattgtcaggctatgatgcctatgtaaatattgcaggtggtgtgcgcttaagtgaaccggctatggatctggcgctggtgcttgcggtgatctccagttacaaagatgtgccagtctctgacaagaccatcgtatttggtgaggtgggattaagcggtgaagtccgtgcagtcagtatggcaaagcagcgggtacaggaagccaaacgcttaggcttcacgaaagtgatccttcctaagagctctatggatcaggtgaaggacatcaaaggcattgaactgattggcgtgtctgctgtgtgggatgctatgaagtgcttataaaatatttcaatattttcgcaagttttcattgacacaaaagtcgaatcgtggtatagtttcatggtgtcagtgatacacagggatatagttcagttggtagaacgttggtctccaaaaccaaatgtcgagggttcgagtccttctgtccctgctaggcttcggaaataacagatttccggagcctttttcttatcttaatgcttataacagaaaggaaatagattgcatgaaaaaactggtatgcctgggactggcggcattgctggccgtacagacaacagcatgtggagtaaatgcgcaggagtcaactgctaaagatgaagagcttgtggtagaagatgtcggggtgacagaagataaacttccagaacggaatctgaaggatgacagactggagcaggtgacagaatcaggaaaactgctgatcggtatttcgccggattatgcgccatttgcatttacggaggacagtaaagatacgacaaaaatatctgcagcagataaggagaccgatacaacaaagacatctgcggcggataacaccgcacagacagatgatacgcccacatgtgcaggcagtgatgtgcagcttggcgaatacattgcaaagcagttaggcgtggagcctttgttcgtggagatggagtttgatgattgcctgaaagcggcgaaggaagggactgtggatctggtgcttcttggaatgctgcccaagaacgatcgtaaggcatcggtggattttacagaggaatattataaaccagggaaacaggtactgctggtcacggaggaaaaacagaaaaaatacaaggatctggacgcatttaccgggaaaacggtggtggctcagtatggaaccttgcaggcacagctggtgatggagcagatgccggagacttatatgacgctggtcgatgtggtttcagatggaatcgagatgcttcgatcaggcaaagcagatgcagtggcactggatgaagcggtggcggaagatctgatgaaggaagatgatgatctggcattgtcagctctggagctggaatatgaggcagctggagtggttggcggagtggtcaaagatcagaaagtatttcttgatgcagtcaataaagcaatcgaagaagtaaaaatgcagaagctttattataactggctggtggaggcaactcatcaggcagcacagaagaatcctgctattgacgacagtgagatgacaagagaacgggaccggacaaagaaaacgacagtgaaaatgcagacaccggcgactcagccagcgactgatccggcgactcagccagcgactgatccggcaacccagccagcgactgatccggcaactcagccggcgactgatccggcagctcagccagcgaccgatccagcagctcagccggcgggctaactttgaaaggaagtgaatgaaatgcgtgagatcagacaaggacagttttacagacattttaagggtggcctttaccaggtcatggcaatcgccacgcattcggaaacaaaggaaaagatggtggtttatcaggcattgtatggagattatggaatctatgtacgtccctatgatatgttcgccagtgaagtggatcatgaaaaatatccacaggtaaaacaggtgtatcgatttacgcaggtacatccagaggagatggaggaagagtctgataaggtggaggttccggatctgacacttgagttggatgaaagcatggagccggagcagtctgcagtggaggaagaaccgaagaaaatgtcagaggatcaacctgcacaagaaaagcaggatgtatcgggcggcatcaatccgattttattagaatttctcgatgcagacactttggaggagaagatgcatattatgacattttaccgaaatcagatggatgaggcacttctcaacagcattgctatctcactggatctggtggtggataagaaagggctgcaggagacctatgatgagatcatgaactgcctgtctatgatgaaacattttgaatgtacgaaccggtttcgttagaaacaggaacagaacataaagaaacgaagcataaaggagaagaacaaatggcagaaaagtcatgcagcagcacaggctgtaccaaagaaagctgtgcaggatgtccaagtgcaaaaggtgcgcagaagccgcagagcatgctggcaccggcaaatccgaagtcacatattcataaagtgatcggcgttgtcagtggaaaaggtggcgttggaaaatcactggtaacagcatctttagcaaaccttatgaaagagcagggatattccgtaggaatcctggatgcggatattacaggcccgtccatcccgaagatgtatggtcttcacggcccggcagagatggatggcgattatatcaaaccagtagttacagaaaatggtattccggtcatgtccatcaatctgctgcttccggatgaggaatctccggtcatctggagaggaccaatcctggcaaatatggtaaaacagttctggacagatattgtgtggggagagatcgattatcttttcgtagatatgccgccaggaaccggtgatgtgccactgacggtcttccagtctattccggtggatggaatcatcactgtgacgtctccacaggatctggtaagcctgattgtaaagaaggccctgaatatggcaaagagcatggaaatcccggtaattggtctggtagagaattatagctatgtgatctgcccggattgtggcaaagagtttaagatcttcggtgagagcggccttgacaagttggcagaagaactggatctgccgatccttggacggatgccgatcgatccgaagcttgctgaactggcaagtggagagtttgcaaaagctaataacgaatatctggctgctgcagagagtctgctgatcgctctggagggttaaaaaccaacattaaatcttgagcaacacaatatgtgaaggaaagcagcacagagatgtgaactacgctgtatgtattggagcgtacaaaaggaaacggctgtcagactgagacagacattttaatgtctgtattcagaatgacaaccgtttttattttgtacgatacactacatacgaggttcactctctgtgctgctttctcatatatatgaggatcaagattttcattgactgcctatcgcaccagcacataatcttttatcactgcgaagaattcacgaaagagattggctggctgggtgatcaggtctccttttgcggggatgccataagcatgctcgtagccaagagcgtctgccaggtgaagggagcggcagacatggaatccattggtgatgataccgacagttgcgctctccgggatgagttccgcggagaagatcaggttttcccgggtgttggtggactggtcttctgtcaggatccggtcggaggaaaggccgtgggtttccagataggtcttcatggcatctgcttcggtgcaaggttcattggagccttgtccgccggaaacgatgaagatggtatccgggttatcagcagcataatcaagggctgcatccagccggagagccagagcccggcttggaccggtggaacgcacgtgggcgccaaggacgatgacataatcaagaccagaagcaggatccaaagtggcggcacgaagaatcataccttccacgccgacaaagaccaaaatgcctattgcgacaaaagcaagcagaattccccggacgcttggcggaagctgtgcaaaaaagtgaatatggaataaccagccaagcagcagaaaacagactgccatggcaggccataccagataaaaagcggaggtaaatccgctgtatatcagtaaaatgataaaatacagggcgcagacaatgcctgcggtaaaacatatgatatgcaagagactctcccttctggtttgaaattgattctggcagtgcagatgatttgtcaagcaaagttaattcatttaatgttttcaatagatttctcctttattgtatctgcattagctttgcgttgcaaggggctttataaaaatttacaactggtgaaagcttcacaagaaaacagcataaaaactccatctcgacaactctcatacacaatggtaaaatgaaacttagattataagcgaattttgaaagaatcaggaggatttttatccatgaaagctttgatattaaattccggcatgggttcccgcatgggagttctgacttctgaacatcccaaatgcatgactgaaatctccggcagggagaccattttaagtcgtcagctcagccagatcgctgatcaggggatcgaagaagtggtcatgactaccggacggcatgatcaggtactgacagagtactgtaagagcctggatctgccgcttacttacacctttgtgaaaaatccggtctatgacaagaccaattatatttattccatctactgtgccagagaggcactggcagaggatgacattctgctgatgcatggggatctggtgtttgaaaatatggttctggaccaggtgattgaaagtaaagagagctgtatgatggtcagcaccacacttccgcttcctgagaaggattttaaagcagtggttcatgacaatcagattgaaaaagtaggcattgaattttttgaggatgccctgtctgcacagcccctttatcatctgaagaaagaggactggaagatctggcttgaccggatcgtggcattctgtgaggctgatcaggtgaaatgttatgcagaaaatgcactgaacgaagtttctgacaaatgcgtgatccgtccgttggatgtgaaagatcagctttgtgcagagatcgacaatcctgaggatttgaaagtagtatctgagaagctggcagaagtggagaaccgcacagtctatatgagtttttccgcagatatgctgcacagcggtcacatttccattatccggaaagcagcccgcctgggacgtctgaccatcggtgtgctgtctgatgaagcggtgatcagctataaacgatatccgcttttgccttttgcggagcgaaaggcattgtttgaaaatattcgtggcgtgagtcgtgtggtagagcagaagaccctgagctataaggaaaatctggagaaaataagaccagattttgtggttcatggagatgactgggtgactggattccagaagccggtgagagaagaagtgctggcagtactggctgagtatggcggaaagctggtggagttcccatactccagcgatgagaaatacaagagtctggagcgccgggcaagagcagatctgtctctgccggatatgcgccgtggaaggctccgcaaagccattgagatgaaaggcacgatcacagccatggaggcacatagcggtctgactggtctgatcgtggaaaataccgttgtctaccagaatggagaggcaagacagtttgatgccatgtgggtcagctctctgtgtgattccactgcaaaaggaaagccggatatcgagctggtagacatgacttcccgcttccgtaccatcgatgatatcatggaagtaacgaccaaaccgatcgtatttgatggagatactggcggaatgaccgagcattttgtatatacggtccgttctctggaacgtatgggtgtatctgcagtcatcattgaggataagaccggacttaagaaaaattcgctgttcggaacagaggttgtgcagacccaggattccattgagcatttttcagagaagatcgctgccggaaaacgtgcacagaagaccaaagagttcatgatcattgccagaattgagagcctgattctggagcgcggaatggacgatgcgcttgagagagcattcgcatttgtcaaggcaggtgcagatggtatcatgatccacagcagacggccggagccggatgagatctttgagtttgtagagaagttccgtgcgcaggattctgtgacaccattagtggtggttccgacttcctttaatcaggtaacagaggaagaattcaaggacagaggcgtgaatcttgtgatttatgcaaatcagctgaccagaaccggttttcctgccatgcagaatgcggccagaacgattctggagcatcaccgtgcgaaggagtgcgatgccatgtgtatgccgttcaaggaaatcatcaatctcattccggaggaagagtgatatggagcagacaattattgaagcaacgaccatggagatacagctaaaagaagtatttgagcagcactgcactcgtcaggtattatttgtgctgggagcttctttcagaaaacagaagctgtacggaaggcttcaggagctgatgaagaatgcaggtgtgggctgtacagagttctcagattttcagcccaatccgaaatatgagtctgtggtggctggtattgaagcacttcgtgcgcatcactgtgactttatcatcgctgcgggcggcggtagtgccatggatgtggcaaagtgcatcaaacttttttctgagatggatctgtcaaagaattgtctggagcaggagatcgtggaaaatgcattgccattgctggcgattccgactacggccggaaccggaagcgaggcaacccgttttgcagtgatctactatcagggaaataagcagtccgtggcacatccaagctgtgtgccgggctgggtactgatggagccggaactcttagagagtcttcctatgtaccagcggaaagccaccatgctggatgcgttctgtcatgcggcagagtcattctggtctgtgaattctacagaagacagccggaaggatgctgcagaagctatccggctggtattaaaatacgcagacagctatcttgccaatgaaaaggacggcaatgcacagatgctgctggcggccaatattgcaggtaaagccatcaatgtgactcagaccactgccggtcatgccatggcatacaagattacgactctctatggtttatctcatggacatgcagtagccctaattgtggacagcctgtggccttatatggcagctcatacggagaactgcattgatccgcgtggagaagcctatctgaagactatgtttgaagaactggcaaaggtctgcggatgtgacagtgtggaagcatccattgagaaatatcagaactggtttgcagctcttgatctggaaagacccactcttcagaatgcaggacagcttgatcttctgacacattcggtcaatccggtgagactgaaaaataatccggtgcagcttaccgaagagacgctggaagaactgtacagacagatccttcgcgtacaggcgtaaaataatagatagaggaagatacgatgaaagtcgaaacatttgtaaaggtcttaggatctgatttttatacaggagtaccagattctcagttaaaagcattgtgtaattatctgatgaatacttatgggattgatccaaaacatcatgtgatcggagccaacgaaggtaactgtgcggcactggcggcaggttaccatctggcaacagggaaagtgccagtcgtctatatgcagaactccggcgaaggaaatattattaatccggcggcatcacttctgaacgacaaggtatatggaatccctgtgatctttgtggttggctggagaggagagccaggcattcatgatgagcctcagcatatttatcagggcgaagtgacagtgaagcttctggaagatatggatatccgtacttttgtggttggaaaagaaactacagaggaagaacttcaagagaccatggagcagttcaggaaagtgctggcagcaggaaaagatgtggcatttgtgatccgcaaaggcgctctttcctacgaagaaaaagtggtctataaaaatgacaataccatgtccagagaagagatcatccgtcatattgtggaagtgtccggcgaggatcctatcgtgtccacgacaggtaaagcaagccgtgagctgttcgagcttcggactgcagcgggaaagagtcataaatatgattttctgacggttggatccatggggcacagttcttccattgcactgggaattgcatcacagaagccggatatgaaaatctggtgtattgacggagacggtgcagtgctgatgcatatgggttctatggcagttatgggagccaatcatccagaaaatctggtgcatgtagtgatcaacaatggagcccatgagacggtaggcggaatgcctactgtagcagcagatatgaacatcccggctgttgcggaggcatgcggttatccttatgccgtgagtgttgataattttgacgaccttgaccgggaactgaaagctgctaaaaagcgaaatgctctgagcctgatcgaagtaaaatgtgccattggagccagagaggatctggggcgtccaaccacaacagctatggaaaataaagtgaactttatggagtacctgaaaacacgatgaggaaagcagagctccaggtagttgaaagtttcaggatggatctgtatagatgatactttacaaaagaacatatgtttgctacaataatagcaaacatatgttctttttcttgaaagcaacacaattggaggcgaactatgaattatcagatagaacagtccatggacctgatgcagaagcttacgatcctggcagatgcggcaaaatatgatgtggcctgcacatccagcggggtagacagatccaatgatgggaccgggatcggcaactgtctgaaagcaggcatctgccatacctttgcaggagatggcagatgcatctctcttttgaaaatattgatgaccaatgaatgtatctacgattgcaaatattgtatcaaccggagaagcaacgatgtgccgcggacaacttttacaccggaagagatctgcacgctgacgatacagttttatcggcggaattatattgaaggattatttttgagctccggtgtggtcaagagcccggatattaccatggaacttttgtatcagaccttgtataagcttcggacagagtatcattttcagggatatatccatgtgaaagccattcccggggcatctccggagctgatcgagaaggtgggatatctggcagaccgtatgagtgtgaatctggaactgcctacggcggaaggactgaaagtactggctcctcagaagaagcgtgcaggcatgctggcaccgattcagcaggtacagaccatgcggacagtcaataagcatgagatcgcgctgtaccgtcatgcaccgaagtttgtaccggcgggacagtccacccagatgatcatcggagcgacgggagagagcgattatcagatcatgaaggtggcgcagcacatgtatgatcgatacgagatgaagcgggtattctattcagcctttattcgggtaaatgaggatagtctcctgccagccctgcctgggggaccgccacttctgcgggaacacaggctttatcaggcagactggctgctgcgctattacggattccgtacagaggatctgttgtcggaagacaagccggattttaatgtgtttgtagatcccaagtgtgactgggcgctgaggcatctggagcagtttccggtggaagtcatgagggcggattatgagacgcttctgaaagtgccgggaatcgggtataagtctgcgtcacggatcgtgaaagccagaagacttggaagtcttgattatgcagcattaaagaagatgggcgtggtgctgaagcgggcaatttactttatcacctgcggtggcagacagatgtacccgacaaagcttcaggaagattatattttacggaatattatggatggaaaggagatgctgcctgcgggggtgaaggttccctcttatgagcagctatcattatttgatgatccgcgtttttcagtgtgaggatagtctgacagggatactgacgggtgtatatgatggatgggccagtcgtctggggcattcccatgtgcggctggcgattctggatcagggcaacatggaactgttctgcgaatatgaggaagtgatggcggatacagataaggccgggaaggtattgcggacgatccgggaacggatgggagaagacgccgctgtcatgattgcacgggcagccgcctgtcccgatgaggacaaggcagatctgatctatcggatgatcgtcctggggctccatctgaaagatggacaccggatcacagggatgctgggagagcctgtgatgcagcggatgtttgaactaggtcggaaagcaggaaatattgccatgcgctatatcgagatcatccggtttcaggaactggattccggtgcactgctggcagtgatcgatccggaggcagatgttctggcattgatcgcaccacatttttccaatcgtctgccactggagaactggatgatttatgatcgcaggaggaagaaggcagcgattcatccagctggcaaaggatggttcctggtagaagaggtagatgagcgatccgtactggaggcggggatgtcgcgtgaggaagccaggtatggagagctgtggaagtgcttttttaagaccattacgattgaggcaagagttaatccaaagctgcaaatttcgttaattcccttgaaatatcgggattttatgaaagaattccagaatgagagtctgcgtgaagattgtgaaaaatgtcaaaacaaggaaacgaaacaggaacctgaaaaacagatatcacaggaataacccatgaatacgcattctcgcagaaaagtatggttattctgtctgaaaatcagcaataaaattatacatatttaacaaagaaaaaaaggaaaatctgagccagggtgaatttgacaaaggaaaatctgtgagtataataatcgtaaaaataagaagatgtatctgtaaaaggaagaaaaagaccgtctataaaaggatgtgtcattgaggagtgaaagagatgaaagagacaaggatcagactgaatatggatgatgtgcatgattttgttaaagctgcaacaaaatgtgattttgatattgatgtaagatacaatcgttttcttgttgatgcaaaatccattctgggtgtgctcagtatggatctgggtcagatcctgattgttaaatgtcatggcgagaacagcgactttgacagatttctggaaaaacataaagttgcataagagaagctcataagattgggaaggagtcattgcactactgagaataatcatcagtggagcaatggctctttttgcgatacaatgagcgcaagagagccagagggagcttgctcactcttggcgaacggcgaatgtcgatcatgaagctatgcttcatgatataatgacaggagatgcgaaaaagaagaatgggagtaacaacacgtgagaacaacacaacgaatctccgtccgggatctggtggaattcttgctgcgaagtggtgatctggaccgacggcagagcagcgggaggcgggatgcacaggccatgcaggcgggcagccgcattcacagaaaattacagaagcagatgggttccggttatcaggcagaagtgacattaaaatatcagatcctgctggaggacattccggtgtctgtggaagggcgtgcagatggtatctggacagatgaaaatggagaagaaccattggtggtgatcgatgaaatcaaaggaacttatcgggatctgtcccggatggaagcaccggtggaggttcatctggcacaggcaaagtgttatgcctatatttacggacagcagcatgggcagatgcgtatgggagtccggatgatctatgcagatcttgagacggaggaactgcgctattttgaagagacttatacgatggaagaactttccggatggtttcaggatcttatggcagactatggaaaatgggtgtcctttgaatccctatggcaggaacgacgtgcagagagtctgaagaaactgatctttccctttgattatcgggaagggcagaaggatctggcagtcagtgtctaccggacgatcgcaagaaagaaacggctgtttattcaggctccgacgggtgtgggaaagacactttcggttctgtttccagcgttgaaggctatgggagaagggctggcgagccgcatcttttatctgacagcgagaacgatcacacggacagtggcggtggacgcactggatctgctgcggcagcagggcatggaacttaagacagtggttctgactgcaaaggagaagttatgtgtctgtgaaaagccagaatgcgacccggatcactgtccaagagcaaagggacattttgaccggatcaatcaggcggtctatgaattatggactacgggaccggatgcctgtaccagagaggtgattcttgagtcagcggaaagataccaggtctgtccgttcgagttgagtctggatctggcagtctgggtggacacactgatctgcgattataattatgtctttgatcccaatgtcagcttaaaacgtttttttgcagatggtgtaagggaagattatctgttcctgatcgacgaggcacataatctggtggagcgtggcagagagatgtacagtgcttcgctggagaaggaagcatttttgcagataaaaaagctgctgcgtggaaaacgggaaggacttaccaaagcactggatggctgtaatcgatacctcttaacattgaagagggaatgtgagagtggatttcagatattgcctcaggtgggtggctttgaactgcagctgcaaagactcggcgcagaactggataaatatctggagcagccggtgccggaagagatccgggaacaggtcatggagttctatttttcagtatggaactttctgggaatctgtgaccggctggatgacaattatgtgatctatacagaattttcggaagaaggacacttttggttacatctgtactgtgtgcgcccggcagagaatctgcgccagtgtctggactgcggtacggcagccatctttttctcagcaacccttctgccagtcaattattataaggatctgctcactggaaatatagaggattatgcggtctatgcaaagtccccctttgatcctgccaatcgcttgctgctggtaggaacggatgtgagcagccggtattccaggcgaggagcggcggaatatgagcggatggcccgatatattcacgagacagtcacggtgaaaactggcaattatctggtgtttgccccttcgtatcaggtgatggagcaggtggcagatcgttgcgtggcttatgaagacatggaatgtatccggcaggaatctggtatgacggaagaagaacgggaagcatttctgaaggaatttgaaaaagaacgaaaccattctctggttggattttgtgttatgggaggtatcttctcagaaggaatcgatctgacagaggaccggctgatcggtgcactgatcattggaactggtttgccgcaggtgtgcagagaacgggagatcgtgaaagaatattttgacaaaaaaggaatggatggatttgcctatgcttatcagtatccggggatgaataaggtactgcaggcggcggggagagtgatccggacagaatcggacagaggaatgatccttttgatggacgatcggtttgccacgatctcatatcagcggctgttcccgagagaatgggaacagcacgcttattgtcaggtggattcactggaaggacagcttcaggaattctggctgaaatattgaataaactgtttggctgcgttgctgatcggcatcttgtcactgtaagccagtgcaagctgtctggtcggcaatgttgcttttaagggaatctggaacagatcgccgccagctctcgccagacagaagtccggaacaaaggcaatgccaagaccgatatctgccaggtccagcaacaggtcattggaacttagttcgatctcaggaaccagatccagctgatgctgttggaacagggaatggagaaattcgctcgtggtgctgttacggtccagcatcagaataggataatttaaaagttccttgaaagataagggctgatgttccagttcgccatagtacttacggctggcaataaagcagtcctgaaaatccttgatatgttgtacctgttttccgttcccaagccgggaattgggataattggtaaagatcagatccacgctgccattttccagaagatccacacatccaatggaagtctgattggttactttgatgtgaatgttcgggtattccttgtggaaacggcttaagtacggcaccagaaaatagcggcagatggtgtcggatgcaccgatacggagctgtccgcctcccagagtatttgcctccaggatctgtgcttcccctcggcggatcaggttcatggctggttctacatgacggagcaaggtctcgccttccggagtcagctgcaccttcttggtgcttcggatgaacagaggctggttcagctttttctccagcactttgatagactggctgaccgccgactgggaaatgtataatttcttggacgcctcggaaaagctcagtgag

SEQ ID NO: 3740 - DNA, 5548 bp, Unknown
  16S sequences of unknown bacteria
accttatacctccggctttgtgacaaaaaacacggtggacgaggtttgcaaaaccttcactcttccgcggtgctcgaaaaaattccccgccgaatataaaaagtcccgcccttgccttaattattcaataggggtttgctcggcaccctgcgcgggaaaaatttctctttccgactatgaagatcttgtggatcgtgcggttgagtttctcaagggagataccgcctcggccttaaaaaagcttgagagcgatatggaaagggcggccgaaaatcttgaatttgaaaaggcggccaagcttcgcgaccgaatttcggcaataaaaagcttcggacaaaagcagcatatcgtggcgtcaaaaatcaaaaatcaggacgttatcgcctttgaaaccgttccgggaaaatcctgctttgaggtgttcagattttccgacggaaagctctatgacagggaggaattccttttcgacgctctccccgacaacggccagacccgcagcgatttcatcgttcagtattattccatgcagcgggaaattcccaaacagattacggcggattttatgccggaggacagggaactgcttgaaaaatggctgggggaaaaaagcggaaaaacggtgtgtatccacgttccccaaaagggcgagcagcttggactttgcgaaatgtgcaaaaagaacgcgagagaacgtcttgttatgctttcgggaaaatccgggcggcaaaaggccgtgctcgacgagcttgcaaagctgtgcggtcttgaaaaaacgcccgaatatatcgagtcctacgatatttcccacaccgccggcgacgaaaacgtggcgggaatgatagtgtttaaggacgcaaagccatataaaaaggcttacagaagatttaaaatcaaatccttttccggtcaggacgactatgcctccatggccgaggtgcttttccgccgattcaccgaatatgaaaaaagcaagcaaagcggcgagggcttcggaaggcttcccgaccttatccttcttgacggcggagcggggcagctttcggccgtgaaaaaggttatgaatgacatgaatatcgacctgccggtgttcggcatggtcaaggacggccaccacaggacccgcgctcttgtgtcggaagacggagaaattcagataaaggcgatacgtcaggtctttaccctgataacgcaaattcaggatgaggttcacagatttgccattgaatatcatcggcttcgccgttcgaaaaagagcttttccacctcgctcacccaaattgacggtataggtcagaccagagccaaaaagcttctttcgtccttcggcagcattgaaaaaatcaaaaatgcaaccgaggatgagcttgcggccgttcccggcatgaacaggtcggcggcgcaaagcataaaaaaatattattcaaacgaatgataatcaaacggcatggcgaaaaaatcggtttcagccacgccgttttttgtttttttgacgaaataaaaggcaaattaaaaatatctcttgaaatggataaaatatgggtatataattaagtgtatttttgatgattagaggaatagttgtgcagaaaagagaagacataagaaatattgccattatcgcccacgttgaccacggtaaaaccacccttgtggatcagatgcttgcccaaagcggaattttccgccaaaacgagcaggtggccgagcgcgtcatggactccaacgaccttgaaagagaacgcggaatcaccattctttccaaaaacaccggcgttcactataacggtgtgaaaatcaacatcgtcgacactcccggccatgccgatttcggaggagaggtcgagcgtatactcatgatggtggacggcgtgctgctgcttgtggacgcctttgagggatgtatgccccaaaccagattcgtgcttaaaaaggctcttgccctcggcaagaaggccattgtcgtcgtcaataaaatcgaccgcccgggcgcccgccccgcagaggtggtggatgaagtcatcgacctttttatcgagcttgacgccgaagaggatcagctggagttccccgttgtttacgcttcgggaagagacggcacctccggtctttcgcccgacgatatgaaggaggatctccgtcctctcttcgacaccattttaaaggaaattcccgcccccgactgcgatcgcgaggctcctctcaaagctctcatttccaacattgattacgacgaatatgtcggccgtatcggtgtcggaagggtagagcagggcgagcttaaggtcggccagcaggtggttctttgccgaaaggattccgacgccgtcaccaaggcgaaaattataaagctctacacatttgaggggcttaagcgtgccgaggttcaggttgcgggtccgggcgaccttgtgtccattgcgggcgtgaccgccattaacatcggcgatacgatatgcgaccccgagcatcccgatcccatgccctttgttaaaatcgatgagcccaccgtttccatgaatttcatggtcaacaactctccttttgccggaaaagagggcaaatttgtcacctcgagaaatatacgcgaccgccttttcaaggaggttgaaaccaatgtcagcctcaaggtggaggaaaccgattcggcggacacctttaaggtgtcgggcagaggagaactgcacctttccattctcatcgagaccatgcgccgtcagggctacgaattccaggtatcccgtcccaaggttatttacaagaccggcgaaaacggcgagcgtctcgagcctatcgagcttctcatggtcgaggttcccgaggcatatgtcggacccgttatggaaaagctgggcgcaagaaaggccgaaatggtcaacatgggcacgagagacggcggaatgactcacatcgaattccgtattcccgcaagatgccttatgggttaccgtcctcagtttttgactgccaccaacggcaacggaatcatgaatcacgttttcgattgctttgagccttataagggtgatgttgaggaaagagaaagcggctctattgtttcctttgaaacgggcgagaccagcgcttacggcctttataatacccaggacagaggacgtctttttgtcggtcccggtgtggaggtttacgagggcatgatcgtgggtgaaagccccaaaggcgacgacattgtgtgcaatgtctgcaagaaaaagcatttgacaaacacccgcgcctccggttcggacgacgctctccgccttgttcctcccgtgaacatgagccttgaacaatgccttgaattccttaaggacgacgagtatcttgaggttactcccgagtcgctgagacttcgcaaatccattctcaacaaggaacagcgtctcaaggccgaaaaccgtaaaaacaacggctgatcaaaggatttatatgacaacaattatacttgatcttgagtggaacacggcatactacccgaaacagtcgagatttataaacgagataatcgagttcggagccgtaaagcttgacgaaaatcttgaggtcgttgacgattttcagatgtttgtccgttcccgcctgaccaaacgccttcgcgggaaagtcaaggaactgacccacatcaccaacgacgatctgctccgcgacggtgtggattttgccgaggctcttgcaaaattcaccgaatgggcgggaaaagacaaccttataatgacctggagcaacaccgaccttcatgtgcttgtggacaactgcaaaagctttgtggacaaggaaacgattccctttctttattactacgccgacctgcaaaagtatgtccagagctgtcttgagctcgacgaatcggctcagctgggcctttctcatgcggccgagcttttgggcagctactgcggcgacatagattttcaccgcgccaagggcgacagcttcctttgcgcgaggattttcaagcaatgctatgagcccgagcatttcggcgagtttgtttttaacacaagaggaacggatttttacgaccgtcttttctttaaaaactatatcatttcggaaattaacgatgaaaatcttgaaccgtcggatttaaggtttaaatgtcccgcctgcgacggacatcttaaaaagacctgcaaatggaagtttaaaaaccgctactttgccgccgagtttttatgcaaaaactgcgagaaaaaatatcgcggcagggttcaggccaaaaagctttacgacggcgtgtcggtcaaaaaaacgctgaccgaaatcaaacccaaacccaaagaacaaaacaagtaaaaaacgtcccgtaccttcgtcgaagatacgggacgttttaattataaaagccttacatcagcgatttgtagagctcgataatgtcctcaacacttgtgtcgcgggggttaccgggacggcaggcgtcgtcataggccgactgagcgagggcgggaatgtcctcctcttttacgattcccttgagagtggtaggaattccgacgtcctccgaaagctgacggacggcgtcgacggcggcctttctgtattcctcccgggtcatgttttcggttcccttaacacccattgcggcggcaatgtcgcggtatttttcaccggtgtagggggcgttgtatgccatgacggtgggaagaagaatggcgcaggcctttccgtggggagtgtcataataggccgaaagggtgtgagccatggagtggtcgacgccgaggccgacgtttgaaaatcccatgccggcaacatactggccgagagccatgccttcgcggccgaccggctcgttgttgacggcggctcggagagaacgtgaaatgatttcaatggccttgatatggaacatatccgaaagctcccatgcgcccttggtgatatatccctcaatggcgtgggtgagggcgtccatgccggttgcggcggtcagtcctttgggcatggaggacatcatttcggggtcgacaacagccacaacgggaatgtcatgggcgtcgacgcagacgaatttgcgctttttctccacgtcggtaataacatagttgatggtgacctctgcggcggttcccgcggttgtgggaacggcgataatgggaacgcaggggtgctttgtgggagcaactccctcgagagaacggatgtcggaaaattcgggattggcaatgacgataccgattgcctttgaggtgtccatggaggaaccgccgccgattgccacgatgcagtcagcgcctgcggccttgaattcctcgactccgtgctgaacattctcaatggtaggatttgctttgatgtcggaatagagcttgtattcgattccggccttgtcaagaaggtcggttaccttgccggtaacgccgaatttgatgagatccgggtcggaacaaacaaaagcttttttaaagcctctgcctttgatctcttcgggaatggcgctgattgcaccggcgccgtggtaagatgtttcgttgagaacaaatttgtttgccataaaaaacacgctcctaaatttaaattagtataaaaattcttcgggtaaagt

SEQ ID NO: 3741 - DNA, 32759 bp, Unknown
  16S sequences of unknown bacteria
aatattaccgacgcccagatcgcggaaatgaaacggtacgccgatgatatcaattacgaagatgcggcgaagtttgaaagcgaagtgcgtcacgacgtgatggcgcacgtgaaagcgttcgggaaacaggcgaaatccgccatgcccatcattcatctgggcgcgacgtcctgctacgtgaccgacaacgcggaagtcatcgttctcgatcgggcgctcaacctcgttctggaaaaactcgtcaacgtgatggacaaactcaaaaagttcgcgctgcaatacaaggacgtgcctacgctcggatttacgcatttacagcctgcccaactgacgaccgtaggaaagcgcgcgacgctgtggctggaagatctggaaatggactacgtttctctgatgaatctcaaagccgccgtcaaattgcgcggcgtcaagggtacgacgggcacgcaggcaagttttctcgatctcttcaacggcgacggcgaaaaagtcaaactgttgcagaaaaaagtcgtggaaaaaatgggatacgagcgcgtgtacggcgtgacgggacaaacctatccccgtaaattcgactataacgtactatgcgtgctttcgcagatcgcacagagcgcctaccgtttttccaacgatatccgtctgttgcagcatatgaaagaagtggaggaacccttcgagaaaaagcagatcggctcgtccgcaatggcctataagcgcaaccccatgcgcagcgaacggatcagttcgctcgcgaggtacgttctcagcctgcccatcaacgcggccgtcacagcctccacgcagtggttcgagcgcacgctcgacgacagcgcgaataagcgtatcgtgctcgcgcaggcgttcttatccgtagacgcgatcttaaatctctatctcaacatttccgaaaatctcgtcgtgtacgagaaagtcattcaaaagcatatcgccgcagaacttccctttatggcgacggaaaatatcatgatggaatgcgtgaaagcgggcggaaaccgccaggagttgcacgaagagatccgcgtactctccatggaagcgtcgaaaaacgtgaaaatggagggaaaggacaacaatctgatcgaactcatccgtcaggatgaaatgttccgtcccgtctgggacaaactcgacgggattctggacgcgaagaattttatcggccggagcgccgaacaagtttgcgaattcatcggcgaagagatcgatcccatattgcagaaacacaacgggcttctcggcgaaagcggagaagtgcgcgtatagacactagaggcagaaaaaattctgcctctttccatattatagatatttatatcacatactgttaaggggagaaatgtatgcaaaaacttttttataactgcgacatcatcactttggaagacacaaagggggaatgcctgctgacggaagacggcgttatctcttttgtcggagatttagacgagggcaagcggcgcgccgcgcccgactgcgaaaagatcgacctttgcggagcctgccttctgcccgcgtttatcgacgcgcattcgcacatctcgcaggtcgcgcagacgctcacgctttgtgcgctgcatggctcgcgttctcttgcggagatcaaagaaaaaatactgcgctttaaaagcgagagaaatttgtcggataccgactggatcctcgcgttcggttatgacaacaacgatctggaaagtcgccgtcatccgacagccgccgaattagacgagatctctgtctcgaatcccatattgctcacgcatgcctcgggacatatgggtgtattcaacagcgcggcattgcgagcgatcggcgcggagaatcctcaggacatcgagggcggaatgataggacggacttcttcgggcgctccggacggatatatggaagaaaaagcgtttttttattattccgccaaactcgaaagcaaggaaaaaagcgacggcgtccgcttgatgagggaagcgcaaaaattgtacgcttcctacgggatcgcgacggcgcaggacggtctggtcaatgaaaataatttcgcgttgctctccgagtgcgcaaaaaagggagaactgtttttagacgtcgtcggctatgtggacgtgaaaaaatgtccgcagatctacaaagaaaaccgcgaatatcaaaataaatacaacggccgtttcaaactcggcggatacaaattatttttggacggctccccgcagggcaagaccgcctggctgaccgagccgtacgaaggcgacgagtcgcgcggttatcccatttattcggacgacgaggcggaacgactgtgccgcattgcgcaagaagaggacgttcagttattaacgcacgtcaacggtgacgccgcggcagatcaactcttgcgcatcctggcgaaaacaaaaacgaaacgccgccccgtagcgatccacgcgcaagtcatgcggcgcgaccagatcgccgcgctcaaaaaacaaaacgtgatcccgagtttcttcgtggcgcacgtctaccattggggcgacgttcatctgcaaaatttaggacaagaacgtgcaagccgcatttccgcggcaagagaagccgaagatctgcatattccgtttacgtttcatcaggattcgcccgtgatccccccgaatatggcggaaacgctctggtgcgccgtcgcccgcaagaccaagtcgggaaaaacgctcggaaaagacgaatctattgacgttttgactgcgatccgagcggtcacgatcaacgccgcgcaccagtatttcgaagaagataaaaagggaagtctgcgcaaaggaaaacttgccgatctcgtagtgctcgataaaaatcctttgaaaattgatacggacgctctgaaaaatttacaggttttgcggacgtataaagaaggggaactgatctattctaaaaaatgaaagggagtgcggtaaacccgcgctccctttcattcagaaacttctcactaacccgatcacttttcccaaaatctcaacctgttcgactacgatgtcggccatcgtctcgttttcgggatgcaagacgtaataaccgtttttcttgtaaaagcgtttgacggtcgcgctgtcgtccagaagagcgaccacgatatctccgttgtccgcgttctgctgtttgcgaacgacgatcttatcgccgtcgcagatgcccgcgtcgatcatgctggttccctgtacgttcagcataaacaattccgaaccgtgaaaactgtccgcgggaaaggaataatagtcctcataattctcgtaggcgaagatgggctgccctgcggtgaccgtgccgatcagggggatattcaccgaggaattcctcttaaaattcaccgcacggtttttgttcggcgatttggatatgtagccttcttctttcagtttttccatataataatatgcggaagcggtcgatttgatattcaacttttcgcaaatctcccgcaccgtaggcgagtagccgtattccgcattatattcgttgataaagttcaatacggcgtgcatcttatttttgctgctttcagacatctttctttcatccctatttttacgatttttctatattataccatattattttcctaaacgcaaacaaatgtttataaaagtgtttgatattttttgtgatttatgctacaatacaaaaaatcggaggcaaaaccatggaaaaacagagagaaaaatgcgtattatacgatcgggactgtatcggctgtctggaatgcgaaatctgcgatctggataaaaacaaaatttgcgataactgcggtaaatgcctggatatcaaagattatgcaacgatcaaaatcgaccgaatcatcaccgataaaaaggcggagagcaattaaactctccgcctttttatcggtcaatgaaatcgtgaaatttcgaaatatacattgcggggatcaccgcgtcgatcagcattccgaaatcgttaaaaatgatatttcgttctttcagatattttttatttgcgttataatcggaaacagaacgatagggaacgcgcagggagcaaaaaacgtaatcgttttgaaagcgtttcaaaatttcccgtttcaatacttccgtacccaaattctctttcgcggaaataaataccgcatccgtcggatatccttcaaaatcacgcagcgtttcgctcttgttcatgaccacgatgtagggcgcgttaaaatgcaacgcgtccaaagtatccagcgtcgttttcaactgcatttcgtattctcccgtcgcatcgcatacgataagagcaagatcgcagtttaaggcgctctccaacgtggaatgaaacgcgtcgatcagatcgtgcggcaaattttttaaaaatccgaccgtatcgatgagcataaattcaacgtcgtcgatctccatttttcgcgaagtgggatcaagcgtcgcaaaaagttgatctttcacgaatacgtccgactgcgtcaggagatttaaaagcgtggatttgcccgtatttgtataaccaaccagcgcgatcgtcttgacggcattttttttacgacgctcggacaataaatagcgtcgcgtttcgatatttttcaatttgctttcgagatagtcgatgcgtctgcggatatgcctgcggtcggtttccaactgcgattcgcccggaccgcgggttccgatacctccgcccagacgggaaagcgcctcgccttttcctttcaaacgcggatacatatatttaagttgcgccaattcgacctgtaactttccttcgctgctttttgcattcttagcgaaaatatctaaaatcaaagttgtgcggtcgatcactttccgatcgtcgagtacgtgcgaaatattcagtgtctgagaaggggacagggcaccgttaaaaagaacggtgatctcgtccaatccgctcagtcgttctttaagttccgatagttttccttcaccgatataggtcgcagggttgacttctctgattttctgatagagcgttcccgcatacacgccgtcgctgctctcgatcaaagaaataatttcttcgtgctcgatcctgtaatcttcatctataatcggttgaattacatatactttttccatattaccatagtactatgcgtgacatagtgcgttattcattatccttttcgcgcaattttactgcatcttttacggagcggcgaatatcttcgctgatagcggcgtaatgcttttttgtagtattgacgtctttgtgcccgagaacgtcggccacgatataaatatctttggtttcgcgatacaactgcgtgccgtatgtactgcgcaatttatgcggcgatattttttttaaaggggaaatgatgcggctgtattttttgacgagttcttccacggcgcgcacactgattcgtttgggttgaaacgaagataggaagagggcaggctcgtccatgcaatgattatcttctttttccgcgagataacgagccagagcgtccgcgacttcgtcggaaaaatacaagatcgtttgatttccgccttttctggtaaccttaaaagcgttatttgtaaaatcgatatcgtcgttgttgagcccgatcagttcgctgatacggattcccgtgcccaaaaacagcgtcaaaatggctacgtcgcgaattttcgtcttttcgtgcgcggatttttgccgcggcgacatgcccacgccgttttcggcggtatttaaaaggtcagcgacctcattgatttccaatcgtatgatttctttgtcgtgcagttttggtagggcaactttcgccgcattatccacggaaatacggcctttattgaaaaaatatttgaacatagagcgcacagtggacaattttcgcgctttggcgcgttcattgcaactttctctgacgccgttgtattcataattgctcaaataactcaaaaaaagttcgatatccgtgtttgtaacggtctctaaatcgatgaaatccaaatcttcaatggatttcccgtgaaactttttttttgtcagaaaatcaaaaaaaacgcgcagatcatatgcgtaattcaagcgcgtcagcgtgcttgtcctgttttcgattcccaaaaaaaattcttcgatgaaatagggcagatcgcctttgagccgttcgatcttctctaaatttttaacatcgcgctctctgtaataattttcatctttcatagtaatattatacggcatctatccgaaaaaagcaataaaattctctcccgatttccttcggatacctcacatttttatgtgtgagaggagttatataactatgcgtaaaacacgagacattctaccataaaaaatgcaagtttttcttttccccctataagggggaaatttgcttttaaagaggggagagtttgggagcaaacagacaaacgtatcagatgatacacttaaaacaggctatactatcgttgcgactgcccgtcgtaaaggatattatatagcccgaaacagtccgtcgggcgctgtgggggtgtaaacactccccccatcccccgcgtcagcggctcggagaaccgaaccaaaacagggacgaaaaaattgttgcaaaatgtcgaaagatatgctaagataaaaacaagcaatgagggtgagaccttaaaggcggttagcacttccgtaaaaggaggtggtttttatgggatatgattatattctactactggcatttctcgtagatgtcggagtgatacagtctttccgagttacacatgacaaaatcattgtacacataaaaaaataaccgcccacgttagcatcgggtggcggttatttaatcgttacataggctaaccgttgagaggttttgcccttgttgtgattttattatatcaccaaaattttcaaaagtcaatacttcatgcaaaagttttctaagcgctacccgaaagggcggcgcttttttcaatccgttaagccaaggaggtaatcggcactaacgccgtactttttacaaattgcaataacataggatattttaggttcatttattcccaactcccaataactgatagcggaataagtagccccaatacttttaccgaattgcatttgagataaattgtattcttttcttatttcttttaaacgttcagcgaacatattcataacaaatattttacaagaaatcttgaatattgtattgacattcaagaaatcttgttatataatatcaacaagaattcttgtaacaagggttcccagccgtcggagtagcgcggcgggatacaagcaccaggcgagttcacgcgaagggaagggcgcgggatagaaattcccttcccataaatcaaaaagggagtaaaagaaatggcaagattaacaacaacaaagtattatgagctaaaaattaatttgtattcattagctaacaaattaatcaacgaattagattttgaaacgactaaaaaaatcaaagattttatcaagttgataggcaaactacaagaagaagacgagcgcaaagaagaaaatgaaactgacagagaaatagccgaaaagagagtaaatgatgaacgaagataaaaacaaatccttatgcgaaacttgtcgtttcaataacgaaggtgtttgcggcgtagacgctgaaccattagaaaacattgatttagaaggctgtatcttctatgaaattaaccgaaaaacaacgaaaaatcgttgaaatgctcggtgatgagttattcaacgtgcaacatatcgaacgctactacaaagaggacgtaccgaaaagcagttcgttcgacgtctttatgttccataacgtacgcggctacatgaaagccgtgaatcaactcatcaaaatcacggcaccgcccaaaaagagccgggaagacaaattcaagttcgaggacgaataaacggtatcaacgccaacgcgaagacggcagggaaaaacgtcgagcacgggggcgaggttgatatatagaagcgccgttagtactccctgcggcgcttccccgaaaggggatacgagggggtaaataaatttaagggagtttaactcatgattttacaggcaatgtatatcggcaaaaagacggtcgatgaaaaggaacgcaccaacagcaagacaggggagaaaatccccgcattcaagggagtaagatatatgttcatggtcaacgagtggagcgaggacggcgaacttgccgacacgtacggacgcacgtatcaggataagcgcgaagaccatgagaaaatcgacgcaatcgaaaacggagttgtcaaactcggcgacattgtgaacgtgaatatccgaaaccaagatttgaacgtaaactttttctgtcgtttagaggaagacgcaccactcccgttttgataataaataacaaggagtttacgaaatggttgcagcatttacagcggtatggacggaaatcatgaccttcttcgtcacgatattccaaaaaatcagcggcatattctggacgccgggcgtaggcgaagaacccggggaactgaccttcgtcggtatcatggctatcatcatggcaggcgtagcgctgattttgttggtatttaaccttatccgctcgttcttcccgatgagagggtaaccgaacccgaaagcctcgacttttatcacagtcggggcttttattctatggacaataattgccttcaaaagcgtattctgatcggagatcacaaactaatataagacaattattgattttaacaggtggaaattatggacaaaaaaaagaaaaaatatatcgtactgacgataatagcggtgctgctgatagggcttttaatccttatcaacgtcattggcgcgggcacgaagagtgcgtcggcggaaagcgtgattgagtatccaacaccgcaaacaaccgttcggacgaccgcaaccgaagaatataccgatatcacgcagttcgcgccgtcctcggaatataaaaattatttggtaaccaaaacgtttgaagacacctatcagatatattggtttgaagaaggttatgtttcgcaaggttttttaaatagttatgatgaggttttaaattctacttttaatacggtttacaataaagtaggtaaggttggaaatgatgaaaccgcattaagtaattgggaatctacatatattgatgctcaaaaaatagaagttatctcttttagcaattttggatatgaaggaacggctataaaaactgaaattaaaaaaagtgtttcagtaagtaaaacgcttgtttccgataaattttcatctttggatttattgataaatgctataataaatcgaagtgcagaccttaaaactattgatgagatacgtagtcaattagtaatttatccgaatgatactttaaagttgtttggacaggaaatatatagcaattataatgaattgaaccttattcaaattgttcaatcttcaacctttggaaatgcttttttttccgatattccgcaggatctcggtcctgaaatcgtaaaccgtgctaatgaacaacaaaaaataaaagacgatgcttatacatctggtgagaacgaaggctaccaaaacggaataaatgccacgcgcaatgaaattttcagtagtgcaagcctggtttccgctaaaatggaggatggcacaaatttaaacgcgccattaaatataacggcaaaaggtatcgcttttacctcaatagccttagtcgcagatgattatgcaattaaaaataatttagacggagcggataagcacttcaccattatttttaatataatcccttttgcgttcagtaaaaatcaaatttatctctctatgtcttatggcttttattctcttgtctttatagatgaaaataatacacggtacaatatggaatgggatagcaacaataagaccaaagacggttacgcaatatatccatacaataacgaagcaatttaccaaaacaagattaaacaaattcaaatagaatttgcagacatagatcatacaggatcgctaataattccctccagttcaaatacggaaaacgcttataatacaggatataacgaaggaaaaagcgatggctataaagacggctatgccgaagggcttgcgaccggaaacggtccgatgcctactatttcaaaattattctcaaccgtcaattccgctttacaggtaaacttaataggtgatatatcactgcaagatttactaaatattatgctttgcgtaacttttgttattattgctttaaaactctttgcgggaggttaaacgaatggatttcgaaaacatttataatatgtttcaaaacctgcaagatttggctttaagcatatccaatgttctaaatatatccgtccttgacgctttaaaacaaacaatagggaaaatacccggactcggaaactttataatttatctaattgaagggattccgggaatacagacaacaacaattattcaatttcttataggctcggctattacaacattacttacaatgaatatatacaaatttattaaaggtgtgatattatgaatatcatgacaacgatcatcgagtttgtgacccaatacatacccgatttcggacaatacacgatagagtatttcgtactgttcgggctggggatcctgggactcgtcaaattatttaaggggtaaaacatggaaagttttttcaaaatgtggtatgacttcattttatcgcttttcaacacggaaggcatgacgttgacggcggaaacgcagaatttcatcggattcatagtactatgcctggcgatattcggcgttattctcacgctcgccatcatctataaactcgtgaagtatatcttctatgcgattttgagtttaggcaggtaacgcatgataaacattatttttaccgttgtgaccgtaatcgtcgggatattggtcgcgctgtctttgatacgttcgtctatggacaaaaaattcattatgaaagcgttcgacgcggggagcgtgaccgtcaccgggcacaagcgacgcgggaaagatatgctgttttcttacgtggtaaaccgcaggaaaaagccttgcctttccaacatgaaatactccgaccaaacgacgatagtcgatatcaaagagttaaacctcggcgaaaacgattataagcattttatcgatggcaacgtgcagctgataaaaaagcgcgaagaatgggaagggcaggactatttcctcggcgacggcggtatttaccttccgagccagcaccagggcgacctggtaaagacctatccgacgctgccgctgttctatgccatatccaaacaactgtacgacatgaatattcacgtgaacgtgcagaacctcaacaggctatgggacaaactgcgcgagcacagcgattattatatagactgccgcggatgccgtcggctcattggaaggatattcaaacttcgaatgaccttttacgacaaatacgaaagcgcgttacagcgcttagagccgttcaaagtagaccggcggctactcggcaaagacaagcaacagcaagcgttaaaacgccaatacgagagcacaaacggcacgatacgtaaaatgactatttatatccgacttgctaagaaacattacgacacacgcgaatttcataaaatcgtattcggcacacgctatacgggtaagaacaggcgaaagggcgaagacaggaatatactcgaccgaaaccaatagaggcgccagcacctcaaaaacaagcccagaattgatacaacggcaatttcataatcctatccaaacttttccctgccgtcgccttcgggcgagacggcattctcgatgatatcgtccgtactttcggtaaaatttgaaaaaatccgaaaaatagggcgatataagcattttatttatgaaatacttttgtatcttccatgctacatttctatatcatcttattaagttacttaaagtacttatattagttaatatatatatctattctaagggagtaaattgcaatgacggtaaaaaaatccgcgagaccgaataagaaggtcgcggaaattaaagataatatcatccttcacgacaatacgacgggggaactcaaagagtaccgccataacgtattgtacatgagagaccaggcaccgaaccgaaatttcggtatgctgttctttgataccatagattttaaaaagcatttcgatactacgcagtttctgttttggttactctccgtatcggcaagaaatagagttatgatgaaggcagaggacattgccaagaagttcgataccacacgccccaggatcgaccgcatgaaacgtagactgaaagaacagagctttatcaagtacattcccaacgtcatttttatcaatcccgatttctactggcgcggatccgcgtcgatgagagaaaatgcggcagaggaatatttgaatttttaattcggttaggaatatagaggctcccgtaaattgcgcgctcatcttttactttcgtttgcgcggttcatcggacttatgaaaggaaggcgaccttagaaccgcgcgttagcttttctggaatcgcgcgcaattaggttaggacaacttttttataaaatttttcctaacacctttgaaaaccaatctaaaagaggtacaatataaaaccagtcggtatccagatgaatctgttcaaggacaatgagttttactttatagagagcaatggacatattcggaagatgagcaaggaacaatacaggaaaaagactgcaaaagagcaatcttctatgcgtaaaacgcagggtaaaaaataactctgtctggcataaccacaatatattgtggagtgatagggtagaaagtaccctaaaccactacatgaagtgtgtggaaaaacactatttatctatgcgtaaaacacgagttttacgcatagtaagtctgtatttttaggtttttaggctttttttgacggtctcttctatgtggttcaaatgcagattttacgcatagaaaaaaacagtcgcgaatttttgtagtttcgcgactgtttttttatttttgatatgttacggattgagccagcgtttgattgacgatgacgatcgtagctgaagatcgtaattgtttggtttgatctaaaaacgatgtaatgcaatcggtcggtatcgcccaactgacgttttcgtacgaaggcgcacccatcgaattgatgccgacgacataaccctgcgcattaaacagcgcgccgccggaattacccgaattgatcggcgtgtcggtttcaatgaacatatgcgcatagaattgatagtcgacttccgattcgatgagcgacacgatgccgtttgtcacggaactaccgtatcccagagcgtttccgagtgcgacaacaggttctcccgcgcgtaaatcggaataatcggcaagtttacagattttttcaaaaccgtcgaccaagtttccgctttggtcgtaatgtttaaattcgtttttgaacttcaaaagagccatatcgcgctgtttatcgtaggatacgacttccattgcgaaagaaacgattttgccgtcgtgcgtaccgttttcaaaggtacaatacacataaggatacagcgtaacaacattgttcgggttattctttccggattcgtccaacgaagaattcacaacatgtagattcgtgattacatagccgtcggtactgatgacgaaacccgaaccgctgctcgcatgctggccgctcgcgactgctgttaatacgttcacggtaaaattctgataattatccgttatatattttgcaagagatccgtctttttcgatttcaccctgataggccaactccaccactgcgctgtccgacgctatttttgtccccgaggtactttcgaacttttcggacacggtattatcgctctgcactatgatttcgtcggggttggatatataatttttttcagtcttggtgctttcggggatttcaacggataaatcggcgtagtcgggatcctgcgcgcaggcctcgataaaatcgtaaaccgccgtcgacggtacgcagaaagacatcccgtacccgttatttttttcataagtatcggtttcttcggctttggtcgttaaaactcccgcaactttgccttcggaatcgaacagcgcgctgccctcgttcccttcattgctggtgatactcgtctgtacgaggtaatccgcggtaatatatttcggcgcattgatataattctcaaaatcgctgtcggtgtttttcggtttggaaacgatcccttcggcaagagaaacaaaataatcttcgctgtctgaatatgtcgcgatataagcacaattttcaccgtactccagatcgtccgaattggaaaattccacgacgtcgggcattcccgtcattttctgtccgttttcgtcctgataagaaacctcttcggaaaattgcatcaacgcgatatccaaatttgccgcctgagtgatcccttgtgtttgtacagaaaaagcatcgccgttataaagtattgcctctatttcagataaattatttaatttatcaatgagcgaggccgacgtcaaaatatacccagcctcggatatgataaagccagacccaacgcgcgttacttccttagcgccgaaaaagccgtttgaaacagtcccggtaacgctgacggtcacgaccgctttgtaattttcttcgtataaggcgttgtaatcaaaatcttcttccagataggtaacgccgttatagttggactgattgactttattgccttcgtattccgccgtaggcccgctctcgtccgcgttattcttcgcagcggattccctctcgttcagtccgtccagtaccgaacagccgaccacggaaaaagcaaggccgatcgcaacgatgaaagataaacagaatttaaagatccgtttcataattatgcctccgtcacggcgatattgtattcgatcaccgttttcagtttatccgcagtcgcatcgatataatcgacggcgcaagccgcaggcaaggataaaccgactttatgatattcggaataagtcttatcgctgtacactttggaagcaatgatgccgatgatataaccgttgcggtcgtagagcgcgcctccgagcatagtcgtattcattgccgccgtagattgaataaagcgatatgttgtcccctgatacgttacgccgtccaacacagtcatttcgggatcggaaacaacacccgccgtaatgcccgtgccttcgcctaacagatcgccgacgaacgcgcagtaatctcccgtctttaaagtgcttcgtgcatcgtaaaacacggatttaaattgaaatcctttttgggatgctgtattttgcgcatcggaataatagaaaaaattatctttcaattgaatgatcgcaagattgagatcttcgtcgcagtcgatcagtttggcctcatacagttcctcatctccgtaaatgggattgagcgcgacatacagcgtcgtaaccgtagcttttgaaagcgaggaagacagattatccgcataagcgtaaacagcgtttgacgtcgtcaaaatatagccgtcgtcgttcaatatcacaccgctggtccagactgttgtttcggaatgcgatcccttattgttccgatattcgaaataagaacagacggtgacaacggcgcccgctttttcattggcaatgtattcggtataagtgccgtcgtattcgtccgacgacaaattggacagggtaatatgctgtttgtaaatatttttcggtttattctcgtattcgcagccgctgaaaacggcaacgggaacgagcaacagcaatgcgagtaaaaaaaccccgatttttttcatagcagtccttatccctctattttttacattcattatagtcctaatatgtgaaaacaaaatgaatttacatgaaaaaagttcgttttttcacgtaaattcatcgaatgtcgatatttccgtaaacagcccaggaattcggctcgatctgcgcggtgcgcataggcgctttttcattcatcagatcgtacatatcgccgctgaaattcaatccatagcgcccgccgcccagattgacgcaaacgcaaacgacttcgcgctcgccgcgccgctcgaaaacgacgcagtgttcgtcggcgaatacttccttatactcgccttcacgaaatacgccgtatgcgccgcggatcttacccagacgcgcataatgcgcgtgcaattcttcatcaatatgctcccagtcaagacacttgcggcagaacgggtcggaataaccctccgttccggtttcgtccccgtaatagatgctgggaacgccgaacagcgtgaactgtaagagtgcggcggctttcagtctttcgacggctatcgcatattgttcgcgggtcaggcgcagttcgttcatctcttctttgtcaaaggcgagcacgccgcccaaagccgttaaaatgcgcaccgtatcgtgcgtgcccaaaatattcatgagacagtccaacgagcacttgggataatggtcgaggagcatacataccgtttcgcggaataatttcgtatttttgctgcgtacaaactgtatgattgcctctttgagcgggtaattcatcacgctgtcgagttcctgtccctgaaaataggcgcgccgttcgccgtaggatattttattggaggcgtcttcccagacttcgccgatcacgatcccgttcggatcggcggatttgatcgcgcggcggacatttctgagaaagcgcggcggcaattcgtcggcaacgtccagacggaaacctccgagcccgcgccgcatccaatactcgagaacgccgttttcgcccgtgataaattcgtcgtacgaggaaagttcattcacggcgggcagaatatcgatcccccaccaacattcgtatcggtcgggaaaatgtataaaacggtaccattcggcgtacggagattctttcgactgatacgcgccgatggaaggatagcgtccgtatttgttgaaataaaggctgtcgtctcccgtatgattaaaaacgccgtccagaataatgcggatgccgtgcgccgcggcatcgcggacgagcgcgtcgaaatcttccaaagtacccaaaagcgggtcgatttttttgaaatcgcccgtatcgtagcggtgattggaaaaggcctggaatatcggattgagatagacgacgctgacgccgagttgctgcaaatacggcaatttttcgcggatcccgttgaggttgccgccgaaaaagtcgttgttaagtacctttccgcggctgttcatgcgaaaattcggcgtatccgtccaattcttatgcaatatttttccttcgccgacgggaatatccctgtttttataaaagcggtcgggaaagatctgatacatcacgccgcctttgaaccagtcgggcgtgcggtattcggcggaacaaacggttaactgataggcgcggacggggtcggaaaaggtaagttctcgcaattcgcctaaacccgcgttcctgttcccgatacgaaaataataaaaatacagtcccggttcttccaaggtcagatcgaagcgccacccgtaagaagttggctgcatatcgaaatttcgagcctcgctcccgtccttttgaaggacgaaaagacaaggctcgctgctgtcaccgaatacttttataactgccgtttcgttttgccgaatccctcccgtaatactcttgcattttttgtctaagggattatagtaaatcatagtctttaacttttcagtgatttgaggtgccagatattgtctgcgtattctttgatactgcggtccgcggagaaaattcccgctgccgcgatgttatttaaagacatctttgcccagcgagcaggatcttcggcgtacagagatttgattttctgctgcgtttgccgataggattcataatccgccatgcacatatagggatcggcgacaggcgagcccgtgagcaaatagttcgccatatccgaaaacgattctccgttaaagccgcgtatcagcgtttcgatgatacggcgaagtccttcgtcggtattgtagtagcggctgctgttgtagcctttggtccacaactcgtctacttcctcggcccgcagcccgaaaatgaaaatattgtcggaaccgacagcctcgctcatctcaacgttcgcgccgtcgagcgtgcccacggtcaaagcgccgttgatcataaatttcatgttgcccgtaccgctcgcttcttttcccgcaagcgagatctgttcgctcacttccgatgcgggcatcagccgttccgccatactgacgttataatcttccatataaactacgttcagtttttcgcggatcttcggctgtttgcggatatcttcggcaaggtaacagatgagtttgatgatctttttcgccatcaggtaactcggcgcggccttcgcaccgaagatgaacgtctgcggctgcatctttttattcggatcgtccttcagttcgttatacagcgaaatgatgttcatgacgttgagcaactgccgtttatattcgtgcatacgtttcgcctgcacgtcgaaaactgtgttcggatcgatgagaacgccttcttttttataggcgtaatcggcaaactgtttctttttgaggagtttgatttccgtcagacggtttaaaaccgaagaatcgttttcatatttcctgaattttgaaagttgcgacgcatcctgcacgtaaccttcgccgatgcagtcgttcaacagcgcgcaaagttcgggattggactggcaaagccagcggcggtgtgcgatcccgttggtcacgttggtaaatttatccggccataggcgataaaacccgttgaaaatgctgtccttgatgatttcgctgtggagcgcggaaacgccgttgaccttatgcgacgccacgacgcatagatttgccattctgatcatgccgttggacatgatcgacatattgtcgatgagcgcgtgctgaccgggataaatattccaaagttcggaaacaaaacggcgattgatctccttgataatcatatggatacgcggaaggcgtcttgcgatcagatcttcttgccaggtctccaacgcctccgccatgacggtatggttagtataggcgaacgtggcggtcgtgatcgcccaagcgtcgtcccatgtaaagccgttttcgtccatgaggatacgcatcaattcggggatcgcaagcgcggggtgcgtatcgttgatatggatcgcagccatttcgggcaaaagattcaatggcccgtagcgatgcttgtgatcgttgatgatattttgcagcgatgcggaaacgagaaaatattgttgctttaagcggagggatttaccctcataatgattgtcggcgggatagagaactttggaaatgacctccgcctcgttctcgtcctgcatacagcgcagataatctccctgcgagaaaagtttcatatcgaaacgggaaacgttgcgggctcgccataacctgagaacggagaccgcctcgctgtttttgcccgatatcatcatatcgtaggcgaccgcctcgacttccttgtagccgccgtgggtgactttcagtccctgatccgaccattcttcgtgcacccaaccgtcgaatttgacgatacaggatttgtccgtgcgctgcgtcagccagacttcgccgccgggcagccatacgtcgggcaattcggtctgccagccgtccacgatcttttgtttgaacaaaccgtaatcgtagcgtatggaatagcccatggcgggatagtcgcccgttgcgagcgcatccataaagcacgctgccaggcggccgaggccgccgttgccgagtcccgcgtcgggttcttcttcgtaaagatcctccaacgtgagttcgtaacttttcagcgccttttcgtaggcgtcctgcaaacccagattgtagacgttattttttaaagacctaccgagcaaaaattccatacagagataatagactcgcttgcccttcttattcttcattaccttatggaactgctgccttttttccaggaggatatctctgacgctcatgacgaccgccttatatatctgttctctcgaagcctcctgcggcagaacgccgaaatagcgggaaagttttccctgtatcagcgtacggacttccttttcggtaatacttgtgctgctcatgctttactcctaaatctgtatttcaacatttccccgtctgtgtattttattactgcaacatggagcgatacagtttttcatactcgcccgcgctgcgctgccaactgaaatcactgttcatgacccgttttacgagttcgggccagaactctttattctgataacaagcgatcgcctcgcggataacgtataacatatcatatgcattatagttagcaaaggtaaacccgttgcctccgagcgaaacaggtttgatactgtcgtacaatccgcccgtttctcgcacgacgggcaccgtgccgtaacggcacgcgatcatctgcgacagaccgcaaggctccgacttcgagggcatcaaaaaaaggtctgcacccgcataaattttgcgggaaagatcgggattgaacgcgatcacggtgaccagtttcccgacgtagtttttcgcaaggtcggtaaaaaagttttcgtacatcgaatcgcctttgccgagaatgatgacctgtacgtcctgtctcaggatttcttctatgacggtctttacaaggtccagtcccttatgcgaaacgaggcgggaaattaccgcgacgatcggcgtttccgccttgacgggaagattgaacatcttttgcagttcttccttgcagcgctttttgggttcgggatcttccttggtatagttgcagaaaatagcgggatcggtctcgctgttataagaatcgacgtcgataccgtttaatatacccgtcagtttgaattcgttgcggcgcacgatgggatcgaggccgtgcgcgtagaacggatccttgatctcttcggcgtagcgagggctgaccgtcgaaaatttttcgctgcattcgatagcggctttcatcagattgatgcacttatcgtattctaaaagatagcgccaggaattggaaataccgaacagatcttccaaaatatccagcgaatatttcccttgatattctatattatgaatggtaaacagcgagcggataaactgatattcgggacggaaacaataaatggtcttcagataaaccgccgcgagcgccgcctgccagtcgtggcaatgcagcacgtcgggaaagaacccgagaaacggcatgatctccagaacgctccgcgaaaagaaagcgaaacgctcgccgtcgtcgtaatatccgtagcagccggggcgtttgaaatagtattcgttatcgaggaaatagaaaatcacgccctctttttcataactgaaaatgccgcagtattgatttctccatgcgagcggcacgaaaatattgccgaggtatttcattttgctcctgtattccgtcgcgatgtccgaatacaaaggaatgaccacgcggacgtccagatcgctgtttttggcgagcgctcgggaaagagagccgatcacttccgcaagccctcccgtcgcgatgaacggcgtactttccgacgccacaaaaaggatcttctttttcggcgtaacttcaatctcgggcacagttgcgggcgctgaaatttccgcaaccgtttcgaaatctttcttcttagtctttttcacatccgccgttgtttttttgggcatattcgatacctccttatttttaaatcatcgagcctttgggaatgcaatacggctgcgcttcgcagcccgaaagcacccttctgtcccttatcacgacatttttatcggtgatcacgcagttcaaactgacgttgtccccgatgaggttatcctgcattacaatggaatttttgatcacgctgccctttccgaccttcacgccgcggaacagaatgctgttttccaccgtgccctctacgatacagccgtccgaaatgagcgaatttttgatcttggaattttcgccgtacttggaaggcgccgaatcgcgcactttggtatagatatcccgcgcgccgaacaattcgtcgcgcaagttcttatttaaaagttccatattgtgtttgaaataggaaccgatcgaatcgatgctcgcgtggtagcccttaaaatcgtaagcaaaaattttcaaactcttgaagttgcgcatgagaatatcgcgtcggaaactgttgagcccgcgcgcgacggcgtcaaagatagtattgattaaaaaccgacggttcataatcataatattgacataaaatttatttttgcccgaaagtttcgcgtttattttaatatcgctcacccgtccgtcttggtccgtttttacggcggtatagcgggcagaatcgtctatctcctcgtcgtggcatacgagcgtgatatccgccttcttcttttcgtgatattcgataacgtcgctgaaatccatgcgatatacgccgtcgcagtcgcagagaactacgtattcttcattgcggcggttcagaaatcccatcgcgcctttgagcgcttcgaggcggttgcggtataaaacgtcgttttcctgcgcgccgaaaggcggcagcagaataagcccgcccgtctttctcgccaggtcccagtccttaccgctgccgagatggtccatcagcgactggtagttgcttttcgtgatgatcccgaccgtagtgatcccggagttgaccatattggataacgcgaaatcgatcagccgatatcttccgccgaacggaacggaggccatggtgcggcggcgcgacagttcgggaatattttcgtcgtggatattggaaaaaatgatgccgactgcagacatatcatttacctcccttcaaaacgtttttatctacgatattgccgccagcaaggatcgcgccctcttcaacgacgatattgcggccgagtacggctatcccctttttggaggtccgctcttcgccgatcacggcgccgcgagaaaccgtcacgtcctcgtcgatgatggcgtatgtaacgcgcgcatcttcctcgatgacagtgccgctcatgatcacgctgtccttgacgaacgcgccctttttcacgatcacgttgctcgacagcaaagaattgatgacggtaccctctatttcgcagccgagcgcgatcatcgaatttttaatgatcgcatcttcccccacgtattcgggcggcgcaagcggattgcgcgaatgaattttccagtccgaattggaaacgtcgaaggcggggtcgtcgcccaaaaggtccatgttcgcttcccataaagaagagatcgtgcctacgtccttccaatagccgtcaaaactgtacgccaccatcttttcccctgcggcgagcatggcgggcagaacgtctttcccgaaatctttggaggacgagggattgctgtcgtcctcttccagatagtcgtacagtttctgcgcggtaaagatgtagatccccatggaagccagcgtgcttttcggctgtttgggtttttcttcgaactcgtaaatggtcccgtcttcgcgggtgttcagaatcccgaaacgggaagcctcctgcatggtcacgttgatggctgcgatcgtgcaactcgccacgttttccacgtgcgcgcgcagcattttgctgtaatccattttatagatatgatcgcccgaaagaatgagcacgtattcgggattgtacattttgataaagttgatattctggtaaatggcgttggccgtaccctcataccaggcggatttggattttttctgataaggcgaaagtacgtgcacgcccccgaaggtgcggtcaagatcccacggctgcccgttaccgatatattcgttgaggaccaacggctgatactgggtgagaacgcccaccgtgtcgatccctgaattgatgcagttcgagagcggaaaatcgatgatcctgtactttgccccgaacggcacggcaggttttgcgatgttattcgtcagcgcatacaacctgcttccctgcccccccgcgaggagcatcgcaacacattctttctttctttgcataataaacccccacaaaaatttacgatatgattcaatctacagccgcatttcccgcggtctgcgcccgtttttattccgtcttttgcaaatacaggcaagtcagcgcgggaacgtcgacaagtatggaattttcccgtccgtggctgatctttttcgaagtggcgaacacgcgtttcgaaagcgcgcctgcgccgccgtatttcacgctgtcggtattgaaaacgatcttatatttacctttgggcacgcccagacggtaattttctgccttgacgcccgaaaaatttacgatgaccagatactgttctccgctcttatcgcggcgaagatatgcgatgatattgcggtcggcgtcgtccgcagccatccattcgaacccgtcccacgaatcttctatctcgtaaaatgcgggcgtctgggcgtagaacagattgagttcgcggttcatgagcgcaagtttcgcgtgcatgggatattcttctaagaaaaattccagtccctcgcggtaatcccattctttgaactgcccgaattcgctgcccatgaacagcaattttttgcctgggtgcgacatcatatatcccataaacgcgcgcacgtttgcaaacttttcttcgtaactgcccggcattttgtcaatgagagaacgctttccgtgcaccacttcgtcatgtgaaatgggcaaaacaaagttttccgtaaacgcgtaaaacatggaaaacgtcaacttattgtgattgtaactgcgaaaataaggatcggtctgcatatacgacagtacgtcgttcatccagcccatattccacttaaagttgaaacccagaccgcccacgtccacaggcttggtcacgagcggccatgcggtggattcttccgcgatcatcattgcctgcgggtactccgaaaacacggcggcgttgagtttctgcaaaaacgcgatcgcttccagatttttattctcgccgtagatattcgggacccactcgccgggttttttatcgtaatcgagataaagcatcgatgcgaccgcatctacgcgcagcccgtcgatatgataacggtcgaaataaaacaacgcgttggatatcagaaacgacagaacctcgttgcgcccgtaatcgaatacgcgtgtgccccaactcttatgctccatacgatcccactgcgggcactcgtataaaggcgcgccgtcgaattcgtacaacccgtgcgcgtctttgggaaaatgcgcgggtacccagtccaaaatcacgccgatgccgtttttgtgaagctcgtccacaagtttcataaaatcgtgcggcgtacccaaccgcgatgtgatcgcataataacccgtgacctgatatccccatgaaccgtcgtagggatattcgctcagaggcataaactccacgtgcgtatagcgcatctctttcagatacggaatgagttctgagatcagtttaccgaaatcgaaataattcccgtccccgtactgccgccaggataaggcgttcagttcatatatattcatgggcgacgcatagatattcttttttttcaaagaatccctgtacgccttgtccgaccatttgaaaccgttcagatcgtacactttcgacgccgtcttggaaggcgtttccgcatggaacgcaaagggatcggctttatacagatatcgcccgtcctgcgcgcagatacaatatttgtaaacttcgtaatttttgatatgagggataaaaagttcgaacgtttccccgtccaacagtctggtcattacatgggccgcgggatcccagccgttaaaatctcccacgacggaaacagacttcgcgcgcggcgcccagacgcggaaaacaacgcccttcttgccgtcatctctggcagggtgcgcgccgaaaaactcataagagcgaacgttctttccgttatggaacagaaacaagggaaattcaacttcctgcatagtcacctccatatttctacattttgttgtattccttattcattatacaataaattgtgtgcattttcaatagtataatgaaaataatttgataaattttgacgattatcgatatataaattctaccaaaaaagggcacgaacgctaagcgtccatgccctttttctttgctttttccatcttttcgatttcttttttgatttccgcccgcgtgtatctgaaagcgctcttgccgtagaggttcacgatcttctcgtccagccgagaaagtcccgtcgcaatataatccccctcgcgccctttcaacttacaaaatatttttttgacgaacacaatgtccagagcctcttccttggttccgccgcaatagacgtagcaggaaacgaagatctgtacgtagtcgatggtcacgccgtcgatgcggatattgaaactgtcgtacacgtaatccgcgacggacaaaaatttttccaattcgggtacggtcaatttaaactttgccgcggaatcggcaaaatcaaacatatcgttgagttcgtccgcgtgcataagcaggcatttgcagcgccgcgggacagaaatttttgccctggtccgcatgatactcacgacgacgaaatcttccgcaacctttttcgcgatttccgattcccgctcggaatcgcccaaaatacccaatatccaggtatttttaccgacggcgaccgagccgtccgaaagtttttgcggaagttttccgttatattgccccttcttgacgcgcagaagattgagctgcggattcagtgcgttgcggtacaacgtgttcagtacggcgccgaaatattcgtaaatttccgcggcgcccatgtctgtaaaggatatcagattgacgcgctcgggcatataagccgcctcgtacaatttttccacgaacgacgagcacatgaactgtccctcccgttcgctgtaatagcccaaaacatccgattcgctgtcccattctttctgcacggggataacactttgaacgccgctcagatattccgtaaaaatacggacaaactgcaggggggcttcgccttcgccccgcagaaataccagccgcgacatcgccatacccgaaacgaaagcgcgcaccgaactgatattgtaattgatcgaatatttcgaataagcatactgccgaaatccttccgtcagatctttcaaagacagtacgttgcacgcgggaagtttaacgggcttggcgtccgcgtattttttatcgatctccgtcaacgaaggaaatatcgagcgtttgggagtttccgtttccacctcgtcgaggtcggtcaactcgtcgtccacgggaaaagaaaatttttctttgacgatgcgcgaatgaataaacgcgatcaacgtgcacacgaggaaaaacgccgccgcggcaatgataaaaaacacgaagaaaaaagcgtagatgatggaaagttccaaaaaatcatacggctccattcccaaaaaaaacagacttcctacaaatacgacggtaaatagcaatattatgacaaaatagtagagccgtaaattgaatttccgattttgaatgcggaaatataaccccaacgtgcgggaatacagcatagcgaaaaacaaagcgagcacgtccaagtaagttatgcaaaaacaggcgaaccctttcgccgaaaaatctatgcgctcgatgcccactttctcgataaacctgcttaaaaagttattattgagaaagggactcctcagattattctcgccgtcaatgagcatcagggcggcaacgccgataacagaggcgaaaaacacggtggcggccaataaatttttatacgaacggaatattttcatttcgcatccccttgcgtcataaaacttgttctttcagtttctcaggagtattttcaaaatcccgttctgccaccgcaaacagcatggagtagacgagcgcgggaaaaacgtgaaaaatatggttatccaaaaggctcatcacgctgagcacaaagacgacgaaaaagtagaacagacgctctatgctgaaacgcctgaacatgagcacaactccctgcgccacatgaaaaatataggcgagaataccgacgacgccgcaagaggcgatcatctgtatgatcgtgttatgatacatatcggggaaaaaccagttttcgatattgtaagaccagtcgggcgcgatcggcgtataaaatcctacgccgaatatcggcgctttcaggaaattgagcaagccgtttttccatatctgaaaacgcgacgagtcgtcgaaccccttatcgatataatgttcgaaaagttcgacgagtttgtccgcaaacacgatgcagaaaattatgccgcaagcgatcaatacgatattgaagatacgcaccattttgacgtgccgtccccgaatgctcatcaagatcatgatcgcgacgagcgcgacgccgccgaccaaaagcgaggtacggctcagggtgagagccacgcccaacaaaacgacgaaaccgaacgcataataaaggccgcttttccagcctgcatccgctttgtaagaaagataaaaacaggctggcataaacattgcgagcattccgcccacgttgttgctcagtccccatccgagattgagaatatgtttgttgatggtgccgttttcgatcacaccgtcgaaaatcagcatttcggcgagttggatcagaatgacgccgcaggcaacgatgagaattttcgcgacgtaaatgcccgtttccttgttccattccagcgtattataaaaatagatatagaaaaagacgaaggataccgccaacgcgatccctaacagcaaatcgtaataatgataacctttataaaaaatgccgtttagaacgagcgccgcgccgaaagcgatcgtgccccaaagggcgatcgctttgctcttgaaaatatttttctgtcctttataaacgatcattcggaacacgaacgccgccgcaatgaaagccaataaaacgcccattgtcgccaagacggaggtgcgatacagataatcggagttatacgggtattgcggcgtatgtttctggctcacgctgtaaacgacgagcacgagcggcgcgatcagcggttttgaatctttgctgaaaatcgccgtgaaaacgacgacgatcgccgtcaaaacaaaaaaagccacttccaaccctgtaaacgagcatataagcgccaacgccgcgtagatcaaaggataaagattaccgtcaaaaaaacgcagaatcttctccatgacgggttgtgactgtatcttttgaattttttcgtatatcatgcaaactcctcgaatcgtatccatagaatgaaataccgtatcagtatatagtaatcgcgacgatctgtcaagggaaagcgccgatcacagcactttccgcataggtagcgttttcgcctcgaaggcgcgcgacaatttttggatatttatcataagcaccagtataaaacaatcatcggtctaagtcaagaaatttcactttattgcctgaattgtgcctgaaaacaaaaaaccacaacatatagcgtttttaaagtcttaaaaacatactatatatcgtggttttactgtttggtgtgaagaatgggacttgaacccacacggatttctccatacgcccctcaaacgtacgcgtctgccaattccgccatcctcacaagcagtatttattataccttatccgcagagaaaagtcaagttaaaaataaaagaatttatagtaattataaaattttttaacccgctttacgtattgccttgtttcctgaaaaggaatatccgtcagcgtttcgccgttgtcgctgtatcgggggtcgcaaagccatgcgttcacgcgcccctccccggcattgtaagcagcaaggatttccgaaagcgtggaaaagcgctgcctgagatatacgagatacagaacgcccgtacggatattgctctccgcgtcgtacagatccggagcgtgctctttccctgccagacgagatatataatttgccgtttcgggccgcaactgcatgagcccgatcgcgcccgagcgactcatcgcgtcttcgtcgaaaccgctctcgcaacgaatgacggcatatacgagatcgctatccaaaccgcactcggcagcgtatcgttccacgaactgcgaatattttttcggcaaatataaaaagtagaacgcgagcgccgtactcgccgccaatacgacggcacaggacaaactgatccagacgatccacactcttctatttgttttcgaatttttcaagcacactaccaaccttttcccgcagtttggcgagatctccgtcgttatatagtacagtatgctcaaaaatagatttattttcataatcgaactgattttttattctgcgttcgacttcttcttccgaaagcccgtcccgtacggcgactgcgccgatacgcgcgtttttttcccgcagcacgacgatcacaccgtcgaagtccttttgatagccgccctcaaacagaagcggcacttccgcaaacacaggatcggacaaggctttttccatgcgcgcatataatttgcgcatgatggcgggatgcgtgatcttttccaacgcccgcagacgttctttctcgcgaaagacggcggcggacaattttttacggtcgggcaaaccgtttgtcgcgcagtcgggaaactcgcgcagtatctcacggacaacattcggctcttcatagatctcatgcgcgatcagatcgcaggaaaagacatcgtatccccgctcggcgatgagccgcgcgacggtggattttccgctcccgatcccgcccgtgatcgcgatttttttattttgcctcataccagtttttcccttcgtgcacttccgcgaccaacgggacgcgcagttcggcggcatgctccatttcgtatttcaaaatttccgcgactttctctttttcggaaatcagcgcatcgatgaccagttcgtcgtgcacctgcataatgagtttagagcgcagcccttcccgcttcagacggtcataaatgcggatcatcgccactttgatgatgtcggcgctgctgccttgcaacggcatattcatcgccgcccgctcaccgaacgaacggatattgaaattggccgatttgatctcgttgatcacgcgtttgcgccccaaaatcgtcgtaacatagccgtgttctttggcgaaagcgacgttggtatccatataattcttcacgtcggaatacgtttcgaaatattttttgatatactctcccgcacgtttgggcgaaatgccgagattcttcgccagcccgaaatcgctgataccgtatataatgccgaaattcaccgctttcgcgctccgacgcatatgcgaatcgaccgtttccagcggcacatcgaatacctgcgatgcggtcagggcatggatatcgtcgccgcggttataggcttcgatcagttctttgcaacccgagaaatgcgcgagaaggcgcagttctatctgagaatagtcggcatccagtaaaatatgttcgccgtccgacgcaaggaaaagtttgcggagttcgcgcccctcttcgtcccttacgggaatattctgcaagttcggattggtgctcgacagccttcccgtggaagtctgtatctggttgtaatttgtatggacgcgctgcgttgcagcatgaatgagcggacgaaaaccgtcgatataggtggaaagcaatttctggatccgcctgtaacggagaatatcacggacgatcgcatgctcgtccgccaatttttccaaaatatccgcgctcgtggaatacttgccgcccttgctctttttgggcgaagggatctgcagatcgtcgaataaaactttccccaactgcgcaggcgagttcagattgaatttttcgcctgcctgctcatagatatcttcggtgattttttccgcctcttcacgatactttttctcgaaaaccgcggaagtgcccacgtccactttcacgcccgcaacttccatatcgaacaaaacgtcgctcaaagggagttccacgtcgcggtacagcgagatcaagccgtctttttcgagattcgcgtaaaaaatgtcatgcaacaaaaaaatattctgcgcatgcgtttcgggcggcaagccgtacgattgttcggcaagggacagatcgtcgtccttacccgtatagtcggtcagatatttcaaaatagaaacatcctccgcgcggcaaagaagatctatgccgtattgccgcaagcggtgctgcatattcttctttccgtataaaaataaacggcgttcccgttcgccgcatatgacctttaaaatttctacgatttcggtttcgtccagcccgtcgtccagaagattggcttttatgcgcgcggtatattcgatgcctccgaagtaaaaagcaaaacttacgccgttcgaatagaccgcgatctcgggttcccgcataacgctttcgatgaatgccgcggagtcatgaatgcggacgacctccgctcttttgcattcggatttttccgcggagcagacctccccttcggcaaaaatatccatgcgcatgatagaggaaaattccagacggaaacaaatctctttcgcttcggcgggaaacggcagacaaatcctgcaatcttcgagatctacggaaatatccgcatccgtgtcgatgcgcgcaagcgtttgcgaaagatacgccatctccctgcccgattccagtttgctctgtacggcgggcctgttttccgccgcatgcgcaaaaatattatcgagattatcgtactgctgaata

SEQ ID NO: 3742 - DNA, 22729 bp, Unknown
  16S sequences of unknown bacteria
cggctctgagaaacccgccagtagtggcaagacgggtcacctgataattttccttggtcagtgcgcttgagacagccgggctgtcgtcatttgacatgatggcaagaataagtttcatgatgatcactcctttatcagatatcctgatttcattttagcattcccgtttcacgtttacaatcgaattgtgtgatatcacactttttcctgaatttttccagatttgtcaagccggatgccatatcgcctcattcatgcgctcatcactgcttagacaagcgaacatctgcaggacgtacaacatgtctttctgcatccatcccataaaaaatgcggccggatatgctataatagtcacgtttgcaaggaagtgagcaagatgaagaccggactggtattagaaggaggaggcatgcgcggcgcctatacctgcggcgtgctggatgctttcctcgaccatgatatcgaagtagacggcctgatcggcgtatcggcaggcatctgtcacggatgcagctatgtatcgaagcagcgcggacgcgctttccgcgtcatgagcgactatctgcgcgatccgcgctacatgagcatgcgttccctgatccaaacaggtgatctgttcaacgcggaatttgtctaccatacgctgccggagatcctggaccgctatgattttcagacattcaaccgttcgcatacccggctgtatgccgtctgttccaatctggaaagcggtgaggcagaatacatccgcctgatccatatggaacaggatgtggaatatgtccgggcgagcgcgtcgctgccgctgctgagccgcatcgtcgaactggatggcaagaagctgctggacggtggtgtctgcgacagcatccccatccgcaagtttcagtcgatgggatatgcgcgcaatatcgtggtcctgacacagtatgggggatatcgcaagcagaagagcgcatcgctgccgctgatccgcgcccgctatcatgcttatccccgattcgtggaaaagatggaagaccgtcatcttcgatacaatgacacgctggatctgctgaatgaagaggagaaaaaaggaaatgtcctcatcatccggccgaagaagccggtgaagatctctcggctggagaagaatgtcgaaaagcttcaggcgctttatgatgaagggtatgcggacacggccggcatgatccaggacatccgtgccttcctggccggataagcgaaaaagcggattcattccgtttttttctgccaaaagaaatgaggaacgagaatcatgaaacctgaacaattgctgaagatcagcgcgctggccgggaagatcctgctggagaacggcgcagagatccaacgcaccgaagataccatctgccgcatctgcgaggcctacggcatggaagaggccagcgcctttgtcatcccgaccgggatgttcctttccttttccgcggaaggaaagacgtattcccgcatcatgcgcatacgcggcagctcgctcaatctggagcgcatcaaccgggtcaatgacatctcacggcgctgtgtccgacagccgatgccctgcgaggagatcatggcagagctgatgcaggtccgggaggtgcgtaactatcggccgatgaccgtcacgctggccggcgggttcatcgccatgtgctttactccgttcttcggcggttctctgtcagatgcgctggctgctttcccgatcggcatggcgacgcagtttctggtgcagaaatgcgaacagctgcaaatcaatttcatcgtgcgcatcatctccacgagcgtcatcctgaccagcgcggcgctctttctgcatcagctgggcatcatccgcaacacggacagcgtcatcatcggctcgctcatgctgctggtgccggggctggccatcaccaacgcggtccgcgattccatcggcggcgatctgcttgccggcatcatccgcgcgatcgaagcgtgcctgatcgcggtcgccatcgccctgggcgcaggcgtcaccatgagcatctggctctcggtgagcggaggtgcgtgatatggcggtaaggatcatctgcgcactgctcgccacggtcttcatcgccgtcctctttcaggtgcgcaaggaaaacatcttcgctgcggccatcggcggcggactgggatgcctggtcaacgaatgcggcctggcgcttggtctgggcacattcttctctatcttcctcgcctcgctcgccctggcatcctacagtgagatcatggcgcgtgtcaggaaaacgaccgtaacgaccttcctgatcagcggtctgttcccgctcgtgcccggcgcaggcatgtattatacgatgcttgccatcgtccacaacgatctgagcgaggcgctcagcaccggcatctccacgctgagcacagcggcagtgatggcattggggatcttgtttgtctccacgctgtcccgcggcatcacttatttccgaaagaccaaaagcaccggcagatgaccgatgcttttttgatggtcagaggtgaaacaaaggctgtcagccatgccgatggtgcggcatggatgcgcacacatgcaacaggcagcccctatgggactgcctgatcagatcatcttgaatgctttctgcgctgtaagacagcggcgcccatgccgcctgccagcatgcacatcagtgatcctgcgtctgccgcagcggcggtatccggggaatccccgcgctcaggttcttccgtatcaggatcctgcggatcattcggtccgctttccccctcgtccgctctttccaccgtcagggtgaagctgatcgtctctgcttctgtgcgcgtttttggcgttccggtgatctccaccgttccatagccgtgatataccacataccatacgccggcatcgtcttgttctacgctgacgatggcatcatcgctgctgtgccaggtataatcagaaacgctccacagcgcatccgcaggcttcaggaaatccatcagttcctgacgagtgcccaggtctgccttgatcaccacatcttctgccacgatatcgcccggctgagcatctgcgcggccgacaacgacacggatcggcagcttggtctcgccgtgtacggcatagaccgtcgtctctccgcactgtgcgcctgaacggacgatccagctgatgccgttcttctgcacatacgcaatgtcttcctcttcgctctcaaatgtgagacccagcgtctgcgcgatatctgcaccctgatatgtatatgccagctctgcgaacgtatgctcttcatacgcggaaggatcttcggtcgccttcagatatacgctctgcgggaagctgaacagcttcagataagcctcatcttctgccggattgccttccagcgatactctccacagacgtccgccctctccatacagcgaggagaagtccgtgatctggttatcggagaggtcgatgaataccagcccgcttgtcatcagatcctggatcgggctgaaatcgctgatctcatttcctgagaaatcaaaggacgcatcggcgctcggcttggcaaactgcatgccttccaggctcgtgatgcccatatcagaagcatccaggacatacagatgctgcatctcttccttggtcacgatgccatcctggttttcatccacttccgcggcgaccagacgctgcagggtctcgtccgcaaaagggacgatctcttcatccgggatcgtcgtcggctcctgtacggtgatcgtcaattcgatcactctgtcctgctcgacatactgccccggcgtaccggtgatggtcgtcgttccatagccgttgatccctactctccggtcagggatccagaatgagttggggccttcatagacctcggcgacggcaggatcgctgctgctccactcatatccctgtacggtccacagcgcttcatccggtccgatcaggttcatgaggttttccactgttctcggttctgcttccagcaccatatcctgagcgatgacatcatcagcgctcagatcagcggaaccgatgtggaccgtgacctctttgcgcacaccctcgtgctcggcatacaggctcgtatccccggtcttctccatcgcatagacgccgacataatcaccggcaatgcccatgtacagcatattgtcatctgccgggatgtagtcgatgccatgggtctcatcgatatttccatccccgccgaaatgatacaggatagccagatggcagccgctatatccgctgccttttgtgcccagaaagatctcatccggcgtgccccagagggtgaaatagtgatcggccggcgctgggtttcctgcgatggccagcccgttcagccgattcatcgacatgccaaacagcgcggaaaaatcgctgatctggttgttgcgcaggtcgatggtctggaaaaacgcatccggatgggcggcatacaattcagcgatcggcgtcagatccgtgatcgcattgtcggaaaaatcgaatatgctgtttccggcttcatggcctgcatactggatgccctccaggctggtgatccccatgcctgatgcgttcaatccgtgtagatggctcatctcttccttggtcagcacaccatcttcattggcgtcgatcttgtagccgaactgttccgtattcaggatcagctcttccagctttggatcctcaaaatggacgatatccgccgcgttttcgcttgatcctccatgagtgcttgtttccatctcctcaagctcctgtgcgcagattgtctgtggtacagctgctgcgcacatgcccagcgcgcataccgctgcgatcaatttcttcatcaataccccttctttcttgtctctccttcactttatcactgcgctttgcatttctccatatgtgcgcctcgttgtgcgccgcaatcgagttcttagcctttttattatttaaatcaatatatgcgcctgattgtgcagcattatgattttatgaaaagcaatgcgcataattgccagcacagtgcaaagcatatataatgtcttcacctgaaatgatctgaaaggaagggcttttgcatgtctagattcagcgaacaatgcaaggaacttatccgggaaaatggaaccaatgtctatcggatgtctaaagagttttccctggaagtcaccgcgctacagcggatggtcaccggaaaacggctgccaaatatagattttgtcaaaaaattctgtgaatgcctgcgcatcccagaaaccgaaaaaaagcacgctgcttgaattatataagatcgaacaagtaggtgaaaacacctattacagtcgcaaatgcatcaagcagctgttcaaccgtctgtacggcctggaacatgaagaggaaccgttcagagaaaaccatgaggaccctgcaccctccttctcgatccatacgcacatgagcctcggggtcgagaccgcattgctggcgatcctggaacattgcttctgcagtgaaaaagaggaacagatttatacgaacttcccggccggagacagcagcttgtttcattatctgaacatcttgcggatgcgtcatggcaataatgtatcgatctcacacctcatcaatttccggatcgacagctttcacagtctcagcaatctgaacgccttgctgcagatcctgccgttcaccatgtcatccaatatccgatatacgccttattttgtctacagccgtgccgggcacaccgattttcaaagtcagctgtttccgtattatctgatcacagatgattctgtcttgctttgttcaggtgatttcagcaagcatatcgtgctgaaagatcatgaggcggtctttgcatatgccaatgcgttcgatcacgctttgaagcaagcacacttgctcatccgcagcagcagtgatccaatagatgcctggcagcactatcaggaaatcgtcgcctctaaagacatggaagtcttcggcatcgagccgcagatctgttacaccggcctcatggaccacgaaaccttcatgtgtttccaggctgaaatggtcccaggactttctcccatcttttctgaatttacgcagaagctctgggatcagaataaggtattttatttcacgcaggatggcatggatctgttctgtgagacaggacagtttaccggacaggtcactgcgcttttgccgccggtccaaagagaaaatgtcatcgccatgcttgagcactatctctccagcgaacaaggccagcatggttatttattgaagaaccgcatccgctttcctctgcacatcaactttgagatcaatggcaatcatcacttgaacatcattcagatcacgccggacgggcagtttaacatgttgacgatctgtgaatcctcggtctgtgaggcgttccgtgattttgcgctttcgctgcaggaggatgaagatgtctgctcagtagcagagacccggcagtttatccaggaaaagatcgacatgctgaaaaaagcagggaaatgactccctgctttgcttatcggctgtgaccaagcgcgatcttcatcttcatccgcagttccctgctcatatgcagacgcagacaaacgatgcacgtcataaacaaaaaaccaagactgatgccgcatacaccgaaacgaagaaacatcgtgaacgcgctgcacagaaaagtgaccagggttcgctgaaaatttggtgtgatgacgacgatcaaggaaaacagcaggaaaaagcctgccagtatcgcaaacggacgccagaatgggaacaagccaagcaggcagccaaacgtgacggcgatcccctttcctccgcggaaatgatggaacaacggaaaggcatgtcccatgaccggcgccgcaagcacaagggccgaaggcatgaataagagcgtttccccatattcctgcatgaacagaaataccggcaaaaagcccttcagcagatcgccgcacaaggtgagcatcccgcaggagaacccgccgtaacggaaggcgttggccgtgcctggattcccgtcttcgctctccaggtattctttatcccgatgaaacagcgccgcggcgaccctggcaaacaagatgctgccgcacagatagccaaacagcgtgtaagtcagtatggcattcatcttctccctcctccttcaatgcaaaaagtgactgtatccttctgaggaatgcagtcactcgatgttcagacgttaaagcggaaatgcagcacatctccgtcctgcactacataatccttgccttccagacgaagcttgccggcctctttcacggcatgctcactgcccagacgatcgatgtcttcaaaggcatacgtttccgcgcggatgaaccctttctgaaaatcagtatggatgacaccggcacattcgggcgctttcatgccttgtctgaaggtccaagcacgacactcatcttctccggccgtcaggaaggtccgcagattcaagatgctgtacgcagtcttgatgatctgatccaggccgctttccgcaatgcccagctccttcaggaattctgctttctcttctttatccagaccgctgagttcctcttcgatctttgcgcataccggcacaacgtgactgttttctgctgcggcaaacgccttgactttctgatacagcgggttgctttccggatccatgatgtcttcatcgctcatgttggccacatagatgaccggtttgagcgtcaatagcgaaaatgccttgacgattgccagttcatccttgtccagctctacgcttctagccggcttttccgcttccagcgcatccttgatcttcttgagcacggcgacctccgccatggcatctttatctttgttggtctgggctttgcgttccactttggccagacggttttccgcggtctgcagatccgccatgatcagttccagattgatgatctcgatatcacggatcggatcgacactgccttccacatgtgtgatatccggatcttcaaagcagcgcaccacatgacagatggcatcggtaagacgaatgttggacaaaaactgattgcccagtccttcgcctttgcttgcgcctttgaccagcccagcgatatcggtaaactcaaaagtcgtatatatggtcttcttcgggtgaaacagctctgccagccggtcgatcctggcatccggcacttccaccacgccgacattgggctgaatggtcgcaaacggataattggcagcttccacctgactcttggtgatcgcgttgaacagcgtcgacttgcctacgttgggcaggcccacgattcccgcagttaatggcataaacatcatcctctcgcttttattagtttaccttttttgtgaatccattgcaatggctatcaccgatttctctgccgcaagactagcaaaaggcaccggatcaccggtgccttcttgttgttgatgtgtgctcagatcatgcttcagcgcgatctcttctgcgcttcagcaccagtgctgcgcctgcgcccagaacgagcagggctgccaggccgccagctgctgctgtggctgctgtcgtgctgcctgccgactgtgccggcttctgcgtcacttcagcgtcttccttcggctcctgtgatgccggtgcttccaccagcgcgtctgctttcgcattcagtgcttccactgctgcgttcacatcagcctgtgtcgcttccggatcattgtagagtctcagcgcgttgttgtatgcgccatagaatgctgtccatgtctcaggcgtgtaatcattctcgctgtatccgctgtatgctgccagtgcttcatagagcgcttccttgtctgcgagcgttctcgcattcaggcgtgcctctctcagcattgctgttgctgtgtcaacggcagactgtgtttctgccgtctgcagcacgagcttcgcttcttccagcttgttctccagaccttctacgctgcttggaacgtagtcgtcgaggttggcgatcatctccgtaacgagttcgatctcatgctcgagcgcgctcgtatccagcgtgatctcttccaggttggcgattgccgtcgccagattggtgatcgcggtcgttacttctgtcgtcgtcgcgtcatcatctgccgctgtgccctttgccgcttcgatcgctgcctgcaatgcctcatagcttacttcgctgtagccatctgccgcgatcgcttccgctgcttcgatcagcgcattcagctcggcctttgatacgatctgccacagctcctgcgctttttcggtcaaattacggatcgcgctgcggatctcatcatccgtggctttcgcgttgttgtagacctgatatgcctgagcgatcgcggtctccagctcctgtaccttgcccggacgcacgttgtccagattcggcaggatgttctcctcgatgtaatcgatcgtcgccagcaggtcttctttcagcttgtcgctgctttcatccgtgttcaggtctgccatcgcttcgctcagatcgagcatcgcgctgacgactgcggtagaggatgcattggccggatcatcgagcagtgcctgtgcattggcgatcagctctgccagagaatcttcctgcagggcgttcgccttgtcgaccacattctgcaatgcgtcgatggccgcttcgctcgccttgatctgcaatgcgcttactgcgctgttcagcgcgtttgcggcattgttgatctcgctctggcttgcggtcgcattgtccgcaactgtctgtgcggcagtcagggcatcctgcagcgcctgccagctgttggccgtatagtcttcgccatccagcgcttctaccgctgcgattgcttcgttcaacgcggtcttatccgtttcaccgctgatgccttcaacatttcttgcgatgatctcatagatgctcggcgcaactccatcgtaaacgatcttgatctcaaagatgttctcatgctctgtgttgtagaagacattgagacttgcgtccatcgtacccagcgtgatccattcatcagcgcctacacgcgccatgacggtagcgttggagatattgctgctctggatgatcgtcagatagttgatattcgtgttttcgctcagcttataggtgatctcgccgctgtcggtcggtgccgtgaacgcagtcgtgtaatccccatcggtcagatagtagaaatcttcaccgcttccggtgtatccggtcgcgctgtaagtcgggtcattgaccgtcttcacgacttcaccatcattgatcacaaactcattgatggcaatgaaacgatgatcataatctgcggtaaacaggattcggatataatttgcttcaactgcttcatccagttcgccctcaaagtaataattacccgggttcacggaatcatgcgtccagccgtctgttgcctggctgtcatggttttcattttctacgccatcgccgatctcagcaacgtcgacccatttttcgccatcggcagaaacctggatcttgccatcacgcagatagttcagctcaccatcggtgttgtacatgcggatcttagagatgcttctcgtctgacccagcttatatgtgatgtaaccgccttcctgcggataatcctggaaacgcgttaccgtgtcaagctcaccatcaaacgcattgagcagcgtgccggtgcggcgggaatcatttgcgccatacgcagaattgatgcccatcgtcgtctcgacaaattcgttttcctcgacctctaccgagttgaccgtaaaggtgttcagatcgaaggtcactgcgctgtccgtgttgttgatcagtcggatataacgcacattgccataatctgtaccagttctccattcgacctggttctcagcgaactgcagcgtcagagcgtcagtcgtcacatcgacatcgatgctttcgatctccttgatgcgctccagctggatacctacgtattcgcccggctgcagcgtgatgccctctgttgcttccagagaagtagaagacagggtatggtcattgccgatcgtcgtgcacgcatcactgttagtgtacgtataatctgtggtcttatagttcgcgtcggtcatgctcatttcagagaagcggatccatttcgcgacatgctggtcattgaccagacgcacatagcgcgcttccacaccgccgagatcttcttcgatgatatcctgtccgcttgatgcgccggtgtagcttgcgacagtcgtccaggactgaccgtcaacagaatattccatatggtagcttgtccatttatctacgctgccgcttgcgcccacaacgaaacgaacggtgccgacattgacgacagaaccagcatccataccgaagtattcaccagcgttgctgtaatcgccgccgctgatatttcctggattataccagacataagtactgtcattgccgtcagtcaggctggaatcattaccactgtaaatattccaagcggaacgatacggcgttaccgcgatctgtccgccgctcggcgtatcgctgctcgtattgttgcggtcattgatattgatctcacgcacgctcagccaagtattcgatctgacacccgtggcgatcaggcggatacctcttgcttcgatgtccagaccatccatgctgatctcggaacggttgtcggtatattcactgccttcgatatcgatccattcagaaccatttaccgtgtactgcagctttgcggaagtgaacgtatcatgcaggttggtgttgcccatcttgaattcgatggaatttaccgtgatggcacggttgtacatcacaccgacatattcgccgacagcgatgctgttcgggctggaatatgtgatataagtggaatcactgccatcaaatacgttttcttcatcaccgcccggattgtcgctgcggttggtgatataacgctgtacgatcgccgtcggatccacgatgccggatactttagatgcgagatccgccatcatgtcttctacgaacggaacgatgtgctgtacgccaaattccgcatattcagtatgatccacataccagaatccatatgtcttggagttttcgaaacttgtctgcgcgttggagtaatatgtccatacatccgcattgtttccttcctcatatgcgatataaccatgcagcagggcgatagcggcatctgccgtatccttcgcgctgttgatccagtactggatctgatcatatgtacgcgcattgccatgagatgtctcataggtcactgcagcatccttgatgatctggaattcatcgatcagcgcttccgcatccgcgatcgcgctcgttccagcttctactttctccaggaacgcatccagcttcggtgccaattctaccgattcctgcagcgctgtaacacgcgtatccatgttctggttgatcatatgcttgctcagctcacgcagcgcgttagaagccgcgctctcttcgccattcaggtgatctacataagagaaagcgtcattccatacttcgttggctttctcctcgctctcccacatgttccatgcgaactccgcattaccgaagatcgcaaccttggaaggctcggactgctgcatcgggttcagcacgatgccctgataagtgcccggctcgacatccgtgtgcaggaaggtcgtatagccgcccatgatcaggtggttcttgctgttgtcggtgcaaggccagttcgtccacatgtacgtcggacgtcctacctgctcagtgaagtttgcaccatagtcgcgggcaacctcgccccagatcttgccgccggtcgccatgaccttgacgttttccggcagtacggaatacttggacagggtagacggagcggaataatactcagacgggcagtacagcaggtctgtcttcagcccttcgtactctgcctgcttgctttccagccattcggtgagatcggtgagcaggcgattggtgttttccaccggtacgccggctgcatcatcggcgagcacgccgaactgacgtaggcccgcatccagcagctgctggaacttcgcttcgatcacggccaggtcgttctcatagttgttaaagttgaacgcgctgtacatgaacgggtggatggaccacacatagcggcacttcgtctcgtttccgactcttgccagctcggcgatctcggccagttcttcatccgggtacagcgtgcgccactgactgttgtgatacggatcatccttcggcgcgaagatgtactggttcatcttgaattccccgccgaacttcatcagttctgcacggtcttcattggaccacgggtttccatagtatccttcgatgaatccgcggaatgcgacgtctgaatagtcattgatcttcagatcacggacgatgccgttctctacctgttgtgcgatctgcttcagactcgtcatgccatagaatgcagcgtctgtatcctttcccaggacagcgatcacgttgtcgtctacggaaaggatataagaatcagacttagtgaacaatgtctcatcatcgatcagctgattctcttcgaagtactggtcaacaacaccatcagagccatagacgccgaccaggacattggtcgttccatcctgcagggcatcggcttcttccaccgacgtgatgcccagctgctccagcgcttcgttcgtccgattcaccgtatactcgtcgatggcatcttccgcaatgagcactgcggaatcagacagatcagattgactgtcgccatagaccatttcatgcggtgtcggatagatcttgtactcggtctgctcaccggctgcctcaacgacgactggcaggttgagcatggatatgcccatggccgccgcaaggatgccaaatgagaaccggcgcagaaatttcttcattgattctcctcctttttcgtgagagcgttcaagaaacggtctgaacaggtgcatagcgttttcagaaacccctcacattcactatcatagtatcgcattttccacgacaattctatcaatattttccatattcaggataatcgcatgatctttccgatgacctgcctatccgaacagaaaaaagaagccgaatcgcttcagcttctcagttctgatgtttctttgatttctcccgtgcacagataagacacatcttcacagatgttgcggatgccgcaaagcatctgccgaatgctttcggtcagctgcggccatgcgctctctgcattcgtcatctgggtaaactcgctgatgatgttctcggtcatcgcgacacgctggaccgcagtcttcatatcatccaacgaatttcgcccatacatcccgatgaccacccgcagcgtcaggatcaaagagcgctccaattcttccacatagatgcgcagatcttcatcctcacagctgtctgcgaattcggccgcagcccgggcactgcctctcatgtgaagcagttcgaacgagatatgagaagagacgagcagccggcgcagcgtagcaggcactggctgtaccagcggcatgagctccatgacctgatgattgatcatctcgaccatgcggctgatgcgctgctccttcttcatcaccttatatacggtctggtaatctctgcgttccagcatctgaatgcagatctcatgctggctgcataatgtctcgcacatcgacatgacgctgttggtcagccgttcagttcgaatctccagattcaatgccatccctccttgccggacagccggatctttcatgattatccgaaatcgtaatgctgacccttcatcatgtaaaggatatgctcacagatattcttcacatgatctccggcacgttcgatgttgcgcagcatggcgctgatctcaaacagctcgtccaaaagctgctccttatcgacaccattctggctcagcagcttttcccggatgtctttcatctgctgattgatgcgatgatcgctttccggaatggcaaaagccgcctcttcatcctgatccaccatgcactgcatggctttttccagcatgccgatgagatccttttccatagagatcgcgtaatcacatacgatatctgtcagatgatcattcttgatcaggaacttagagatgttcttcgcatagtcaccgatgcgctccagctcactggcgatcttgatggctgcgatgaccttgcgcagatcgctggctaccggcgccagcagcgccagtgattcgatggccaggtcattgatctcttcttccatgtgattgatgcggtcatctgcggagatgatctccaattctctttctttatttggctccgccagcacctcacacacacattcgtgcatgccgacgacgcggttgcccatctttacgagcgtctgctccatctgcgaaagctttccgtcaattctaatcatagtatactgcctcctgtttatccgaatcttccggtgatgtaatcttccgtgcgcttatccttcggattctggaagatcacgcttgtcttgtcaaattccaccatttctcccagcaggaagaatgcggtatagtcgctgacacgggcagcctgctgcatgttatgcgtaacgatgacgatcgtatagtctttcttcagctcgatggccagctcttcgatcttattggtggagatcgggtccagcgcagaggtcggctcatccatcaggatgacttccggttccatagcgatcgcgcgggcgatgcacagacgctgctgctgaccgccagaaagaccataagcgctgtccttgagacgatccttgacctcatcccacagcgcagcgcgctgcaatgactgctcgacgatctgagagagcaccttcttatccttgatgccttggcagcgcggtccatacgcgatgttatcaaagatcgacatcgggaatggatttggtttctggaacaccatgcctacacgggtacgcagatctacgacattcatatcgccattgtacatgtctttgccttcgatcaggatctcaccttccacgcggcagccatcgatcagatcgttcatgcggttcaggcatctcagaaacgtggactttccgcagccggacggcccgatcagcgcagtgatcgcgtttttctcaattttcatgttcagatccatcagcgcctgcttttcaccatagaacagattcagatggtttacctcaaaaataatgttctccattatgctacctcctaataccaagccttagagaatctcttgctgatgaccttaacggcaaagttcagaatcagcacaaagaccagaatgatgatggaaatggcgcaggccagctcatagttcggctgctcgccgctcatgatgctccagatctgcacagccagcgatgtaccctggctcagcagcgtcggagagtcattgatgaaggtgcccatcgtatagatcagggcggcggattcaccgatgacacgtccgatgcccagcagcacaccggtcaggatgccaggcaccgcgcaaggcaggacgatcttaaagatcgtctgcgactgattcgcgcctactgagagtgaagcgtcacgcagatgctgcggaacgaccagcaatgcctcctcagtggagcggatgatggtcggcagcaagatgatggccatcgtcagaccacccagcaagatactggtggtcgtggcgccgaacacctgggtcaccgggaacagcaccgtgacgcccatcaggccaaaaacgatgctcggcacaccggtcaatgtttcgataccgctgcgcagcagcatattgaatttgctctttttcgcatattcattgagatagacggcgctcgctatgccgatcggcagggcgatcaccatggataccagcaacagatataccgtggagatgatcgagccgcggataccgccgccagtcgtctgaatatacatggagtctaccgtggccgcattatcatccagcgtctgtgccagctgttccgcagtctgtcccatgatgccgccgccaagtccgacattgccttgcgcatcatgatattgaagcctggatacctgcatgcctacctgcaacgtaaagtcctgtgggttattacgcacgctcacattgctcaacgcgtacagcggggagttctcatctatatattctaccagaatcatctcatctttgtgtgcatcaacatgatcgacgaaagcaattccccatttttcggaaaaataagcttcttcgctcagatcagccggacgctcaaacgtctgtccgtcgctctgtgagatggtttccaccgtataattctctgaccaatagttgttcatgatcagatccatattgatggaagaccagcctctggtaaagataaacacaaacaaggcgaccagtacgatgaccgatatgccgctggaaagatatgtaacgccctgaagcgcgccatcataaaacttacgctttccgtgatttcccgctttgatcttcatgacatattacccactttcttcttggccaggttcaacaggaagttagacaccaggatcacgaccatcagcaccagaccgacggagaaacggatatcataatccagtccggtcgtctccttcaatccagagagcatcgtgcttgtcaacgttcgcgtgatgtcaaacaaatcgaatgtcggtccgaacatcttgtttccggcaaccatcgctacggcggtcgcttcaccaaacgcacggccgatgcccaggatcgcaccggcaaagataccggatttagcagcgatcaagacgaccttgaagttcgtctgggtctttgttgcgcctaacgccagactgccctcttccaaagcgcggtccaccgaactgatggccgtgatgctcatggaagtgatcgtcgggaagatcatgatggccagcagcaagatgacagcgagcagcgagtttccgcctgcggtcgtcatgccaaatgcgccagccagcgccacgaccatcgtcgtgatagcaccggcagcgaagacaccgtagacgaccgacggaatgctcgcgagcatttccacgatggcggtcatgatcttagcaagccatttaggagcgatcttgacgatgaacagtgcagtcagcacactgatcgggaaggaaatgatcaatgcgccgaatgaagtgatcagcgtattgatgatgatgaatccagcgccatagattccctgatcctgacgccaggtcgtgccaaacaaaaagtcaatgaaattcacttggccgtttgcgtatcctggcaaaaacggctgaacgccgcgcaggaagacaaacagcacgatcacagcgatcgcaccgcctgaaatgacggcagcgatacggaaaatgccctttaagatcgcgtccttgcgcatcttctgttggttcttttctttactgatatgcggtcttactaatttttccatatattcaccctatctcatattcccagaaaaaccttagcaggctctgctaaggtttttgcatatctcagaagctcgtttgattactgcagatcgccccaggcagtgatctcaccactgaagattcccttgatctgctctgccgtcagatccgttacaccgaaggtgttgtctgcgctgatgacagcgactaccgcatcgatgcagtactgaccgctttccattccctgagttatatcttcttccccttcgaactcacgagaagcgaagccgatatctgcagcgtttgcgccatctttctcttcaccgagaacacgcttgtatccatcaccggaacctgtctggttcatcgtgaactggaagttgcctgccatgctctggaaagactccagcgcagcctgcagcgtgtctgttacagaagtagaacctgcggtgcggatcgtcagatcagagttgtcttcatttacgatcgggtgatttgctttcagctcttcccaaggcgtagactttgtcgtatcgacgattccgccggcatctgctaccacctgcatgccttcagtagagttgcacagataatcgatgaatgctgcaaccagctgttcagtacggtcatccgcgaaatctccgcttgctctagtgacataagagaacggacgctgcatgccgtatgtgccatccagcacagtctcttcgctcggtgctacgccttcatagttcagtgcagtcaggttgtttgcctcaaaatcagtagagagggaaacatatccgattccgttaggatcagcgccgactttagtcgccatatcgccgttgctgtcaactgtaacggctgcgtcagtcagcatttcctccatatcatttgccttttcgaatgcttctctggttccgctggatgcgtcacgagagtaaactgtgatcgaatcgttgccagtcgatgaaccgcatcctgccagggtcagacccatcacacatgcaattccgaaagccattgcttttttcatgaacttcatttgttcattcctcctttgagttttcctctttgctttacgtctatcattatacgagcgttttatcagatcatcttcaaaggaatgttaattgtttttaaagttatatcaaatctatgtaaaattgtgaattgattcacattttgccgaccatacctgaaagactcttccttattattatctgtcttgcttcctttatactcacatcagacattttcttctttttgtctgaatcgtcacattcccccatgaatcacgccgtgaaatcaagtaaaatatgatatatgcagctttttggtcgtcgctcatgcttgtcaaagaaaaggagagacttttgcgacacacgtgctgaccatctgtttcacaaagctgcctgcattgtgtaaaaatgtcaaatttcctagatccggttgacgcgcaaaccggacaagtgtatcatgaatcaatcttttcgacgcacacatatcatgtcatccgcatctgcgctgatgactgccatggctgaagccctcttctttgcataatgccgtatcacgcgtgaaacagataaacagaaaaggaggcatgtccactcatgatgaaagaacaattaaaagagaaaaccaaggaatcccttgccagcgttctgccgatcaccgtcatcgtctttctgctgagcgcgacggtcgtcccaatggaaactgggaccctgctgctgtttctgatcggggccatgctgctcatcgtcggaatgggcatctttcagcttggcgccgaactggcaatgaccccacttggccagagcatcggcagccggatgatcaagggaaataaattgtgggcgaccgtgctcatttgctttttcatgggcgcgatcatcacgattgccgaaccggatctgcaagtgctggcaaatcaggtcgcttccatccccaacaatgtactgatctataccgtggcaggcggggtcggcatcttcctggtcatcgcgttcctgcgcatcctctatcggatcagcctgtcccagacacttgctgtgctgtatatcctgctgttcctcctctccttctttgcccctgatgaattcaccgcagtggcattcgattccggcggcgtgacgaccgggccgatgaccgtcccattcatcatggcacttggcatcgggctatccgcatcgcgcggcagcaaggaaggctcagacgacagcttcggtctcgtcgcgctgtgcagcatcggccccatcatcatggtgctgctgctgggcatcttttacaatccgaccgacgctgtctataacgccgctgagctcacccatattcagtatactcgtgacgcgatgcagcagttcatcatcgtcttgccgcaatataccgaagaagtgctcatcagcatcctgccggtcatggccgtctttatccttttccagctcttcacccgcgcttaccgcagacatcagcttctgcgcatgagcatgggcttcgtttacaccatcatcggcctgatccttttcctgaccggggtcaatgtcggctttgccccggtaggcaatctgctgggcagcagcctgggtaccggagagctgaagtggaccctcatcccgatcggcatcctcgtcggatatttcatcgtcaaggctgaaccagccgtacaggtgctcaacaatcaagtagaggacatcaccggcggcacgatctctcatggcatgatgaacagcgcgctgtccatcggtgtcgccgcggccgtcgcgctggccatggtccgcgtactgaccggactcaacatctactggatcctgattcccggctatgccgcagcgctcatcctgagccgatttgtcccacagatcttcgtcggtatcgcctatgactccggcggcgtggccagcgggccaatgacctcaaccttcctgctgccgctcgccatgggcgcctgcaccggcgtcggcggcaatgtcgtgactgacgcgttcggcgtggtcgcgctggttgccctttccccattgatcaccattcagatcatgggactgatctatgtacacaagtccgcgaaagcgccgcagaacaaacaggtacttccggatgatatcatcgaatttgaggaggatgaatgactatgcctgatgaaacacagcacagaccgcgtatcctgatatccatcacgagcacccagagcgaaaagctgttgaaaaagtgttttgatgcgctgcggatccctattttctatcagtgccgggcgcaggggaccgcaccttctgagatcctggatatcctaggcatgcgggaaagcgcccgcctgatcaccgtcagcttcctgccgcgtttcagcgtccctgccgtcttcgaagcaatggaaaacgagctgtcggtcaagcgccgaggcggcggcatcgtattcacggtgcctgtcacaggcatccagacaccgatcttctccatgctcaatgaagaagcaaaggaaaaaatcgagaaacggatagaaggagatgaagccaaaatgaaagatacgaacaaatacaccctgatctggatctccgtgacagccggatacggagatgacgtcgtagagaccgcgcgtgagatcggcgtcggcggaagcacgatgctgaaaggcaagcgctgcggaagtgaatatgctgccgaatatctgggcatcaccctgcaggcagaacaagattttgtcctgatcgtcatcccgaaagaaaagaaagctgacatcatgcgcacgatcggtgaacgatacgggctcaacaccgatgcccatggccttgtcatcgccatgccgatcgatgacatcatcggccttcgcccggaacaataaagaccaaaaatggctgtatctgcacagccatttttgttttcctcattccttgctcttcagttcatcggccagcttcaagatcagcggcgcgatcttctttcgttcttttttggtgatgcgctcatacagcggataggccagcgcgatcatcacgatgccgatcacaccgatgatgataccgggcacgaaccagcgcccggcccactccatcgtacagcacatgccgattcccagcaatagacagccgatcacgccgatgatgatggaaatgatcgtgcctttgcgagaaacacgcttgtccatctgccgcagctgctccatcttgtcttcttccttaggcagatatttccggcggatcgcttcgatctcctcttgttgttttgcagaatagcgatattcaaatgtctcttcattctgatccatgatttaaccttcctttctgcattccaagcccctgcgtcttgcacgcaccatcatgctgattcccattcccacgatgaacaggaagatgaccgcgccgctggaagcgatcatgatccggctgaagtcgaactgtcccagaattcatccatgagctgagagcgggtaaaggtctttttcggataagagagcagcttgtaaatcagattgaattccctgacggtcagcccgatctcttctttgttcagata

SEQ ID NO: 3743 - DNA, 4152 bp, Unknown
  16S sequences of unknown bacteria
tcgcgccgccgagatggcagcggcaagccccgaagctcctcctccgatcactgcaactttgcgcatgtgtctccccttctgtcctcgcgcggcgtatggaaatcgccttcaccgatagtagcgggaaggaagcgcgcgttccatcgctttttcagctgggtgcggcgacaaaccggacagccattggccaaacacgcgacaagccggcaagcccctgaccaaaaaacggccaaagcctcgacggcctgtcacgcatatggccagagcctcaccggtttgtcacgaagcctgcgccagcgtcgccactgttgccgacgacgccgacgccgctcttacgccagcacgggctctgacgcgtgttccttctcgcttgccttgcgctgctgctccttctggttggagaaggcgaccgcaatcatcagcttgatgcggttgagctggttgacctcggacgcacccggatcgtagtcgacggcgacgatgttggactgcgggtagcggcggcgcatctccttgatgacggccttgcccacgacgtggttgggcaggcacgcgaacggctgcgtgcacacgatgttgggtgcgccctcgttgatgagctcgaccatctcgcccgtgagcagccaaccctcgcccatcatgttgcacaggtcgagaatctggctcgcgccctcggcaatctcctcgatgcgctcgaacggctcgaagcggctggactttgccagctcgcggcggatcgggtcgcgcagtttctcgagcgccttcacgacgcccgtcgcggtcaggtacttcttgaggtcgggcgtgagctcctggtgcctgaacgccgggttcaagatgccgaacaggaagaagtcgaccaggcccgggacaaccgcctcgcaaccctcgcgctcgatcgtgtccacgatctggttgttggcggtcgggtggaacttgaccaagatctcgccgaccacgccgacgcgcggcttgctgccgaagttcacgcacgggagcgtgtcgaagtcgcggacgatcttcgcgtagaccttcttggcctcgcgcagcgaaagcccgcactcgttctccttcatccagtccatccacttgcggaacagcttgttcgcgctgccgggctcggcctcgtacgggcgcacgcggtacaggcacatcatcagcaaatcgcccacgagcagcgccgggacggcggtcttgagcatctgcggcgtaaccgagaagccggaattgctctcgcccgtgtcgttgaacgcgaggctgatgaccggcacctggtccaggccggcgtcgtgcagcccctttcggatgaggctgatgtagttggtcgcgcggcacccgccgccggtctgggtgatgatgaaggcggtcttgtccatgtcgtagcgcccggacgtcgccgcttccataatctggcccgtgaccaggatggacgggtagcagatgtcgttgttgacgtacttcaggcccgcgtcgaccgcacccgggtcaacggacggcagaagctcgaggttgtagccgtagtggtggaagatcggcacgagcagctcgaagtggatcggcgacatctggggcgcgaggatggtgtactcgcccgattcctgcatttccttcgtgtactcgacgcgcgggaactcggtcgacgccgctacacggttgggctcaaactcgaaggtcgggttgctctcgcacgactggcacgcggtgtccaagatctcgcggcgtgcggcgtcttcgccttgcggcgtgccgtccgccttctgcttgagcgctgccagaagcgagcggatgcggatgcgcgccgcgcccaggttggagacctcgtcgatcttgagcacggtgtagaccttgcccgacccctcgataatctcctgtacctcgtcggtggtcagcgcgtccaggccgcacccgaaggagttcagctgcacgaggtcgaggtcggtgcgctgcgtgacgacctttgccgcattgtagaggcgggtgtggaacatccactggtcgtatacgcgcaggttgcgctgcaggtcacccaggtgcgcgatggaatcctcggtgagcacggccatgccaaagctcgtgatgagctcggggatggcgtggttgatctcgttgtcgatgtggtaggggcgccccgccaagacgatgccgtgggcgttgtgctcctcgatccactggagggtcttctcgccctgcgcacgcatctggttcttgaagtcgaggtccgcctgccacgcgcggtcgacggcatcgtcgatttctttctttgttgggtacgcgagctcggggtgctgctttttgcgctctttgaccaggtgctcgaacagacgcttcttgagcgcctctttgtcatcgtaggggatgaacgggttgaggaagtccgtgcggctcgtgcgcagctcgtcgatgttgagcttgagcgcctcggaatagctcatgacgatcgggcagttgtagtggttgttcgcgcccgcgtcttcctggcgctcccagcggatgcacggcatccagatgaagtcgacgtcgcgctcgagcaggtccatgatgtgcccgtgcgaaagcttggccggatagcacgcgttttcggacggcatcgactcgatgccctttttgaaggtcgccttcgttgacggctcggatagctcgacacggtagccgagctgcgtgaagaagctgtgccagaacgggtagttctcgtacatgttgagcgcgcgcgggatgccgaccgtaccgtacttggccttctcgaccggcagcgattcgcggtcgaacagcaggtcgttcttgaactcgaacaggttgggcactttgttcttgtcgcgcttgacgccggcgccgcgctcgcagcggttgcccgtgatgaagcggcggcgcttgccggtctcggggtccttgccaaagtcgttgatggtgagcaggcagttgttctcgcacaggccgcagcgcgccgtgctgtgcttgatctcgagctggtcgatttgcgcgcaggtcagaagcgtagagcccgcctcggtcgcacggtcgcgcgccagcagcgcagcgccccatgcgcccatgttgcccgcgatgtcgggacgaatcgcatcgtggcccgcgagcaactcgaacgcgcgcaggaccgcatcgttcagaaacgtgccgccctggacgaccgcatgggtgccgagctcgcttgcgtcgcgcagcttgatgaccttgaacagggcgttcttgatgaccgaatacgacaggccggcggagatgtcggcgacggtcgcgccctccttctgcgcctgcttgacgcgggagttcatgaagacggtgcagcggctgccgaggtcgaccggcgcgtcagacttgagagcctcggcggcgaagtccttgatgtcgaggttgagcgaggtcgcaaacgcctcgatgaacgagccgcagccggcggaacacgcctcgttgagcatgatgtgctcgatgacgccgttcttgacgcgcatgcacttcatgtcctggccgccgatgtcgaggatgaagtcgacatccggacgcagttcctgcgcgccgcgcagatgtgcaacggtctcgatctcgccgctgtcggcctggatggcctcgagcagcagcgcctcgccgtagccggtcgtcgtcgtgtggccgatggtcacgagcgggttgccctgctcgtcacgtggaatctgcgcctcgagctcgccgagcatcttgcgcgccgtgccgaggacgtcgcctttgttgttggcgtagaagctgtagaggatctcgccgtcttcgcccaccaagacggacttgagcgtcgtggaaccggcgtcgatgccgaggtacgcgcgcccacggtagtcggcgaggctcgccttggggacggtcgcctgtgcgtgacgctccttgaacagcttgtattcgctctcgttggcaaacagcgggtcgagtcgctcgacctcggaaccctggatattgccgagatttgccatgcgttccttgagctcggcgagcgtgaccgtgtcgttgttgtcctcggaggcgagcgctgcgccctgcgccacgaacaggtgcgagtggtcgggcacgatggtggtctcgtcggtgaggcccagcgtctcgatgaagcgctggcgcagctcggagaggtagtgcagcgggccgccgaggaaggcgacgttgccgcggatg

SEQ ID NO: 3744 - DNA, 4453 bp, Unknown
  16S sequences of unknown bacteria
cctgccatatgtattacgaaggatgctattcgctctactataaagcggaggctgcgggcgacaccgcgctcatgaaaacgctctccgacaggtacgacctcatgatagagcgcctttacaagaacggcttcgatccttgcggcatcggaatcgcaacggttgacggccaccgtcagatatataagagaacaatacaggaagaggctgaggtaaactggatcgcaaataaggaaaatgtcctcaagggcataaccggacaggcgttttcgggatacgcaaacgaagactgacaatactgaaaaaagggcacaccccgggtgcgtccctttttttcgtcgtgattgtccggctgaggcattgaagcaacgcgcgatttttgtttaagtcggcacaataattgcgcgattctccttgactgtttacaaaaattatggtaaaatcatcgtgttatatacgatattaacgggggagccttaaatgaaaaaattcctatctcttgttctcgccgccgcgtgcatgcccgtgatgcttcttgcatcgtgcgcaagcgggggtgccggagcatattcgccgaagatcaccgttgcctcctcggatgccgaggacaacgcggagtttctcaccaatcgcctcggggataagctgaccgataacgtatatctcgcggtcggaaacgacaccgcgaacgggatcgacatgaccgacttcgagaacgacggatatgtactccgcacggtcggagacaaaagcgtcgttatcgtcggaaagagcgccgacggacttgatctcggcgtccgccgctacgcaaattcggtagacgacggcaagaacgaatacttcgacgtcgcgtatcacgaaggataccgcatcgagaacttcacactcgccggaacggatatcgccgaatattcgatcgaataccccgccgagcataacgaaaatatgctgttcgcagtgtccgagcttcagagactcgtgaaaaaggcgtgcggagcggagctttccgcctccgaggggatcacaaagaaagcccgtgcgatagaatttcgccactcgaccgatgccgagcttaaattcgacggatatcgctacttcttcgagggtgaacgccttgtgattgaaggcgcggtcaagcgcggctgcatgtacggagtgtggcgcttcctccagaaggaatgcggatggacgagcctcatctacggtgacagcgatcttttggaggcggagcatctcgacgttcccgcgactgcatcgcgtcaggagacaccggcattttcgtatcttaatatgtacagccactcatggggctcctacaaaaacgaaaagggcaatcccacagcggtacagaattcctacggtattatggttaactgctgccacggactttaccggttctcggaagtcaatgttatgggtaagcagatctgctataccgacgatgatatatatgagatgtgccgcgacaacgtccgtgattatatcgaggctcagcttgcctccggacttgtgatcggaaaagatttctttgctgtagatattgcgcagaacgacaactctgattactgcacatgtcgggaatgcatgaaggtgttcagcgtcgaaggctcgaattcgggcgcggtcgtccgttttgcaaaccgcctctccgaggagttgaacgaggactatcccgggctttactaccagatcttcgcgtatgccgaatccaatgcggcaccgctcaaaaccaagccgaacgagttcgttcacataaccttctgctccgacatgaattgctcgaaccacgttttcgacggctcggagtgtaacggcaaatcgacattcaatcagcttactaacaagaactatgcatcatggctcgagagctggtgcaatgtttccgacaacgtgtatgtgtggttctacgcgcttgactcaaaattgcagcagtacacgacgatcggcaatatgtaccgcgatttccgttatttccgcgatctcggcatcaacggaatgttctggcagtgccagttctacggtctcggaatacagagggtgcagcatcagcttctcgctgaattccagtggaatatggacataagcgaagcggattttgaatatctgctctgcgatattcttaagaaggaattcggcagcggatggtcaagcgtgcgcgagtacatcaagatgtgggatgaatcccagaagaggatcaagtgctggcactgctggggcggatgggcttatccgtgggatacccgctacgacggcaactactacgacgatcactttgaaacgatgatctccctccttgaggatgcggtgacgcgcgccgacagcaaagagcagcagggacgcgcggagacctttacctgccatatgtattacgaaggatgctattcgctttactttaaagccgaggaagcgggcaataccgcgctcatgaaaacgctctccgacaggtacgatctcatgatggagcgcctttacaagaacggcttcgatccctgcgggatcggaatcatgacggttgacggtgcacggcatgtttataaccgcacgatacaggaggaagccgaaaaagagtggctcgcaaataaagaaaacgttctcaagggtataaccggaaaagaattctccggatatgcaaacgaggattgatccgcaatacgaaagatacagaacagcccgtcatccgaaaggatgacgggctgtcttttaatgtgagcttatctgaaatttttcgcgctgcgggcggttctttcacggatcgtccgtatgtgcagccggacttcggaagggcagctttaatatttctgccaatcgtaccaatcggagaccctcgtgggactttcttcaaagcggtcgaccatcgctccgatattctcgcttatgtcaaagtcggagagcaccgcgcactttcctccggaaaggatgtacgatgaattgacggcgagatcgcggaagtattcccaaagttcggtgtagcgtgccttctgtgcgtcgtttccgttctcataccaatcgtgataaacggagatcagtccgcggacgtacatcgagcggcttgcaagacgcactccgtactccgccttcgcgctcggcgcgtactttatcgcatcgtcaaacatcgagaggcaaagctcgaatccgtcgcgcaccttcgcaaagtccgtgcggtcgcagggattgccgaatgcgatcatgaacggccagcagccgatgcggtcggtcgtttcaagccatttgtaataatctccgacaaattttccgccctcgccgtagagaacatagaggtaatcgtcgatttccgcctggaattcctcttcggtcatctccgcattccagagaagtctgttgtacaggtgaagcataagcgcgtcgatgctttcccaatcggtttcctttttcggattcgaacagcacggataaattccgtatactccgttgtcgctgaagtagcgcatatccttgagcatcgtcttgatcgtcgaatttgtgattgagttaagcgcccagttgccgggatagtaccaaacggtgatgcgctttgcgatctgacaccatctgtcgaattccgcagcgtaattgtagtttgacgtgccgtaggaatcgtcgggatgctcggtgcagttctttccgtcgagcgtgtggttgccgcaggtgagcttgtctatatcgttgtagaagcagtaggatacgttcacgttgtccctcggcatcgtttttgccggaggtgttgaagtgccgtagtaagcgaacatcgagacccaaagtccgggatacgcttcgccgatcacatcagccatttcgtttgtgaaatacaggacggaggcgacaccggagcgttcctttgcgatcgcgtttatgcatgtcttgcatttgcagaagctgccgctgtcgagctgcgcaacatccactacggtgatatccttgccgatctcgtatcctgaggctatcttcttctcgatctgaccgaggaagtaagtctttgcggcttctatgacctcctcgttgttgtagcagggctggggagaaccgatgtcgtaacctccgtaatcgtaatccggaatgactcccgcgtttaccgcatcgcggaatccgtgtacggcggcggaaaacgttgcgctgccgtagccgttgtatttactcagattccggaggcttctgctctcacgcagcttggcgtgctcatcgtaattgtaataccatgtgtagcgtccctgacggtatgcaaacgacggaacctgcgtgtcgtttatacctgcgggaatgtcaacatggtcggagtcgtagaggtaatatgcgtcgtcggcatcctttgtgagataggagtcggtctgcttgttgtagaagaaccgccagccgatatagcgttcgagaagctcatacacaccgtacatgcagccgcgccattttccgcccgtgatgtagaggtttccgtcgtccttcacggaaagcgtaaagccttcct

SEQ ID NO: 3745 - DNA, 32759 bp, Unknown
  16S sequences of unknown bacteria
gttttttcacctctctgtctgttttatgttcagattctttgcggacaggcggatgccatgacaagtttatttcaaaaaacatgacaggcctttctgcgttcatattctcatggtataataaataataaagtttggtactaaggttttgcctcctatcgaagaacattcatatattttgattaagattaaaaggtaaggagaatcgacttgtgagaaaatatggaaaatatggtgggatagttttaatgtggctcgtctttgaaatggttgctattgtactttggctttcaaagggcaacttgttctacctgcttaattttagttatataggtacagccatagccctcggtctcctgctattccagcttcactacatacacgcacgccgcgtggttcaacttcttgttggagcttacatgctggtatatttgggcttaatatgcaatgaaaatatgcagattgagggattctggtattatctgtttaacggcgtttttgaagcggcaactattcactatgctgtcgcaaaaatctttggaccgctgatttttggccggggctggtgcggctatgcctgttggacagcgatggtattagacttcctgccatataaggtccccgaatctccgagaaagccaatcggctttatccgctacatttcatttgcagcatcattcctttttgtttccattttgttcttgcaaagggtagggcatatggagaggattatgttttggtcatttctcataggtaacgccatttactacattttgggtatttcactcgctttgattttcaaagataacagggctttctgtaagtacatctgtccaatcacagtttttctaaaacctatgagctatttttctttgttccgcatcaaatgcgacaaggagaagtgtgtttcatgtggaaggtgcaagaaggtctgtccgatggatgttgatatgacggacaattcaaggaagcgtaagaatggtacagagtgtatcttatgtatggaatgtgtaaaggcatgtcctaaaaaggctctttagcgcttgaacttccgttttaggagtcaccagtaagaatctgaaggcaaagacatgacaggaggaagcgcatggctacaccaatcattgaccacaatctgctgacgctggactactggcaggacagcgtgacctacgagggcaaaaccgtacccggcggcaccattggctgtgaagctctgaacatcccggatatgctgaggaaaaagctggcacaggcaagtattcccttgcagaagatcgtcgcggcaatcaaagagaacaatctgacagccgagttgcttcgtcctgccaagggcagtgttctacatatgatacagcttgcgaaggatacaccgccgttttcccgtgccgacgctgcttattacaacgggcgtgtggagcatatcttctcggaggaagggattcagaatacccttgcctatgtgcaggctgccgccgtggttgggctgctggccaccttcaacgatcagttcaggcagggcgttggcataacgaagatcatcacccttgcggaggagctccccgccaccattcgcaactacaaaagcggtatgacggcgtttgcagaagagctgcataaggggaagcggactccggacggctatgcgcaggtgtttggcaggatattctccggacagccgaagctgtcgctggataacaagtcatggcaggcattttctaacacaacaattcaatatgtatctgtcgtccgctccgctcaagacgcgccgcagctcatgcgccggatgcactatatgtctttcgggtctatgttccgctccgatctttttgaggggctatgcgtcagacacgcaccgaggaaatgcgccgtctgcggaaaatggtttctgaccaccgacgcacggcacacgaaatattgcagcggctacgcgctttataaaaacacaaaacaggcataaaaagaaagtgaggatttgcacaatgacaatcatgaacattaacgagatggaaaacgccgctttacagctgaaaagccttttagctgtacttacttactattgtagacggatatgacagcgacaacggcagcattttaacggatatgcccacggcattaaagccccttgcagaaatcgcggaaaacctgtattgtagtattgtagaaatggggagggaggttaaataatgtttacaattctttgtattgtccttttcccgttggtggttctcattgagttaatcaagttgaacaaatgaaaagcggtacagcttgcccccgttgcaatatgcgcgggggcttttctgttgcttgctctacaagccttttagagccgttctaaaatgtttcttaatggagacgattaaaacgccgtgtagagccttgcaaacggcttataaagcaaattagcttgcttttcttgctctactttcctaccaaaaaagcgtttttatatttttggcattttcgccatttacggcgggaaaacccgcgtttattgagaggtcggtatatttccattgttaccgataaagccccggcaacatggcacagggcaaacgcccacgggcgaacatgattatatatctttgctccaccaatacaccgccgaacgacaacgcgcccggttgctttcggcttgtcactgctttttatagcttgtcactgcacaaaacagcccattagagccgaaaaagcaagcaatatcaaagcttttggcgttgtcactgttgtcactgcaaatagacgaataccccacatatagttttataatttctctttgccgccgtttatgccgggcggctttttctatgccctgttgattttctgttgatttatttggtgaatacaagccatatagaacgccaataaacgcctcaaacccgcataaatacaggcttttctaaaaagcacagtttattttttataaaaatcttggtttacggttgacggaaattcgcggaatggatgacgcatcgcccgaacagcatggaaaactatttgctgaaaagctctcagaactggaacgacagcaagaactgcttgctcgccgaatggagaagctgcgctgccatatacaagctgtgaaaacattgactgatttgagagagcacccttatcagaagtcagatattgacacagaatgcatcgtgtcttttgatttgattgaacgagacaagctgcgtcaatatattgaaagcccctacctttattcacgagtgcagcactcgcaaacactgccgcaggaacgacgcggacttaccgttcctgccgatatgcgttcagcgtttccggaatccagtgttctttggcaaaagcaatcgtctcgatacgtgacttttttaatgagcgaagaagtgactgccggtttcccaaatgacttagccaaacacttggcacacattcaaaaatcgcaccgtaccggcgcaatcatcagtcgttttctgctctgtgcacaggaaaatggaaagatatatgatttctataagacttttgtggaaatcctgccggaagcgatgaaatagtaaactccctcatgtttcaaaaaaacatgagggagtttactgcgtgatgcttgccttgcacaccagaatctgtcggctaacagttataagtttgaattagttccttatcacactgttaagccaggcttttggaggattttattaaaacactgtaacctctgttaagaggtcataatttattgatattcaaattatcgtttatcggcctgtgtgacttgaagcgaatcttacttcgtcaaattgatgaagtaagattttctatccctaaaatcggtttcaaaggtaaaaagcatctttattttgcgtaaaacaattttttctgcgctcggcgaaggcagaaaaaagtctcttttccattggcgatgcttctctttgaatcgtgcgaacaaaccgttattttttcggcagcgatcttctgatccccaaaaataccggcacaggcaatggctctttgtgcttgttgcatgccaattttctaatcctgacatcttatcgccaaagaaaaagatgggagaaaaacgaaatccttttctcccatctttttgtctgattagttgactacgttctgcggacaacccttggcaaaagcttctacattttcttcggtaatccgcaaaagccggatccgcgcctctttggttgcccaaccgatatgtggcgtaaagtagatattccgtgccgaaagcaaaggattatccgccttgggcggctcggtcgaaagcacatccaccgccgccgcggcaatcacaccatgattcagtgcgtcagccaaatcctgttcagcaaccaccggtccgcgggaggtattgatcagcatggcggacggcttcatttttgaaagaaaatcccggttaatcatcccctgcgtctggggggtcagcggacagtttacgctgatgtagtccgcttgggcgcacagctcatcaaggccgacccagctaaaattttttcggttttcctgtcctttcatcgtgcgggagttggcaatcacccgcatgccgaacgccgcggcaatgtccgccgttttctgcgccacattgccaaagcccacaaagccgatggtcttaccggccagctctgtctgaggggccaccatataggaaaaatcaaggctttgggcccagtcgcccttctgcacgctttttgtgtgttcaagcacatggtttgcatgctgcagcaaaaacgcaaaaatcagctgcgccaccgaatcggtactgtatgccggaacgttgcacaccacaattccccgctccttagctgcggcagtatccacaatattatagccggttgccagaacgccgatcattttcagctgcggcaggttttccatggtctgacggtccagcacggtcttattggtcaaaagcacgtcggcgtcagccgcgcgctccaacaatttttccggcgctgtcctgggatagcaaatcacttcgccgaaccgctcaagtccctcccagctcaaatcgccaggatttgcggcaaaaccgtccaaaattacaatcttcattttttcgcacctttttccttttccgaaataaactgatccattgtataactgctcagctgctgccgtaaatcctgtgacagcttttcaaatacgcattggaacgtacacgtcccctctttctcccttgtgcattggtaagttcctttgacacagcgggcaatatgtatcgggccttcgatcgcctccacgatatcgcacaacgaaatttcccggggcttttttgccaattcatacccgccagccgcgcctttataggaaagaatcagccccgcagctaccagtttccgcagaattttcagcgaaaagcgcactgtcacacccgaggcttccgccaaagcgcttgcatcaatccgcccgccgctggatgccaattcgtaaacaatgcgaactgcgtagtccgcctccaatgtcatctgcaattccattcacgctcctttgagaaaaacaacagcagcctgtcaatccaaaaagtccttgagtttcttgcttctgctgggatgacgcagctttctcagcgctttggcctcaatctggcggatccgctcccgggtcacgttaaattccttgcccacttcttccaaagttcggcttcttccatcttccaaaccaaaacgcagccgcagtaccttttcttctctgggcgtcaatgtttgcagcacatcgctgagttgttctttcaaaagcgtgtgagaagctgcctctgccggagccggcgcgtcatcgtcggggataaagtctcccagatggctgtcttcttcctcaccaataggcgtttccaggctcaccggctcctgggcaacccgcataatttcgcgcaccttgtctaccggcatatccagttccttggcgatctcctccgccgtcggctcatggccgtttttatgcagcagctggttggaaactttcttgactttgttgatggtctctaccatatgcaccggaatgcggatggtccttgcctgatccgcgatggcgcgggtaatcgcctggcggatccaccaggtggcataagtggaaaatttaaagcccttggtatggtcgaacttctccacagctttgatcaagcccaggtttccctcctgaatcagatccaaaaactgcattccccgtcccacatagcgtttggcaatactgacgaccagccgcaaattcgcctctgacaggcgttttttcgcgtaatcatccccctgtgccatccgctgtgccagttcgacctcctcttccgagctcaaaagcggcaccctgccgatctctttgagatataccttaaccgggtcgtcgatattcaccccatcggcgggaggtgcttcttcctcctccgaagcgacagacaccggaatggtgctcagatccaaatcaatgtccggctccaagtcctcaatgatttcaatattcagcccttccaacgtgtcgtaaagcttatccaccttttccacgtcgaaatccagttcttccagtgcatccgtaatctccttggtggtcaatttccctttggatttgcccaattcgatcagatctttgatgaccgattttttgtcctgtgctgccatagattgctctcccatttctcctcgcgaaaaaatttctcgcctgtccgccccgcgaagccgacgaacggcatatcccaaaccggtaacctctgcctgccaaaggcccggaagtattcttttatcctttcagcacgccagcgcaaagcgttttacacaaagtactcactatttcttcttcgccgccagatccgccacatattgttccaactgtccgcggtccatctgccgaagctgctccggtgtttttttcctttttcctgccaggatggtttccagataatcctgcgcctctttgggcgttgcccgtgatgatgccggatctgctaaaatcccagcaactttccccatctgttcttcgctcagttgttccgacagcgcaatgagctccaccgaccggttttgagccagccgctcgcaaattacacggaaaatttcccggttgaagtcggtcaaaaaatcctccggcgttattttctccaaaatcaggcggcaatagtcagggttttttagtaaaacgccaatcaaccgttcctccgccaacgcctcctttaaatgggcagcccgctgcggatcccgcctatcctggggacctgctgcaaataccgtcaaatcccgcgcctgttttttctcggcatttttcgcctgctggcgaatggtataatcaatctgtaccatcagtgggtctttggaaacccccagctccgcagcaacttttgccacataaacgtcccgctcaatcggattgcggatgcccgccataaactgggcaaattcctttaaaaagcccacctttccgtccggcgaatccaaatcgtacttttgccgcagcttgccaatttcgaactccatggcgctccccgctccttccagcagcagccggaaccgggtagcgccgaattttttgatgaattcatccggatccttggcgtctttcaccttcagaacccgcaccttcagcccgatttcgccaaacatattgatggcgcggttcgtggccttctgcccggcgccgtcggcgtcgtaggcaataaccacctcgtccgcatactgggaaatcatcctcgcctgctctgcagtcagcgaggttcccaacgttgccactgcattggcaaatcccgcctgatgcaacgccaccacatccatatagccttctgccaggatcagcgccggttccttggtgcctttggcaaaattgagcgcaaacaggtttcggctttttttaaacaccggcgtatccggcgaattaagatatttggggccctttccttccatcacccggccgccgaaagcgatgacattgccccggatgtcgataatcggaaaaatcaccctgccccggaattggtcgtaatagctgccgcgggcgctttttacggcgatggccgcggcagtcagttcatccatccgaaatccctttcccaacagatgcttgatggccgcgtcccagctttccggcgcaaatcccaatccaaaatgccggatggtcctgtcagaaagcccccgtcctctcagataatccagcccttttttccccgccggagaaatcaggcattgatggtaaaaacgggcggtctcccgattgatttccagaattctggtttttaacttcgcgtagctgtcatcatatccgtcctccggcatggcaagacccgcccgctgcgccaaaaatttgaccgcctcaatataatccagattttccatccgccgtacaaaggtgacaacatctccgccggtgccgcagccaaagcagtaaaaagactgactgtcggggtaaacagtgaaagacggggtcttttcggaatggaacggacacaggcccaccaggtttctcccacgccgcttcacgttgacataggagctaaccacttcttcaatatcgttgcgctctttgagttccccgataaattgttcgctcaacatccgttcattccccctttcccacgatgcgtttttttcgccggacgattcctttttattcactgattccctgccagcttttgggaacaaacaactcagtgtaaagatgaatggcaaaccggtcgctcataccggaaatataatcgcacaccgccgtgtggattccttcccgctcccatacactccgatactctgttgggagtttttctccgtggtcaataaaatatgcatacaggctttttaccacgttttccgccttggtttcctcacttttcgccaccggattggtataaaccgcttcgaacaaaaactgctgcagctgcaaaaaagcccgctgggttccggaatccatggcgatggtctctttactgttctcaatgacagaactgaccaacgccgcgatacgctggttttttttgcgccccagcgaccatttgacctcccatgggagatcctcctcattcaatactccggcccgaacagcgtcatccacatcgtgattcatataggcaatcttatccgaaaagcgaaccagccgcccctccaatgtcgccgcttcctgcccggaagtgtggcagcggatgccgtcccgcacctcccagcaaagattcagtccccggccgccattttccagcctttccaccacccgcacgctttgcagataatgcttgtatcctccgggacaaatctcatttaacgctcgttcacccgcatgtccgaaaggggtatgacccaaatcatgccccaatgcaatggcctcggtcaggtcttcgttaagccgcagagcccgggcaatcgtgcgcgcaatctgcgctacctccagcgtatgggtcagccgggtacggtaatggtctccctccgggcttaaaaaaacctgcgttttatgcattagccgacgaaaggatttacagtggataatgcggtcgcgatcccgttggaagggggtacggatcgggtcctcctcttccggccgttctctgcctttggtgcgctgggacaataccgctctggcagaaagatactgcgcctcctgctgctgggtctgctcccgaaccgtcataggccccctcctttttggacaagcttctaaagatatagtacgaaataagagaaaaaaaacctgcttttctgcgaaaaaaattttaaaacattcaaaaaaaagcgtctattttcttcgatttctcaccctattttactgctcagatttcgtaaatcagcaatgccgtttggcagctatccttcggccaaataggacaaaaccgtttcggactctttccttccaaaacacaaacaagcaggagtttattccagatccgcgcaaatttcttttactgtctgcggcagaacgctggccgcggtcaattcggtgatttctttttgaaaagcgggcaccttatccgaagtcatcatcagcctcaaacgcacctgggcgccaaaatccgattccagggtctgggcattatatcgaggaagcaaatagctgatttttccataccagtcatagccaaagcacaactccagcaccgtgcagggattcatatgccgacgcactgccgcgtccaccgccagcttggcgccgtgggaataagcccgcaccaaaccgcctgcgcccagcaggataccaccaaaatagcgggtgacgaccaccgctacatcggtaagaccttcccgttccaacacttccagcaccggtacaccgcccgtgccctgcggctctccgtcgtcgctcatgcgtttgacgccgctttcccgcagaatataagcgaatacgttatgggtggcctcccgatgttctgctcggatacgggataaaaaatccagcgcctccgcttcatccttcaccggcgcaatgtgcccgataaaccgggattttcgttcgacaaactcatcgctggcatagcctgccactgtctcgtagggttggaacaaaacgttcacctctctttgtttttgggtaaagcaaaagcggtacattcctgcaccgctttgtctttttatttcacgaaaatacgacttactccgctttagtgcctctgttgaaacgtctgttgaatctgtcaacacggccgccggtatccaccagcttctgtctgccggtaaagaacggatggcatttggagcaaatttcaacccggatgtcctttttagtggaacgggtctcaaattctgcaccacaagcacaacgaatggtcgttttttcgtagttgggatggattccttgtttcattgggtaagtcacctctttctgctatgcacggattaacagatttatgatagcacatcaaaagaacaaaagcaagctttttctttcatatgttttttcctttcgtccaggaatacctgactgcctaaaatggcacacatacctctgggcaactggtgagggtatatgccctccggcagcttttgcacggcaacctgtgggaaaaatcgtacagaattggagccgctggactggcccagcggctccgttcttttcgcgcaaaaaatatttctaaattttttacaatggattcttgagattttgccatatggttcttctgccggtttatctggcggactgtaaagacaatttgccttgccgctctgccatgttatccttctttcccttctaatccgaaaaaatgattgccgaaaggccacagaagatacactgctcttagaaaaaagatttccagggacggcgggacattttgtcaaacatagaatatcaaaatcccatcagccgggtcatctgcactttcagctgtgcttccagatcctcggcttcggcccggctttgccccttaaccataaagtagaccttgattttcggctctgtaccggaggggcgcaccacaatcacattgtcgccctccaggccgtattccaccacattggagtggggcagatgaatcggctgctgcccggcggcggattttttcaccgacgcctggtagtcggacatccacagcacctttttaccgcaaatttcatccggcgcgtttttgcgcagatcttccatgatctcgcgcatacgctccattccggaagctccctcgcaggtaaagctggattgcgtattcaaatgcatgccgtatttttcatacagcccgaacagaacgtccgccaatgttttgccctgctttttataataggcagccatttcacagatgagcatggaagcgtccaccgcgtccttatcccggacatagccgccggacagatagccatagctctcttcaaagccaaatatgtaccggtcctgttcgcctttttgctccagccgcaggatttgctcgccgatatacttaaatccggtgaggatattcaccacctcaaaaccataggtttcggccagccgatcgatcatggaggtcgtcacaattgtcttgaccacaatgggattttggggcatggtacccagctcgatgcgggagctggcgatgtaatcggtcagcagcacgccgacctcgttgccagtcaaaagcagatagctgcccgcatgcggcactgcaatgcccacacgatcgcagtccgggtcggtggccaacagcagatccggcttttcggtttcacacaaatccaggcccttctgcagcgcttcccggatttccggattgggataggggcaggtggggaagtttccgtccggcagttcctgctctttcaccgggaccacatcccggataccgatgcggtcgagaatcgcccgcacgcacatatttccggcgccgtttaacggcgtatacactaccttcatgccgctgtccgcacaaatacctttgcggatcgactggctttccaccgcgtccaggtaccggtcaatgacctcctgcttgatatactggattttgccctggcccaaagcctgggcaaaatccgcgaccttcacaccgtcaaaaatatcaatccggccgattttttccagcactgcgcccgccgcctcgtcggtcatttggcagccgtccggcccgtaggccttgtagccgttgtatttagcgggattgtggctggcggtgaccatgacgcctgcctgacatttcagatcccgcactgcgaaggacaaagccggtgtcggcatcagctggtcatacagataagcggtaatcccgttagccgccataacccgggcggtttcttcggcgaacagcagggaattgatgcgcgagtcataggaaatggcaatactgctctgcggatatttctcattgagataatccgccatgccctgggtcgccttgcgaacggtataaatgttcatccggttggtcccggcacccagtacaccgcgcagccccgcagtaccaaaagccagctcctgatagaaccggtcaaaaatttcttcgtcctgatcttttatgctcagcaattcttccttcagcgccggatcctccaacggaaagtccagccaacgctgatactgcattttttctgtcatactgatcgcctccgacttttagtggaatatcgttgtcctttttttatcagtataacgcatttacgaaattttctcaacagttttttagaaagactgcccaaatccagcagataaaatcatttctttcatggacattttacccttttttacccaaaatccatagaaatcccactttaaagacagaaatccgacagatcgctggccagtttccaaaaaatacggtatactgttgatatcgtttgattggcaggtgtttttatgttttactcggtcaacagttcgggacttttggggctctcggcttatccggtccgggcagaagtggatttctcccaatccatgcctgcttttgagattgtgggactgccgggaacagcggtcaaggaatcccgggatcgggtgcgctccgctattcgcaactgcggtttcgcctttccggtgggtaagattatcgtcaatctctcccccgccgacgtgaagaaggatggcgcactgtacgatttgcccattttcctcggcgtactcaaggcgggcggtatgctggacgcagaccttgcagacagcgcttttttcggagaactgtctttatccggcgaggtgcggcggatcaacggcgcgctgccgctggtgctgggcgcccaaaaacaggggctgcgccgggttttcctcccgcaggccaacgcttccgagggggcgctggttcgaggaatcgaggtatatggcctatctcacgtcaaacagctgctggactggtatcaaaaaggagaagccctttccccggctgtcagcagtacggctttgccaagtgaaaatctgcctgatctggatttcgccgacgtcaaaggccaggccggcgccaaacgagcgctggaggtggccgcggccggcgggcacaatttattgatgatcggctctcccggcgcaggcaaatccatgctggccaaacggttgccttctatcctgccggaaatgaccttcgaggaatccattgaaaccaccaaaatccattcggtggccgggcttttatcggaagaaagcgcattgattacccagcggccgttccgcgcgccgcatcacaccatctccccggcggggctatccggcggcggaagtatcccccggcccggagaaatttctctggcccacaacggggtactgtttttggatgagctgcctgaattttcccgggacgccatggaggtgctgcgccagccgatggaggatggacaagtgacgatctcccggatagccggaaccctgacctatccctgcgccatgatggtggtcgccgccatgaatccctgcccctgcggttattttggtcatccggtacgggagtgcagctgctctgccggagcggtcagccgctatctggcccgggtatccggcccgcttttggaccgtctggatttgcatgtggaggtggcgccggtggaataccagaatctggtctccacccggccggaagaatcttctgtcgccattcgcagccgggtcaaccaggcccgcaaaattcagcaggagcggtatcagtctatcggcatctcctgcaatgccaagcttcccgccccggcggtcaatcgcttttgccctctggatgacggggcatccgccctgctgtcccgggcgtttgaaaccatggggctttctgcccgggcttatgaccgcattttaaaagtatcccgcaccatcgccgatctggataaagcggaagtcatcagccggcgccacattgccgaagcggtgcagtaccgtagcttggaccgcaaatattggtccagataggaggttttttatgcaatatatcattcggggaaaatcgttcgtctttaccactgaaatccgggacaatacaactctgcgcaaaagctttttctcgctggcccggcagacctttgatctggactttgagccgtggtatcaatgcggcggctggcaggaccggtatctgccccacgcgctggtctgcggagagcaagtggcagccaatgtatcggtcaaccggatggattttcagctggacggtcgacgccgaacctatctgcagctgggcaccgtcatgacccatccggattaccgcggcatgggactgtcccgctttttgatggaatggattctgcaaaactggtctgaccgctgtgacgggatttatctgtttgccaatgacacggtattggatttttatcccaagtttggattcctcccagccgcggaggcacagattttttccccatcctccccgcaacagcctattcccctgcgccggatcaatcctgacaaccccaaagaccgggcgcttttgatccaatcctaccgccgttccaaccccttttctgctttttccatggaaaacaacgaaggattgcttttgttctacgcactgggtcctttccggcattttctttatacgcctcccgaagaaaatgcggttgccattttagaagaggacggcgacactttattctgccacgaactgctgggtgaatggagcggcagtctattccaaacgttaaatcgtctgacgcagccccgtatccgcaagatcgggctgggctttaccccgaaggacacgctgcccggacagatttggcagtcgggcgaagatcatttgtttgtactgggcaaaaaagaaaatccctttgcagcgcgaaaactgtttttccctttgatttcccacgcataaaaatgaaaaggcggctgtaaatgctgccttttcatttgatggaatctctttctattttattttgttcccataccggcaggcagaagccgcagcattttttgcctgttcacattcgatttttccactgtataagccagtataatatcataaataagacggaggcttttaacctccgtcttatttatgatatttcccgccgcttaaaatctgatagccacggtagacctgctccagcagcaccacccgcgccagctggtggggaaatgtcatccgggacatggacatccttcggtccgccctctctttcaccgcctgggatagcccgaaagaaccgccgattacaaaaatcacatcggattttccgctgactgccgcccgatccagcattctggccaattcttcagagctttgcagctttccctcaatgcacaaagcgactacaaaactgtccgccgcaattttggataaaatccggcggccctccgcttccagcccggcggtaatctgtgccgcagacggattctgcggaagccgttcctcctcgatttctaccgtagaaagcctgcagaaagcgctcaggcgtttttgatattccactgccgcgtcccgccaatatccttctttcagttttccgacgcacacaatcgtcactgcctgcattttcttctccccctccaaagctttcaccggcccggttccgggcagctataaacgaatcattctgcccggctcatatcgtggcgctacctccagctgataatctctatcccgctgcataccagcctgcatcaaggatgacaccgacgtttccagcgccaaactcggcagattgttttcacggcttaaatgccccagcacgatctgcctggtacccgactgtaccaattccggcagaaacgcggcacagtccagattggaaagatggccgcagacaccgtcaatccggcgcttaagcggatacgggtaaaaaccggccatcagcatattttgatcataattggactccagaagcaccagatcacaaccgctgaccgcctgccgcaccatcggggtgaccatgcccagatccgtcgaaactgctatcttcttgtcatccccgctgactgccacatatccaacgctatgggcactatcgtgggaggtttcaaaagctcctatgtataaatcgccgacacagaccccctgcaccggcattgggactgctttggcccccgcgggaaaataatcccgatccgctaaaaagtccagcacctcatcagttgcatacacggggaccggcagtttttttaaaagcaccttcagccctttgatatgatcggtatgctcatgggtgataaacaccgcgccaatactttcccggtcaatttcccgcatctccagcgctgcgagaattccacggcagctgatgcccgcgtcgatcaatacgccgccaacgccgctgccaatataggtactgttcccgctgctgccgctggcgagcgtacaaaaacatgccattgcgccaatcctttctgtccaagtcccgctaccatcaagtcgccgccccaaggcgaagaaaaataacccgttttttcgttttctaaaagaaatcggctcgggccataggccaaagccgaaaccgtttcaatctatccgatcgcccgctgcacgtctgcgtccggcacctccatcttttccattctggcgcccagtccgcggaatttttccacaacgcactcataaccccgttcaatatggtagatttcctccacttccgtctggccgcaggcaatcagaccggcaatgatcagcgccgcaccagcccgcagatctgtggcttttaccggcgcaccggtgaggctctctactccctctaccactgcaacctttccatccacctgaattttggctcccatacgccgcaattcatccacatatttatatcggttgtcccacacgccttcggtaataatgcttgtcccctccgcaacggaaagcatcaccgccatctggggctgcaaatcggttggaaagcccggatgcggcagggtcttcaaattgatttttttcaacgggccgctgcgggtaacgcgaaccgcatcatcaaactcctccaccgtcgcgcccgccgccaccagcttcgccgtaatggattccaaatgtttgggtatcacatttttgaccaagacatcgccgttggtagccgccgccgcgaccataaaggttcccgcttcaatctgatcgggaataatcgaataggtggcgccgtgcatatgctcgaccccgcggattttaatcacatccgtaccggcgccgcgtacatcagcgcccatggaattcaaaaagttggccaagtcaaccacgtgcggctctttcgccacattttccaaaatggtcagcccctgtgcgcggacagcggccagcatgacattaatggttgcgccaacggtaacgccatcaaaataaatatgactgcccgtcagctgctgggcttcggcgcagatcatgccatgatcgatggaaacatccgctcccaaagcttcaaatcccttaatatgctgatcaatggggcgcaccccgccgaaattgcacccaccgggcattgtcaccgcgcctttggaataacgccccagcagcgcacccaaaaaataataagaagcgcgcatgttccgggcaatatcaaacggcaccgaaggggcaataatatgggtagcatcgatttccaccgttgttttattgcgcattttaatttttgcgcccaactcctgcaagatctgcagggagatatttacatcgttgatgtttgggatattctccaaaacacaaggctcttctgccaataaaaccgcaggaataattgccaccgccgcatttttcgcaccgctgatgacaacttcaccttccaaacggctgggaccttcaatgaaaaatttctccatttcagtctctcctttatcatctttctctctctgttcccccatggaaaacgcaggaaatcctgcgggcatacctctaacagtagtattatagcacaggcacctgcaaaataaaagcccaattttacaagaaaaatatcttcctgccgccgcttcctttctttgtgttttttcgctattttttaacttttatggacaaaccgggacgcccggcaccgcagtttgaactgtcaaaaaaactttttcctctgcggcatttgggaaagagccgttgttccatttcgtccggttcagggcggacttcacctttaaaatccttcccggcaaaaatttggatatacgtctttgaatttgtttttgcactgtttttctcttttgcccaattgttaaaatgggaaatatttcttgatacgcaaaaaggcgcccttttcatagggcgccctggaaaacttttactcttttaccggcccggataataggttccaatatatttggacgggtccataaaccttccgttgataataatttcaaaatggcagtggttcccataagcattgccagtctgacccacatatccaatgatctgaccttgctggacataatctccgtaagacaccgccagctggctcatatgggcatacagagtataaatcccattgccgtggctgatcttgacatgaatgccataagcgtagtactgacgcaccgccttgacgaccgttccagaagccgccgcccggattatcgtaccgcggctcgttgcaatatccatacccgtatggccccaatagccgttaattccgcaggaaagatatccaccgtcaaccggccagataaagccgccggaactgctggaatatccgcttccggaactgctgctgagaacctgaaccggctcggcggtacccaccgtcaccacctggtccaccggctctttgagaaccgtcgaatcgatctcggtacgatccgtttccagaccgttgacataaaccacatcagcagttatcaaacgcttacccagcacaccggaactgcgaactgcctgatatcctttggcataattggcatctaccacttcttctgttccaaacgggatatcctcttcgtaaacctctgttaccgtgcgctttaccgtcaaaaaattcacctgattggagactagaacctcctggcctaccaacaggctttcctcaattcccggattgagcgctttgagctggaaataaggaatatccattttctgcgaaatcagggtcggcgcatcgccctcctcaaccgtgtaggttactttcccctccacttcggaggtcaaaattgcttccatttcctctggttccaccaaactgctcaacaaatacaagcccttggaaagctggacatcctggacaaaatccacccgctcgttttcatctccggtgcggtactgattcagcatactatcaagcaacgcgtggatcggcgccgcattttccaccgcaccgtaaaaggttccgtctacatacaggccactggcctcggttatttcattaccggaggctgcgatcaattcatcggcaatttcgttgacagtggaaagctcctctttgtcgataaccttcagcgtatatttggggaccgtatccagcggaggctgatattcttcataaacaatacggctctgcatcattttttccgattcgtcaaaatccgattcttttgcaatatagccgatcatcttatcgttatactccacctccagcgcaaactgaagattggtattttggtgaatgagactgactaatataataaagctgaccaccggcgcaacatagttaaaaaccgtgccaagggttttgcacacaagccgcaggctctctcgccatatccggcttttttctctgcggacctcttttggccccaattcttccgccagcgcaaggcgttcttcctgactctgtttcaggcgctgtacctggcggtatggacgcatggcgtcattcatggcaaaacggaatttacgaccgacaaggatcaggcgtttcttgatctttagctgaaaccccagacgggtactgacagcaaaacggaataaacgctttttataacgtctgaaataacgaatcagctggacgccagtataataacaaaaccgataactttttaagacggcgttccacgccatgtcctgcaaagaacggttttccggcagatgctgtttggacattgtcatctttttaccggcattctggctgctttccatgcattcctctcctttctttcgcggcacgatactccgcttgattcttccttcattatacacactctgactttttaatcaaccgaattcacaaaaatgtaaaaaagttgtggttaaatcccacaaatatgtttctgaaatcctctatataaattgtgcaatatgaatccaaatgtgtttttcttgtgatgaacccaagtcttgggcaatttgcagtttttggctttattccatgcaaaaatggcgttttttcccatcggcacatggcaaccttccgattgaaagactcatcgcattggccaccgccatcatagttatcccctcttttgccagatctttcatccgctccagcattgtttgactatttccggatacagtaaacggtccggctcatcaaacagcatgatatccggattcctcgccagcgtgctgacatctgtttggggcagcgatttttcccttttgacccaaatctctccgccttcaggctgttcctgccagctcaacagcaaaaagggggatttacacgatccggagggattgtatccatattttgtcaatcatcaagcgttttggggaaatcggattcacgccactctattttggcgttttccaaagcctttttgaaagattcatacaaaggggcagtcaactcaacccgctctccgttgatgggatggagaaaacggcagcgaaagcagtggagcgcctgatgggggatgatccttaagtccccgccgtaccaaacgtcacccgccagcggatacccccaataggacatatgcacccggatctggtgcgtccggccggtctccagccaaagccttgccaggctatacccgtccccttcggcaacaatctcatagtgggtgatagcaggctgcccctccggtgaaacctcgcgcaaaatatgcacgggatcgacccggcggatcggagcgtctacggtccccaagcgctgttgcgggcagccgcagagaatggccaagtattccttttccacattgccggccagccgggacgccgtataaggatccttagccaccacaacaatgccggtggtatccttatccaaacggttgaccggccggaatggaagcgctgtcccctgggcggcaaatacattgcccaacgtatcgttctgatgccttttcacgggatgacaaggcatattccagggtttattgaacacgaccagagacgcatcttcatacaataccggaaccttcgccgccaaaggagaagtctccgtctctttttccggccagcgcagaatgatccggtctccggtccgcaccgaatcaacggtacggaccggcctttcattgcaaaacagtccccacggcccatccagccttttgagtgttttaatcagatggtaggaaacacctttcccccggcggagaaaatcgttgacggtgcatccgtcgaatgtggctggaacctcaaagatcaattcgctcaaagctgcccctccctttctctcagtataccagacggccaagcttttttctatgcaaaaggcggctgaaacagccgcctttttatgtcttctcttttgtctggccgcacagaagatcagcgcggattaatcgcagaccttgacgctccatccttccggaccggggacgcgtccccactggatgccagtcagctgatcgtacagcttttgagaaatcggaccgattttgccgtcgctcagctgcagaacatgctcgtcgatcttcagctccccaatgggggaaatgactgccgcggtgccgctgccaaacgcctctttcaagcgtccttcctttccggcctgcagcagttcatccaccgacaggcgccgttcgctgacccgatagccccaatttttcaaaagctcaatgcaggacttgcgggtaatgccgggcaggatgctgccagtcagcatcggggttacaatctcgtcatcaatcacaaagaacacgttcatcgcgccgacttcttcaatgtatttgcgctctacgccatccagccacaaaacctgggaataaccctgctcgtgggctacctcctgcccttttaacgagcaggcgtagttgccgccggttttggcctcgcccataccgccgcggaccgcccggacatatttggtttccacatagattttaaccgggttaaagccctgaggataataggcaccggagggagacagtacaatcaaaaacaggtaagttttggaagaatcagtgcccagtttcgcctctgtcgcaatgacaaacgggcggatatacaaagaagtgccaggcgcatgcggaacccagtctttatccagttccaccagcttgtgcaaagcatccaggcaaagtgcctcgtccagctgcggaatgcacatccggtcattagagcggttgatgcgcttgaagttttcatccgggcggaacagcaggacctgtccctcgtcaccacggtaggctttcaatccttcaaaaacctcctggccatagtggaggcatttggcaaaaggatccagttcgatcgggccatagggaacaatgcggggatcatgccagcctttgccctcggtatagttcataataaacatgtgatcggtggtaacagcgccgaatcccagtttggtttcgtcctgcggcttctctttcggcgtagtggtacgtacaatcttgatttcgctcatctttgattcacaccttttctccattgattcttatacagcctgaaaattttttaaatatgtgtttcattttagcactttaacgtgcagaatacaagtgttttcccgctaaaaacggctacattcgggcagccgtttttgtgcacatctcccgccgcctgacaaaacaaacggcgctgataaggaaaatacggcttaccttgccgaaccgccccacccgcgccgcattttttcaaatcaaacgaactttaaaaagtcaggccataggccagcatggtatcggcaatcttcaaaaagccagccgcgtttgcaccgacgaccagatttccgtccgcaccaaattctttcgaagcacggtacgcattattgaaaatgcccaccatgatttcctgaagctttttgtccacctcttcaaagctccatccgtaacgcatggaattctggctcatctccaggccgctggttgccacaccccctgcattggccgctttggccgggccaaacaaaacgccctttgccaaaaacagctccaccgcatcgggagtgctgggcatgtttgcgccttcggcaacggcgatcacaccgttttccaccagctgtttcgctgcctcgccatccagttcattctgcgttgcgcagggcagtgcgacatcgcaaggaatcgaccagattccccggcagccctccgtatattccgcaccggagacctccttggcatattcggagattctgccgcggcgaatctctttgatctgtttgaccacatccaactggatacccgccggatcgtaaacatagccggaggaatcgctcatggcaatcacctttccgcccagctgctgggttttctcagccgcgtaaatcgccacgttgccggaaccggaaatcaccacatttttgcctttgatcgaatcctgcttcatgtttttgagcatctcttcggtaaaatacaaaaggccataaccggtcgcctctttccgaaccagagaaccgccataggtcagcccctttccggtcagtacgccggtatgttcatttttaatctttttatactgtccgtataaaaagccaatttcccgtgcgcccacgccgatatccccggcaggaacatcggtatccggcccgatgtgacggcacagttcggtcataaagctctggcagaaccgcatgatttcaccgtcagactttcctttgggatcgaaatcagagccacccttaccgccgcccataggcaggccggtcagagcgttcttaaagcactgctcaaagcccaaaaatttaatgatcgaagcgttgaccgacgggtgcagccgcaagccgcccttgtagggaccgatcgccgaattgtactgcacgcggtaaccgcggttaacctggacttttccgttatcatctacccaagatacgcggaactgcaaaaaacgctccggctctaccatccgctctacaataccggcttctttgatatccggccgtttttccatcaccggttccagcgattccagaacctcctgcaccgcctgcaaaaattccggctcgccctgatcccgtttgcagaccttttcataaacctctttcatataagcgctcttcaaagccatgcgttttcctccttttgcataattggctgtaatgaacacaggcacaataacattcatgtatccattataccgaaaacaatttcgtttgcaagatttttttgcaggatttttcctatttcatgcaaaaaatggcagggggttaatatatggtgtatatttgctggttttcctgtcatttccactgtataaaaagataattttttcggaaaacggctagccaaccccctaaaaatatgttattctgagtaagaaatgtaggttttgcctgatttcttcgtttttgtattagaaaccttttaaaggagtgttccatatgtattgtagacattgcggcgctgaaatgaattccgatacaccggtctgcccgtcctgcggcgtatcctccggttccggcagtacttattgcgccaactgcggtgtcgaatgccagcctggtgcggtattctgttcccactgcggctgccagtttgcaccggaacaggcacagcagacctattatcaggatccctcacagcagtcctgtcaaaaccaggcgtattcgggagcggatcccggctatcaggcgcctggccaaggctatcagccgccggtttatcccccggtcggcaccccgctaaaatccaaaatggccgccggactgctgggtatttttctcggcgcctttggcgtgcataatttctatctgggatacaccaccaaagccgtaattcagctttgtttaaccttgctgtcctgtggtattttaagctttgcttccggtatctggggctttatcgaaggcattatgcttttgacgggcagcattaatgtagacggcaacggaatgccgctacagcaataatcctttggtttctctgcgagcaggcagaacagcagcatgcgcagcgccgaaaggccgcgcatgaggaaagtccgggcttcacagggcaagggtagctgctaacggcagccggaggcgactctagggaaagtgcaacagaaagaaaccgccgttttaaacggtaaggatggaaaggcgaggtaagagctcaccagcgtgtgggagaccatgcggctatgtaaaccctatccgaagcaacaccgcaaaggggcgaaataccgcttgcccggcgggccccgtccaggtggcttgaacccctcggcgacgatgggtctagaaagattgctgtttttaacagaactcggcttatatgcctggtcgtatagattttaaaatccccgctgacaggcacgctgttatcatggacggaattggtcttctgttctctgtcggtgcggaacaataaaaacaaccgcagctcatcgtttgatggtctgcggttgttttttcaatcgtgtatgaaacttttttgcagaactttttaacatgggacgtgtcactgcggtacagcctaaaaggagaaaggattgcgttctgcatcccgttggaatctgctttatatgacggtttgatccctagttcagacacgttaattgcttagaagaaatcaaaaatccggcaggaaaaacaagcggaaaaatactggtcctgcccggataagggactttgtaccaacgtagaaaaaagaggggctttctctttccagaaaccccctcttttttctatttccacaaaagctttagcagccacagggaacaaactcctggcgctcccaataggaccgctgaaactgccgatgcaagattaagcgacaaggccacgcctgtcagccccgaaagcagattcaaaagccaaaagctcaagccgcccccaatggtgctggtcaaaaagcagcgaaccggacggcccgttttcacaaacaaaaaaagcatcaatattcccaaaccgcatacaatccagatcagcattttcctcactccgttattccgatggggaacttctgattccccaaacgggacttttgtttctttgcctcccgcagcaaaaaacgatagcgggccgcaagtgcattggactcatagatatagctctctaccaaatcttcgtcggtggtcatgttgaagttggaatcgacccgctcgatttgtgcgcgtagaagctccagatcccgcagaagatcccggtactgctccatcgcctcccgatcctctttttccctggcgaacagcctgatattttttaaaataccctccatatctctttccgcctttccacaaaagtctatgcggaaagcttgggcatttatgccagtatttatacaatctccaaacggttatccagctaattccggcacatactatccataaattccgatagggaggaaatcatatgaaaaactttggtacagtgggggaccgatattgccctgcccagcgaagaaacgtcccggtagaaatttggtgggataacgacggtaatcgccaggaacagtgcctgaagcgcgaaacttgttctcataaagaaagttatgctgacaaccgcggcgctccctgccaaaccatttaaatcaggccgtactttcaaaaatgccccttgccgcagcgccgcggcaaggggcatttttgaaattttagttttcttgttccgccaaaagagtcgtctcatccagcacaaaatcaatctctccggaggagacatctgtccgtgccactttgatccggatgcggtcgccaatccgaaaccgtctcccgctgtctttgtctttcacctcaattttgccatcgtattcaaaatgtcccggcatttcagaaatacggatcattccctcaaccgtgttgggcagttctacaaaaatcccccgctctatcacaccggaaaccatgccttcgtagctttcgcccaaatgcgaactcatgtattccgccttgtagcaatcctcacagctgcgttccaccgacatggctctttgctccgccgtactggagtgcactgccgcatcctgcacaaatcttccaaagcggcgctgcatttcctgtgcagccgtccccttgagcgattcgctcataatccgatgaattgccaaatccggatagcggcggattggcgaggtaaaatgcgaatatttttgaagcaccaggccaaagtgtcccttattcacctcggaataccgagccttggccatggaacgcaaaagctgactgttcaccagcatctgcatatcggtcccttttaccgcttttaaaacagcctgcagttctgagggctgtacgcccggtttgatttgcaccgtatccaatcccagcactttcagcagctctgccagcgcctccagtttttcggctgacggatcttcatgaatccggaacaaaaacggaagttcccgcgccaggccaaaggaagccgctgcctcgttggccaccagcatgaactcctcgatcatcccttccgaaaccccgctttgccgcggaacaatgtcctgcacgcgcccatcctctccgatcaggattttggcctcggtggattccaaatccagactgccgcgctgtgaccggcggtgggccagccgatccgccaacgctttcatctggtgcagtatcggctctaatccatcgtattttttgtgaatcgcctcttccgccgtaccgtctaaaatctggttgatctcactatatacgcccttgactctggatcgaatcacggttttgcggaaatcatattccaccagtccgccatcttcatccagacgcatcagcgcggaaaaggccagacggtcctcctgtggattcagcgagcaaatcccgttggaaagctccttgggcagcatgggaatgaccgcattcgcataatacaccgaggtgccgcgcccaaacgcttctgtatccagcgcagactgcggccgcacataatggctgacatccgcaatgtgaacgcctaatccccatccgttctccaaccgggtcagagagatggcgtcgtcaatatccttggtgtccgcaccgtcaatggtaaaaataatctccccgcgcaaatccagccggttgtctatttcccgctgggaaatccccttttcctgtatctgccgcgcttcctccaacacctggggaggaaactgtttttcaataccgttgtccgccagaattgcctcgcagcaaactgccgccagctggctggaaccgaacaccgccgtgaccgccgcccggtggtcaaaatgtctccggccgcgtttgacaatacgcgccgacaccttatccccttcttttgcaccgccggtttcggttctgccaaccggtaccggtcctttcatctgtgcatccggatataccacaggcagcccatcctctacccggaaaattcccgtaaaatggtaatcggcctcttccagaatgcgcagcacctctccctctttcagattgccgcgtccctgccgtaccgaaattttcacacggtcgcccggcaaagcacccattaggtagcgccccgggatgaaaacatcttcttcggcttcgtccgggtggacaaaaccaaacccttcggtcacctttactaccaccgcttcggcagtttgcccctggccggttttataatagcggtcccgtttttgctgaaccacaccgcttttcaccatacctgccagtaccaataaaaacgcttcggtctgatggcgccttatacccgactgctcctgtaaatactttgcagaagcgccccggctgcccgcccgctccaacacgcgggtaatctccttttgaaaatccggccgaactgccggcttttttcccggtctgcgcagccgggaatccttcttttttgatgtttgattatacttcattcttttcctttccgattctctctttcttttcattcttccacgttttgaccaaaataaaatcctccgcccgaaaacctccagaatttttcaggacaaattccaaagggcaaaggcatgcaatagaaaagccctgccaacggcagggcttttggacattattagaaataaatgcttaaaatccaaaccagaaaagttacaacaagaaaagccgcgccgatcactttcgtatatttggaaaggagcacatccaacgtttttgctctgttcttgccgtagctctggggctgagcgccgcccagcgccgaagcgccgccgccttttccctcctgcatcaggaccataatgatgattgcaatggccatcaagatcagcagaataccgccgattatttcaaatgcctgcatagtgcacctccgagtaattctgtttaacattattatcatagcatagtttgttgatgtttgcaacattttttagaaaaaagcttgggaatcttttttgcagtgcataaaggaaaaaacgccggaaatactgttactggttatgcaggagctctttatccctgttgcgtttgagagggcgccggcaaaaccgtcaggctgccggcgccctgcgcaggcggccttttttcttttccgccaatcctgcaatgttactgggtttttgttgcgccggttaatccagtaaactcaactgttcgcccaaatcctgttccttgggaatcgcccctgctgccggcagagacttggtacgaaaccggtgagcgttattgagcatttgctccgtaaaaggaacaaccgtgtccaccaccgcattctttttcagcgtcattacggcaacgccctgcgtatctctggtttgcttgggattgatggctccggtatggataatcagcgtacgcccaccggtagcgcgcagcagaaattcccggtcttccgatacataaaaagcacctgccagcgaatctttgccactatatgcattggccagttttttgcggttggttttggtctcataggcgctcatttccactttggccacttttccaccctgaaagaaaaagagcatatagccggtatattcctgcaccgccgcaaagcagacaatccgctcgccctcatcaaagctcagtttggccggtacatagtcgcccattacgctggccttggtgtcatcaaaatcatatgcgtgggatttatatacctgctgccggtcggtaaaaaacagcagatgcgcccggttggtgctctcaatctccgaaaggatttcatccccttctttgagcttttgctcggaactcatgcgcaaagattggggggtaatttttttaaagtacccttcccgggtaaaaaacaggtgtaccgggtaatcgggcgtttcttcctccgcctcttcccgtgcgggctgcacatcgtaaagaatcagactgcgccgcggctgggcatattttttcttgatctcctgcagctctgaaacaataatgccccgcacctttttctggtcgcccagaatttcctccatttgtgcgatttcttctttcaagctttgagtctcgtcagtccgctttaaaatatactctctgtttaaatgccgcagtttaatttccgccacatattctgcctggatttcgtcaattccaaagccgatcatcaaattcatgacgacttcggactcttcctccgtctgacggatgatgtgaatagctttatcaatatccaacaatatttttgccagtccttgcagcaggtgcagcttttcctttttctttttcaggtcaaaatacacccggcgttttacgcattcctcccgaaaggcaatccattcctccagcagctcccgcgcacccattacccgtggatatccgccgatcagcacgttaaaattgcaggacatagtgtcctccagcggcgtcatgcgaaacagtttctgcatcagcttatccggatcaacgccccgtttgagatcgatggcaattttcagccccgataaatcggtctcatcccggatatccgcaatttcccgcattttaccgtttttcaccaactccacgatcttatcgataattacctcgacggtggtggtaggcggaatttcggtgatttccaggcagttggacgccttgtcataattgtagcgggcgcgcacccggacgccaccgcggccggtttcgtaaattttcctcaattcggtttcattataaaggatataaccgccgccgggaaaatccggcgcggtgagggtcgtaagcaggtcgtggtcagcattcttcatcatggcgatagtcgtgtcgcacagctcctccaggttaaacggacagatggcgctggccatactcactgcgatcccgatattggagtttaaaaggatgctggggaagcgcaccggaagcagagacggttccttcatacttccgtcatagttgtcctgaaaatccaccgtatctttgtcgatgtcggcaaacagctcattgcagatggagtccagcttggcttcggtataacgagaagccgcataggccatgtcccgggaataggccttgccgaaattgcccttggaatccacgtaagggtgcagcagcgcttgattgcctcgcgctaagcgcaccatggtctcatagatcgccgcgtctccatgcggattcaaccgcatggtctgacccacgatattggccgacttcgtccgtgctcccgtgagcagccccattttatacatagtgtataaaagctttcggtgtgccggtttaaagccgtcgatctccggaatggcccgagagataatcacactcatggcgtagggcataaaattggtttccagcgtctgtgtaatcggctgttccataacaacaccggcattttcgatttctgccgctatgtttgccgtacgctttggtgccggcatttttttctttttgggagccattgtcttcctcctatctttttctgatttgggcctcatacccgcatttcaaagaagcagcctgtggcttccatccgttttctactgcaatctttccatcaggaaacgtccgccgcgtctaaata

SEQ ID NO: 3746 - DNA, 12542 bp, Unknown
  16S sequences of unknown bacteria
gctcgagcatcggaacctttgcggctatcgcgtaatggcgcgagtcctgctcgttctgagacgaatgcatcgcgggatcgtccgccacgcagatcacaagtccgccgttcacgccggtatacgacattgtaaaaagcgggtccgcggcgacattcattccgacatgcttcatcgcacaggcgcttcgcgcgccgttgagggacgctccgaaggcgacctccatggcgaccttctcgttgggcgcccattcgcagtatatatcctccatctttgccgcgaattccgtaatctccgttgacggagttcccggatagctggagatgacggtgcagccggcttcccaaagcccgcgtgcgaccgcttcgtttccgattacaagtttcttcataagtacctctttatttttatttcatttctgtaaaacgtattgaattttccccggtcggggaatataataaataaaaccgaagcaaaggaagaaaaaacagtggtaatagattttcacactcacgcatttccagacaagatcgccgaaaagacgatcgcgatacttgccgatcgcagcggcaccgcggcgagcaccgacggaacggttgacggtctgatcggatcgatgaaagatgccggagtcgatatctccgtcgttctcccggtcgttacaaagccgtcgcagttcgaatcgatcaacgctttcgccgaaagaataaactctcttccgggcataatctcgttcggcgggatacatcccgactgcgaggacagcgaaaaaaagatcgacgcactcgccgacgcgggttttcgcgggattaagcttcatccggattatcagagcgtatttatcgacgacgaaagatatatccgcataattaagcgcgcggtggaacgcggcatgatcgtttcgatccacgccggactcgacgccggacttccggagccgatacactgcccgcccgagaaaagcgcccgcatgctcgatctcgtttattccggcacagactgccgtgatgcgctgatcgtgcttgcacattcgggcggatgcatgatgaccgaggacgtaaagaaatatctcgccgggcgcaatgtatggtttgatcttgcgtacaccgtcggcgaatactccgccgaggaaacgtgcgaagtcatacgcgcacacggcgcggacagaatcctctttgcgacagatcttccgtggaacacgcagaaagcggacatcgaaaagctccgctcactcgacatttccgaggaggacaaggaaaagatcctttggaaaaacgccgcccgccttctcgggctgagccgcggagagctcgacgcgaaatcgctcttctctccctcgctctcataatattatattgtattacaaaatccgcgccatttcaagtacaacgtataaaaaacttgcccttcggcgcaatttcgagccttattctatccgaattataccgcatagcagcgcaattgtcaaccattttgaaaattgcaggttgacaattgcgcttttatatagtatactgtctgtggaatttttgccgcgcgtcgttctgcacggcagatcaaccaaagaaaggaaacgggctgcggcgaagttcggaatgtctccgtaatccgcagccgaggtgaaaatatggcatccggaaaaatcaaaacggcggacaccgtggtatgcgcgctgttcgcggcgataatatgcgttatatcaccgtggtcgcttccgatatcgggcgaggtgccgatatctctcgccaccgccgcaatatatctcgcatcggcatgcgcgggctggaaaagagggactgtctccgtgctcctgtatatcgtgatcggcgcactcggtgttcccgtattttcgtcatttcgcggcggactttcggtgatcgccggaccgacgggcggatacataatcgggtatcttccgtgcgcgtttatctgcggctttataatcgaccgtatcggaaacggaaagaaagctgccgcgtatcccgccggcatgatcgcgggcacggtgatactttatgccgtgggcacggcgtggtatatgttcataacgaaaaatccgctcatcccctcgcttgccggatgcgttcttcccttccttccgggcgatgccgcgaagatcgccgccgcatcgcttctcggatacgaactgagaaaaagggtcatctccgggcggctgtaaggcgcgcccgcgcaaatcaacacgaaaatcacggtgatctgcccgcgatatgcggcgcagatcatttttttcttgattattcacgtttgttgtgatagaataatatgcggattattatgcaagtaactatttacggaggaaaaaatgccgtctccttctgaaagacaaaagaaaattcgcaatttctcgataattgcgcacatagatcacggaaaaagcactcttgccgaccgtattctcgaattctccgattccgtcgcaaagcgcgacatggaagatcagctcctcgacaacatggagcttgagcgcgagcgcggaataaccataaaggctcgtgccgtccgcatagattacaaggctcaggacggaaccgactatgagcttaatctgatcgacacccccggccacgttgacttcaattacgaggtgtcccgttcgctcaacgcctgcgaaggggctcttcttgtcgtcgatgcgacacagggtattcaggcgcagaccttggcgaacgcatatcttgcgatcgacgcggggcttgaaatcgtccccgtcataaacaaaatagacctgccgtcagcggatgttgaccgcgcgcgaaccgagatcgaggacgtgatcgggattcccgccgagggatgccctgcggtgtccgcaaagaccggactgaacatctccgatgtcatggacgcgataatccgcgatgtcccgcctccgacgggcgacgcggacgcgccgctgcgcgcgctcatcttcgactccgtctacaacagctatctcggagttgtcatttacatccgcgtcaaggaaggaaccgtccacgccggagaccgcatatcgctcatggcgaccggtgcggaattcgaagcgaccgaggtcggaatgctcgacccgttcggcgggctcaaacccctcgacatgctttcggcgggcgatgtcggctatatcacggcttcgataaaaagcgtctccgaaacaaaagtcggcgacaccgtgaccctcgcggacaaccgtgcctccgagccgcttcccggcttcaagtcagttctcccgatggtttacgccggaatctatcccgccgacggtgcgaaatacaacgaaaccaaggacgcgctcgaaaagctccgtctgaacgacgccgcgcttgtgttcgagccggaaacgagtatcgcgctcggcttcggattccgctgcggatttctcggacttctccatatggagataatcgaggagcggcttgaaagagagtttaatctcgacatcataacgactgcgccgagcgttatctataaaatcaagaagcgctccggtgagaccgtcaccgttgacaatccgtccgattatccgagccccgacgagatcgaaacggcgttcgagccgatagtcaacgccgtcatcattaccccggcggaatatgtcggcggaataatggatctctgtcaggatcggcgcggcatattcaaggatatgaaatacatcgactccgaccgcgcggagcttcactacaggctccctctcaacgagataatctacgactttttcgatgcgctgaaatcgcgcacgaaaggctttgcctctctcgattacgaattcgccggatatgagccgagcgatctcgtgaagctcgactttatgctgaacggcgatgtcgtcgatgccctcaccttcatagttcacgcggacaaggcatacgcccgcgcgcgccgtatcgcggaaaagctgaaggaaaacattccgcgtcagctctttgagataccgatacaggcggcgatcggctcgcgcatcatcgcccgcgaaaccgtcaaagcgatgcgcaaggatgtccttgcaaaatgctacggcggcgatataacgcgaaaaaagaagctcctcgagaagcagaaggaaggaaagaaaaagatgcgccagctcggctcggtgcagatatcccccgaagctttcatggcggttctcaagctcgacgacgaataaaaaacgctttttccgaaaggcattgcaatgctgtacaacaaaccgaaaaggctcgggctgtattttcacatcccgttctgcctgtcaaaatgcgcgtactgcgatttcttttcatttgttccgacgaatgaagagctgatcacgcgctatatcaacgcgctcataacccacatggaggaatacgaaaacgccgcggaggattacaccgtggattccgtattcatcggcggcggcacgccgacctgcgtccccaccgaggagctcgtgcggctgatacgcgcgatgaagaaaaacttcaacatatcgaaaaacgccgaattcacgatcgaatcaaatcctgcgaccgttgacatgcattccctcaaaaagctgcgccgctgcgggataaaccgcatttcgatcgggcttcagaccggggacaacaacgagctgcgcgcgctctcgcgtattcacacccgagcccagtttgaacagtcctaccggattgcccgcgaggcggggtttaccaacataaacgtcgatctcatgttcggtattcccggtcagaccaaggaaagcctgatgcggaatctccgttatctgatacggctgaatccggagcacatttccctctacaatctgaagatcgagccgggcacgccgttcgacctccaccgtgcggagcttgctctgccgaacgaggatgaagaggcggacatgtatctcgctgcggtcgaatatctgaacgtgcaggggtatccgcagtatgagatcagcaattttgcaaaaaacggctgtcggtgccgtcacaatctcaagtattggcactgtgaagaatatctcggcttcggtccgtccgcccactcatacttttcaaattgccgcttctcgttcgtacgcgacctcgatgcgtatctcaacgcaatagaactgccgtcgtcgagaataaagctgaccgcacagtgcgacgaaatatccccgcgcgagcgcatcggcgaatacataatgcttcatctgcgcctcaattccggagtgcgcctttcggaattctcccgcgaattcggtcaggatttcgaactcatgtacggtcggaagatgcagcgatacatcgatgcaggctttgccgtgcggcgcggtgattcgatcgcgctcacgccatctggaatgttcgtgtcgaattacattctgtcggatattctcgattttgccgacctcggcggcgaaatcttcaagggataacaagcagcttacggggaaagcgtaattccgtttttcacccctgatatcaactcatacgcaaaaggagaagcttttgcacgtcaaaagccgtactcgaaataaatgaagatcgcagttgcaatgagcggcggagtggacagcggaagctgtgcatatctgctttcacgtgagggattcacggtgctcgggctgacatttgaaatgctcccgccgtgcaaaatttccgccgatcgcgccgaagagtcctccgtcacgctctcccctgccgaaggcgccgcacgtctctgcgcgcagatcggcgccgaacatttcaccgttgacgagcgggaaaatttcaaaaaatgcgtcattcagccgttcatcggcgcttatctcgcgggtgagaccccgaacccgtgtgttttatgcaacaaaaagatcaaattccccgaaatgttcaccttcgcggacagtcacggcgcggagttttgcgccaccgggcattacgcgcggacggaaaagtgcggtgattcgttcattctgaagaaggcgctcgatccggcaaaggatcagagctacgtcctttggaatcttacgcaaaaggagctcggcaggctgaaatttccgctcggaatctacacaaagcctcagatacgcgagattgcggatagcgccggacttgagtgcgcgcacagtaaggacagccaggacatctgcttcattccggacggagattacgcttcgttcatcgaagaaaactccgcttccgtcccgccgtgcgggaactacatatccgaggacggatgcgttctcggcagacaccgcggacatcaccggacgactctcggtcagggaaaaggtctcgggatcgcgctcggcagaagagtttatgttatcaataaaaacgcctcggacaacaccgtcacgctcggcagcgaggaacgtctgtacaaaaaacgcgtgaccgcggacagcataaacataatctgccccggcgcgctcgaaaagcgcgaacgcttttcggcgaagatacgctacggacgacgcgaaaacaccggctacgccgaaagaacgggcgaggatacgctcacctttgaatttgacgaggctgtgcgcgcgccgtcgcccgggcagtctctcgtaatttacgccggcgactgcgtggtcgccggcggaattatccgccgtgcggactgatttttacattttccgcaattgtaaaatatagatatgttttctgcgtttgcggaaaacatcggggaggaacccttggaagatatgtattcccgcacccgtctgcttctcggagacggcacggatgatctgaaaagctcgcgcgtcgcggttttcggctgcggcggtgtcgggtcttatattatcgaagctctcgctcgcgccggagtcggtgagatcgccgtgatcgacggcgacagcgtagcggaatcaaacataaaccggcagcttgtcgcagacagaacgacggtcggtcagcggaaagccgaagtcgcgcgagagcggattctacggataaatcccgactgccgcgccgtcgcctacgatatgttttacaccgcagaaaatgccgatgcgatcgatctttcgcactttgattatgtcgcggacgcgatcgacaccgtgacgtcaaagcttgagataatctcacgctgccgcgcggcgggagtgaatatcataagctctatgggcaccggaaacaagctcgatccgacaagattccgcatcagtccgattgaggagacctcggtatgtccgcttgcgcgtgtgatgcggcgtgagcttaagacgcgaggcatcacaggagtacgggttctctggtcggacgagccggcgcgtgcaccgctgacatccgacggcgaggctcccgcccccggaaggcgcagcgttcccggaagcgtttcgttcgttccgtcatgcgccggactgatcattgcgggagagataatccgcaccctttccggggtacggtaatttcgcgttccgcggtaccgatgctgtacttcatgcagaggttgatgcgttcccgcggaaaatgcggcggtgcttcggtgcagttcccgcagcgaagccgcaaagtgccgtaagaagtattcggcgtatcccgtgccgtaaagacctcgaggcgccaaacgcggcgtaactgaaggaattcgacagggaacggcaaaagatgccgaagtcaaacgcttttcgacaaatgcataaattacagcatggatttttcgcgtccggattccccgcaagcctcctaagctattgacacgcagaacgtaaagtactataattacatgtattcccgataaagcagtaaataacacgccgccgcacgcggctgaaaggtataaaaccgtatgttcaaggataaaaaagtcgttttctcgggcgttcagccctccggtcagctcacgatcggaaattatctcggagcaataaagaatttctccgtgttctccgatgagtacaaatgctactactgcgttgtcgatatgcacgcgataaccgttcgtcaggtccccgcggagcttcgccgccgcacctacgaaacccttgcactctatatcgcctgcggactcgatcccgcgaagaacacgcttttcgtgcagagccatgtcgccgcacatgcacagctcggatggatcctcgactgctacacgatgttcggcgagctttcgcgcatgacgcagttcaaggacaagagtcagaagaatgccgacaacataaatgcggggcttttcacctacccctcgctcatggcggcggatatccttctttatcagacggagcttgttcccgtcggaatcgatcagaagcagcatcttgagcttgcgcgcaacgtcgcggagcgcttcaacggtatctacggtgacacgttcgtcgtgcccgacggatatatcaacacctcgggcgcgaagataaactcccttgccgagcccgacaagaaaatgagcaaatccgattcgaacgaaaatgcggtcgtgcgcattctcgacggacgcgatgtgataattaagaaattcaagcgcgccgtcaccgattccggcgccgaagtgcgccgcgccgacgacaagcccggcgtgtcgaatctcatgacgatctattccgcgtttacgggaaagagtgacgaggagattgagcgcgaattcgaggggcgcggatacggagacttcaagcttgcggtcggagaagcatgcgcggacgcgctcgctcccgttcaggctgagtatgaacgtctccttgcggaccgcgcatacctcgagagcgtaatgcgcgcaggcgccgaggatgccgcatacgccgcatcacgcacgatgtcaaaggtcaaccgccgcataggctttaccgatctgaaatgaaaacggtatataccgcggaccgctccgagggcgggattttcgtatgcttttccgaaagcggagacaagatcgaaattcccgccgagtccctgcctgcgggcttcggcgaaggatggcgcatcgtgttcgaggacggcggaaacggggtaatatccgaaattcttccgcccgacgaagagaagataaagaacatcagagcacgtttcgataaaattttcaaaaaaaactcttgacaaactcttttcgcggtgctacaatacacccaacgacaaagaaaggcagcaagtaaaaatgacgcagatcaatctcttttacgcatacttttacttttactttattacgctccgtaataaggtttgtaagttatgctgtaattgagaatgcgccggtttacgatatgcatcccgcagtataatttactgcgggatttttgtatttttgccgaaagaaaggatcacacgaaatggtagtacttctgaaaaaaaacgccgatgaaaagcagcttgaaaatcttgttgcatggctcgcatccctcgggatagacgttcacaaaagcgaaggcgaatacgagacggttctcggactgatcggcgatacaagcaaagtcgatatcgacttcatccagagcctcgggatagtcgaaaacgtaacccgcatatcggagccctacaaaaacgcaaaccgcaaattccatcccgaagacagcgtagtcgaggtagcgggacacaagatcggcggcggacattttcagataatcgccggaccgtgctcggttgaatccgaggagcagatcatttcaatcgcgcgtgaagtcgcggcggcgggcgcaacgatgctccgcggcggcgcgttcaagccccgcacatctccctacgcattccagggacttcgcgccgaaggtctcgagcttcttcttaaggcgaagaaagagaccggaatgccgatcgtcaccgagatcatggatctttcccacattgacctgttcgccgatgtcgatctgattcaggtcggcgcgcgcaatatgcagaatttcgagcttctcaaggaactcggtcattccgacaagcccatacttctcaagagaggacttgcaagcacaatgcaggagcttctgatgagtgcggaatacatcatggcgggcggcaacgaaaacgtgatcctctgcgaacgcggaatacgcacattcgaaacgtacacgagaaacacgatggatgtttcggcgatcccgctgctccacgaaaaaactcacctcccgataatcggagacccgagtcacgccgccggaatctcccgcatggtagagcctctctcgctcgcatgcaccgcggcgggagccgacggtcttatgatcgaggtacacaacgaccccgcgcacgcactttgcgacggtccgcaggcactgcgtcccgacgcttttgcaaaggtggtcgaaaaggtaaaaaaggtacgtacggcgctcgacctcggcaacgccgccgagtgagcctcataaacgaaaggaaaacgcgaaatgaatgtatcggtcatcgggctcgggctgatcggcggctcgtttgcaagagcgcttcgggaaaaaggtcacacggtattcgcctatgacgccgactatccgacggtccttgccgcaaaagcggcggaggcgatcgatgcgccgtgtacggaaagcgcactttccgcatcggattttataatcatcgcactttatccgtcagccgccgcagaatttctcgaaaagaacgccgatgtcatacctaagtcggcaacggtaatcgatgcctgcggcacaaagcgcaaggtctgcgaagagtgcggaaagatagccgaagcacacggcttcacgttcatcggcggtcatccgatggcgggcagccaatactcgggatttgcgcactcacgggcgggattgttccacggtgcgacgatgctcctctgtccgagggaaaacgaggacatcgcaaaggtcgagagcgcacgggactttatcctctcgctcggcttcgggaaggtccactttacctcgcccgaggagcacgatcggatgatcgcgttcacgtcgcagcttgcgcacattgtttccaacgcctacgtcaaaagtccgagcgcgccgatgtgccgtccgttcgcagcgggaagctaccgcgatcttacaagagtggcgcgtctgaatccgacgatgtggacggagcttttcctcgaaaactccgacaacctttcgacggagcttgacaagctgatcgcctcccttacggaatacagcgaggcgctgagatcgggcgacggcgaaaggctgaaatcccttctcgaagaaggggtacgcgcaaagcttacatccgaaaaataacggaaacggagatatatataatatggaaaggatcagcgtaaacgcatctggaaaatacgacgtcgttatcggacgcggactgatcggcgacagcgccggactgatctcaccgcttctcggctcgggaaggcttgccgtgataaccgacgacaacgtgaaaaatttctgtctcggcgcgctgaaagcctcgcttgaaagcgcgggaattccttacgaggtgttcgtcattccgtacggcgagagctcaaagaacatgacaaccctcggcactgcgcttgaatttctcgcgtctcacgctttcacaagaagcgacatgatcgccgcgctcggcggcggggtcgtcggcgatctttccgggctctgcgccgcgatgtatctgcgcggtatacggtatgtgcaaatcccgaccacgctgctcgcctgtgtcgattcctcggtcggcggcaaatgcgcggtcgatctcgcggcgggaaaaaatctcgccggggcgttctggcagccatccctcgtgatctgcgatccctcactgctctccacccttcccgacgcggaattcgcaaacggaatggctgaggtcataaagtacggcgccggctttgaccgcaagctgttcgacatgacgctcggcaatgtccgtgaaaatcccgatccgataatcgcgcggtgcattaaaataaagcgcgacacggtcgagagcgacgaatttgaccgcggagagcgaaaaaaactcaacctcggacacactataggtcatgccgtcgaaaagtgctccggattttctatcccgcacggctcggctgtgtcaatgggactttatgcaatatacaaggcatacgccgccgaagaagcttccgtaatcaagaaagctctcgaggcaaacgggctgcccgtgcagattccgtacaccgccgacgagctgtgcagtgcggcgctgtccgacaaaaagagaaacggagacacggtatcgctcgtgctcccgggtccgatcggatcatgccgcattgagaatgttccggtcgcgtcgctcaacggaattatcgcggaggctctgtcatgaagcttctcatcactccgtcccgtccgagaaaaagcatctgcgcgccgccgtcgaaatccttcgcgcaccgcgccctgatatgcgcggcgctgtcggagcgcgaatgcaccgtaaagctcacgtcggtctcgcaggacatcgaggcgacgctgcgcgcgatctcggcgatcggcgcaaaggtcgaagccgcggacggcggaatacaaatcaccccgatcgcaaacgcacccgaaagcacggtcatcgactgcggtgaaagcggctctaccctacgcttcatacttcccgtgtgcgccgcgctcggaatccgtgcgcgcttcatatgccgcggaaggcttgccgttcgtccgctcggcgatctccgacgcgcgcttgaggagcacggcataagcttcgacggcgatcacgcgatcgaaggacagctcacggcggggg

SEQ ID NO: 3747 - DNA, 15766 bp, Unknown
  16S sequences of unknown bacteria
caggtccgttttccactttatagagcgtttctgtccgggcggctacggcctgggctttgagggcctccagttcaaaggaagcgggcatctcggcccggagcacgccctgtacatagctgtccaggttcattttttgtactgtgtcgccgatttttacccggatggagaccgatgagtcggatacgccgggatcgggtacggtgattttttctttctgggtgttgggaaggatactgcggccggccaggcccataagacccagggcgaataccacagcgatcagcatccatgcggcaatgaggctttttttcatagtgaagctcctgttgtgattgaggtaatgactgacggaacaggctgagcgggaacacgcgcggaaaagtatacaggcataacggtttcagcggtttgcgattgttcaatatcataccatattcgcgccagggagaaaagatgccgccgggaactggcgctgtccggtatttgagagctgcgagcggcgtttacggttgcgcctccggtgcggcggacagctttgcacgccattgatctgcagcggcccgataggcggcatcagcttttcggcagataaagtaatagaccacattggcctgtgcatccgtaatggggatggcagttctgccctgcagcgcatcggttctggcagtggaaaggttggtcgaaaaacaaggaagcgcggattcccgtaccagttcccgaaaggcgaattcatcagtctggatcagaaatttggataccggcatgcagcggcggcacagttcgatccaaaaaccgatttctgaacgcagcaagcaggttaggccgttcagttccgcaaaggtcagactgccccgttccgcgagtggatgattcggcggtacgcacacgaacaaacgctcccgaacaacaggcagacaggcaagagcgcgatcctcttccgggtagggaagaataccgatttcacagcggccggagagaacacgcccggcaatggaagcgggcggagacagccgggaggaaaccgttcgctccggaaatgaggcggacagaaccggcagcagagaccacagcggcgcaggtgcacaggattccacggcaatcgtgtggagccgggcgtgataggagtgcacctgttgcacggcgcctgctgcggcggaaagaaggtttttggcctgctgtactgcctgcagcccggtttcattcagctcaattttatttttactgcggcggaacagcgggacaccaaaggctgcttccacatgtttcatagtgcgcgtaagcgttggctgggatatatgaagcgtctgcgcggcgccggacagggtaccctgctctgcaaaagtgacaaactgctcaagctctgataaattcagcatagtgccctccgcttgctattcattctgtgaaagctgtttttcaatattgctattgtacaatgtttgaaacatcctgtaaactgtcatatgaaaaaagcagataaaagcaagttacatcagaagaatagaaggaggccattttgatggaatatgtaacgttgaacaacggtgtacagatgccgaaattaggctacggcgtataccagacgccgctggaagaaacagcacgctgcgtgcttgaggcgatggagattggttaccgcagcattgatacggcgcaggtttacgggaatgaggctggcgtggggcgtgcgttggaagaaagcggtctgcacagggaagaactgtttcttaccacaaaaatttggatcagcaatgccggttatgaaaaagccaaagcgtccattgcggcttcgctggaaaagctgcgcaccaattatattgatctgttgttgatccatcagccttttggggattattacggcagctaccgcgcgatggaagaggcctggcgggcaggaacagtgcgagctatcggcgtttccaacttttatccagaccgctatctggatctgacccattttgccgagatcccgccagcggtcaatcaggtggagatgcatgtgttccagcagcagaaaaccgcggggacttatctggaacagcacaacacgcagatcatgtcctggggtccctttgccgaagggagaaacgattattttcgtaaccctgtactcaatgctgtcggaaaagcttacggtaaaacggctgcacaggtggcgctgcgctttttgctgcaaagcggcgcggtcgtcattccaaaatccacccacaaagaacggatggaggaaaactttcaggtgtttgatttcacgctctcggaagaggatatggtgcgcatcgaggctttggataaagcaaaagcctgttttttgctcacgacgatccggccgtggtggaatggtttttgaacaggggataaagggacgggtgcgcaatgcgcggcggattttgcaaaaaattgcctccaagccttgcatttggcggcgcaagggcttataatccaatccaaggcggctgaaactgcctgcagaacaaaccacaagtgaagagccgggggggctgccgcgcagctgagagtaaggcgaatgaggcctttgaccctttgaacctgttggatcatgccagtgtagggagtgttgtatctgaagttgcgccgcacctgtgtgcggttaaatcaggacacctattttggcacaaacttgccgggtgttctgatttttttattcaggaggaacatatatgaaaaccagtatcgccatccaaatcgagccgaatatgcccaatgatcaggaagccgtccgcgtagtggacgctgtgatcgactacatccgctctacaggtctgcactattatgtcggcccctgtgaaaccgccattgaaggcgacgacctgcatcagctgctggatattctcgaacattgtgtatatgtggccgcccaggcgggcagcgctaaagtatccggctatgtgaaactggtgtataaggaagagggcagcgtgctgaccatcgatgaaaaagtcacgaagcatcaccagtaagctcccggcggcgctggcgctggttgtggttgccgccctctggtgctttgccagcgaggggggatgggtgcctgcgttcatgctcccctcgccccgcgcggtggtgcaggcgttgctttccgatgcgccggttttggcggctaacgccgctgtgacgctgcaggaggcggcttgggggcttttgatcggcatcgttgtggccctagtgctttccacgctgatgcaccgcgtgcgctggctctaccgggcgctgtatccgattctggtcatcacccagacgattcccaccatcgccattgcgccgctgctggtgttgtggatgggcttcggcatggcgcccaaggtgactctggtggcgctgactacttttttccccatcgccgtgagtttgctggagggctatgccagcaccgaccgttccgccgccgatctgctgcgcgctatgggcgccagcaaatggcagattttttaccatctggagtttccggcagcgctgagctactttttttccggactcaaggtgtctgtatcctatgccgtggtgggagcggtcatttccgaatggctgggtggttttgagggcctgggcgtgtatatgacccgggtgaagaaagcctatgcttttgacaaaatgtttgcggtgattctggtcatcattgccgtaagtctgctgctgatgctgctggtgcgaatcttgcgccgcgcggcgatgccctgggaaatatacgaaaaaacagaaaggaacgattgaatcgtgaatgataaaaaacgcatggctgctgcagcactcgccggcgccctggcgctgagcttgactgcctgcggtggaagtggaaaaaatgccgggcccgattctgccggttcggacaacaatggcgcggcggagctgaccgatgtgacgatctgcctggattggacgcccaacaccaatcatacgggcctgtatgtggcggcggccaagggctattacgaagatgcagggctgaatgtatccatcgtgcagccgccggaggacggcgccaccgccatctgcgccgccggccaggtggaatttgccgtgacggtacaggattccctggcctctgcctttgcacgggaagatcccctcggggtgaccgccgtggcggcgctgcttcagcataatacttccggcatcatcacccgggccgaggacagtattgagcggcccaaggatttggaaggttatacctattccacttggaacagccccattgagctggcaacgatgcagcaggtggtggaagccgacggcggtgatttttccaaagtggatctgattcccaataatattgtggacgaggccggcgcgctcaaagagcaccagactgacgcgatctggatctattacggctggggcggcatttccgctgagctgcaggggctggatttcaactatttttatttcaaggatctggacccggtgttcgattactataccccggtgatcattgccaacaacgactttttggccgagcatccggacacggcaaaagcgttcctttctgctacagccaaagggtatgagtatgcgattgcccatccggaggaagcggcacaaatgctgatcgaaagtgacaccaccggctccctcaaggacagtgccgagctggtgacggccagccagaaatggatggccgatcagtatcaggccgaggcagagcggtggggttatatcgatccttcccgctggaatgctttctatcgctggctgagcgacaacaatttggtggagcagccgattcctgagaacaccggcttttccaacgactatctggcctgatggaaaaggagtctgcggtgctttgcgccgaccatatttcgaaatggtatgatggacgctgcatcctgaaggatgtgtcgctgcacctggaaacgggagagctggtatgccttctaggcgtcagcggcgcggggaaaaccacgttgtttcacacgctgtcgggactggaaacaccggaggaaggccaagtgtttctctccgggcaggagatcaccgggaagcccggctcaatcagctacatgctgcaaaaagatctgctgttgccgcataagaagatgctcgacaatgtggcgttgcctctggtgctgcgaggggaaagcaagcaggctgcccgggagaaggcccagccctattttgcgcagttcggcctggagggaacggaggcacagtacccggctcagctttccggcggcatgcgccagcgcgcggcgctgctgcgcacgtttctcggctcccgcggtgtggtgctgctggacgagccgttttcggcactggatgccctgaccaagcgggagatccaccgctggtacatgggtatgatggattctttgcgcctgacgaccctttttattacccatgacatcgacgaggccattttgctttccgaccgcatttacattctttccggacggcccggcgccatcacagcagagctgacgatttccccgtcccggccccgcagcctggatttcggcctgagcgccgaatttttagcttataaaaaacagattctggcactgctgaatcaatgagcgggccggagaaagcatataaaatccccgcggctcagccgcggggatttttgcgtgttcatttgccaaaaggtgtgttgtatttttctgcatcggcggcggtgagggggcggatgacgcggcaggggttgcctgcggccagcacaccggcaggaatgtcgcggttgaccaggcttcctgcgccgatcacgcttcctgcgccgatggtcacgccgggcagcaccgtcacccctgcgccgatccatacattatcacccacggtgatgggataggcgtattccagcccctgattgcgctgctgaatatccagcgggtggccggcggtggcaaaggtgcagtttggtgcgaggaatacattgtcgccaaagactaccttggcgtcatccagaataacgcagttgtggtttgcgtaaaaattttcgccgatttcgatattgtaaccgtaatcacaccaaaaagcaggctggatcaaaaaatgggcgccggtttttccgaagatcttacggaaagcttcctgccgttccttcaggtgggaaggcggaatctggttgcaggcataacaaaggtctttgcaggcggataattctgcagccagctcggggtcatagttgttatcgtatagaagacccagtgtgcgtttttctttttccgtcatggtttgtacctccttttggggctgcggcggctggtcatttttcctcattttaccatactgcagtttgacgcacaagagagaagaaaagaaaacagatatcgacaaaaagacggccttttgctacaataagattaacacagctgccgcagtacggcagcgatgcattgatgggagaatgaaggaggaattgtatgaaaacgatcataaaacgggctctggcgctgtgcctgacggcggcaatgacggccctgctgctggctggatgcggtccgaaacaagagatgccgtcttccggaggcgaagacacaagcatcgtgctcaccgatcaggcgggccgtacggtaacgttggagaagagcgccgaccgggtggtttccgtctattatctctccacctcagttctggtggcgctgggcgctcaggataaagtggtgggtttggagcagaaggccgattcccgggtgctgtatcaaatggctgcgccggagctgatcgatctgcctgccgtgggcagcggcaagggcgtgaacgtggaggaaacagcggcgctggaaccggatgtggtgattctgcccatgaagctggccgagcaggcagagcagtttgagaagctgaatattccctgccttgtggtggatccggaaacactggacggtttctggacgacggtggagctgctgggtgaggccacaggtacgcaggagcgtgcggaggaactgatacagtatcagcgcgggatcatggagagcgtggcgacacgctgtgctgaaacagaggaacggcccagcgtgtatattgccggcagcgattttctgcgcacggccggcagcggcatgttccaaaatgaactgatcgagatgtgcggcggcgtcaatgcggcggcggagctgacggacgcatcctggacggatatttcgccggaacagctgatcggttgggatcctgaacggatctatatggtgtcttatgccgaatacacccgcgacgatgtgctcaacgatacccgcttttcctctttgcaggctctgcgtgcggaggaaacgaatttcctggtgttccccggcgccatcgaaccatgggattatcccacagcatccatggctttgggcgcgttgtggctggggcatcagctgcatccggatatgattccagaagaagaatatgtaagcgaggcccagaacttttaccgtacctttttcggcattgaggtcggggcggaactgctgctggcccattgagcggtatgaagcggcgggctgtgtgggcgttggcgcttttctgggcggcgctgctggtatgttccgtctgccttgggcgctatgagatcgcgccgcgggaggtggcgcatatcttgctgggaggcccggccgatcccactgctgcggcactgctgttttccatccggcttccgcggctggcactggtggcgctcagcggcggtgctttggccgtggccggtcttgtctatcaaacggtgttttccaatccgctggcctcgcccgatgtgttgggcgtggccagcggggcgtctgtgggagctgcggcggcgatgctgctttttccgggagcatttatactgcgccagggcatggcttttggctgcggtctggccgctgtggctgcggcattgtatctggcccgctttgtgcggcacaaccgcgtgctggggctggtgctggcaggcatcgttgtgggcggggtgtcggaggcgttgctgatgatgctgaaattctgcgctgatccgcagcggcagcttcccgcgattgaatattggctgatgggcggctttcaaaatgcccgttggcgggatgctgcggcggtggcggtgcttatgctggctgcgggggggctgcttcacctgctgcgcttcccgatgaaagcgctgtctctgggtgatgagagggcctggggtcttggcatttctccgcagcggctgcggctgggggctgtggcttgcgccacggtactggtagcggcagtggtcagcgtggccggcgtggtcagctgggttgggctgattgcgccccatatggcccggctgctgggtgcgcgggatattgtaaaaagcatgcctgcggtgttttttatgggcagcgccctgctgctgctggcggatcttttggcacgcacgctgagtgctgcagagattccggtgagtatttttacatcgtttttcggggcctcagcgctgggcatctttctggtgtgcggcgcgctgcagagaaagggggatgccctgtgacgctgcgagcggagcatgtgtgccatgcgtatggcacggcaccggtgctggcggactgttcgttgacgctgcggcccggtgagctggtgtttttgctgggggtcaacggggcgggaaaatccacgctgctcaagctgctggccggtgtgctggacgtgcagcagggcgcggtatattgtggcgatgaggcgctgcatcgtatgcctccgcgccagcgtgcgcggtgtgccgcctatcttccgcagtttacgccggcagtggacatgacggtggaggaatacgtgctgctgggagccgtgccatatctttcttttggggcggtgccgggaaggggctggcgcgcacgggttgcagcggtgctttcggagatggagctttcggcgctggccggatgcggtatgggggaaatcagcggcggcgagcgccagcgtgcagccctggcgcaggtactgttgacacaggcgccgtttttgctgctggacgaaccgaccgcccatctggatgtgcgccgtcagcatgaatttttgcagcgtctgcgcgggctgagcgcgcagcaggggaaaggaatccttgtcagcgtgcatgacccgaacctggccctgcgctatgcggagcgggtggcggtgctgtccgaaggggggctgcaggaagtcgcgtgcgcaccgatgatgggaccggaactggaagcgcgcctgcgccggagttatggtgctgcgctgcgctataccaggggagaattgtttgattggatagaagaaaggggataaaccttgtatacggcacgaaattacgttcgtcctgctacgctggaggaagcctgggccttgaatcaaaaacgcgccaatgctgttttgggcggcggctgctggctgcggctgggccggcggcggctggatacggtcatcgatttgagtggcctgggactggaagagatccgggaggaaacgggggcggttgttatcggcgccatggcgacattgcgccagctggaacaagatgagagactgcaggccgcctttggccgctatttccaggactgcactgcccatatcgtgggagtgcagtttcgcaactgcgctaccgtaggcggcagcgtgcgcgcacgttttgggttttccgatcttgtaaccgctctgctgccgctggggtgcacagtgctcctgtaccggggcggggaaatgccgctggaggaatatctgaccatgggctacgaccgcgatctcctgctgggtgtgcgtgtgccgttggacggcattgcctcagcggcctatgaaagcgcgcgcaacagtgaaacggatcttccggtgctcacctgcgcggctgctcggcgcccggagggattcttccttgctgtaggcgcgcgccccggacgggcgatgctgctgaagggacgggaggaaacggcgctgatcgaaaaggcagcggcgctgccttttggaagcaatctgcgcgctggtgcagactaccgccgccatttggcgcgggtattggcgcgccgcgccctgaaacggctgaaggaggcggaagcatgaaaatcacactgacgctcaatggcgtaaaacgcaccgatgaggtggcagcggacctgacgctgcagcagtatctgcggcagaaaggctgtatgtcggtcaaatgcgggtgcgaaacgggcaactgcggactgtgtacggtgcatttggacggcaaaagtgtgctgtcctgcacggtgttggccgcgcggtgcaacggccgcacggtagtcacgctggaaggcgtacaggagcaggcggcggccttcggcgcctttctggcggatgagggtgccgaacagtgcggattctgcagcccggggttcatcatgaacgtattggccatggaacgggaactgcacgaaccgacggaggatgaaatcaaggcgtatctggcggggaacctgtgccgctgcagcggctatcagggtcagatgcgggccatacagaaatatctgacagcaaagggggagcggggatgagctatgtcagcacaggcgttcgaaaaaaggacgctatgagtttggttaccggaaagggtgtgtacaccggcgatatggtgcccgccggggcgctgcggctcaaacttctgcgctcaccccatgcccatgccttcattcgttcgatcgacgtttccagggcaaaacaggtgcccggtgtggtgtgtgtactgacttatgaagacgcgcccggcagccgtttcaccacggcaggacagacctatcccgaaccgagtccctatgaccgcctgatcctggaccggctgctgcgctgcacaggcgatccggtggccatcgtggccgcggaaacggaagaggctgctgagcgggcctgccgtctgatccgggtggactatgaggtgcgccgccccctgttggactttacgcaggcgctggacaatgaaattattgtacacccggaggaaaacttccgcgcgctgtgcgatgtgggcacggatgcccggcgcaatctggtgtccaccgaaggctttgaggcaggggacgtggagcaggcgctggcgcaaagcgcggtggtgctggagcgtacctataacacaaaagccaacagccaggccatgatggaacccttctgcacgtatacctattttgacgaatacgggcgcctgaccgtggtttcttccactcaggtgcctttccatgttcggcgcatcctctccaatgcgctggagatgcccaaaggggagatccgcgtgattaagccccgcatcggcggcggctttggggccaaacagagcgtggtcagcgaacttttcccggctcttgtgacaaagaaaacgggacgggcggcttatctgtgctacacgcgtcaggaaacgtttaccaatggttcaccccgtcaccagatgcaaatgcgcgtgcgcatcggagcggatcgggacggcaccatccgtgccatcgatctgcatgcgctttccaacgccggggcctacggtgaccacggccctactaccatcggtttggtggggcataagtcgctgtcgctttacggaacactgaaagcttcccgctttcagtgtgaagttgtgtataccaacaccatgggggcgggagcctaccggggctacggtgccacacagggtattttcgcggtggaatcggcggtgaatgagttggcggcggaactgggaatggacccctgccgcattcgtgcacagaatatggtgcgtcaggggcagatcatgccggcgtactacggggaaccatgcagcagctgtaatctggaccgctgcctggaacgcgctgcggaatggatggactgggaacataaaaaagaaccccgggtgctgcccaacggccatatccgcgcggcgggcgtggccatggcgatgcagggcagcggcatttccggtgtggatattgccagtgtggaggtgcgtctcaatgacggcggcttttacacattgctggtgggctgctccgacatgggtaccgggtgtgatacgatcctggcccaaatggcggcagactgcctggactgtgaattgtcggacatctctgtgcgcggcgtggatacggatcagtcgccctatgacaccggttcctatgcctcttccactacttatgttaccggcggagcggtggtgaaaacctgtgctgcactgcgccagatgattttggaggaaggggcgcgtctgctgggtgtgaaggctgaggaggcggagtttgacggcgaacgggtttctgtgccggggacggaccgctctgtcagccgcgcagagatcggctgggccagctttgaaggccacagccggtatctctccgcttgtttgtcccattcttcgccggtgtccccaccgcctttcatggcgggcatggcggaaatcgatctggatccggaaaccggaaaagtacaggtagtggattatgtagctgtagtggactgcggtacagtgattaatacaaacctggcccgggtgcagactgagggcggcatcgtgcaggccattggtatgacgctgtatgaggacgtacagtatgacgaagcgggacggatggtgaacgattccttcctgcaatataagatcccaacccggctggaagcgggttcgatccatgtggagtttgcgcccagttatgagccaaccggaccgttcggcgccaagtccattggcgaactggtgatcaacaccccggctccagccattgcagaggcagtccgccgtgctacgggacatatgtttcgcagtttgccgatccgtcccgaggacatcgccctggcattggcggaggagcgggcgtgactgatttgatcctgctggcagcgggagcggcacgccgtttcggcagacaaaaacttttggaagagtttaagggaaagccgctgtaccgctatgccttcgatgcggcccgcagcctgtcgggggtgcgggtgctggcggttacccgtgcagggctgttggacggcgctgcggtggactacagatttgaaccggtcttggtgccggaggaacagggaatcggcctttcggtggcggcgggagccgccgccgctcgtccggaggcgcatttatgctttttcgtgtgtgatcagccccatgtgacagggcagcatctgcgctcctttttgggagaattttataaaagtggaaagagcatgggacgaatgcgcaccggcgcgcgctttgggagccccacgatctttgccccgcaattccgtcccgcgctgatggccctgacgggcgacgagggcggacggaggatcttcgcaggccgcgagggggaaatttattaccatgatgctgcaccggaggtgctcctggactttgaccggccctgggcgaactgcggcgatgcgtaaaaaagaaggcggcggtgcgatcccggcaatggatcgcgccgccgcttttataagggagaaaatgggttttgaaagaaattgagattgttatgggttatgaatgaagatgtatgtgcgaatggaaagtgtttgatgaagtgttgtgttttttacaggagagatgatgtgttcatgcgttggccagaccagcacccagtgcgcggcactgttccagcccatcggcatccggcgcttcgttcacaatcagcggctcgccgcacaggaatgcgccgtcgtcatcggcgcgctgcgcccaatcgcgcatccactgaccgtcgccccagccgtaggagccgaacagggagatgttctttcctgtgaggcgggactccaactgctggaaaaacggttcgaactcggcttcttccaggacctcgtcgcccatggcagaacagccaagcgccagtttgtcatacgaagccgccgcatcggcggtggtttcgctgacgtttagcagtgcaacttctgctccggctcctttggcgccctcggcaacggcttccgccatggctttggtgttgcctgtgccggaccagtagatcactgcgagtttactcatacgctaacctcctttcatggaataagatggtatctcacgccgctgcacggtttttcaggccgtttgcagcagctgtgaaatcgtgtttcctgccgccagcattctgcacaggcagagccggcaggcgtcatagcaggcgaaacgctcccgtgctccatccacgtcgccgtaaactttccagtagccgcagagtttgcactcgctgctgccggcgataaaggcttctacgtcctcgggcggataatcgagaaacagtccaatctcgtgcgggaaatccccgccaggggtaaaccgtttcttcagccgccgcagcagaacgcctaggcagtccgtttcaggatagtcgaagcgctgcagcagcgccttggcaccggcggtattcagccggctgcgcagcagagcggggcgaaataccaagattaaagatctctgagaagtttcgcgcagaatcaggaaacgaaggcctgtgcggtacagtgtccggttgtagcgacgaagcgcttccggcagctccggaaattcttcccgtgaaagagacagaaggctggcggccttggcgcccagcagggtgggtgcacagtgctcggccaaacgatgttccagaacgtcaggtatcacaggcggctgactcctttctgctatcatatggagttagttaaagctaaccactcccctaaaagaacagggctgctgcaagaagccctgttttcaagtggttagttagatctaactcgtgactgtatactatcagaaaacggcggtattgtcaatcccttttttggaaatttttcaaacaaccaaaaagctccgccagtcctgtggatagaagcggcggagcgggaggtttaagagtttggcagagaggaaggaacggaagccgtttgccggaacggaggcagggaaccaaagagaaaatgaagataacgcagcagggcatagccgaccataacacaagccacgatggtttcaccggccaacagaagggaaagaatagaaggaactgcgaagccggaagcggaaagcagagtcaggaatttctgtaatgcaatggcggtgatgacaaatgggaaagtaaaggccgcataactggggaaaaagggaaggcgcagcagtttgggcagctgtgtgaggacgatgatataaagaatctgtgcagcgacctctaaaatcagcgcgaaggccagggaaggggcgggagccgttgtgagatagccggccagacacaggctcgtgggggcggtgtagatacaaaacagcggtttggcactgtctgccatgggaagcctgcggcagcgaaccgtgaccagaaccagcatggcgaggtaggccaggaaaccgaaccagaaaatgccgtaccccagtgcagtgcggtcaaaagaggccgaggtgaccgacgcgaccacaatgccgacataggtgataaaataggtaggatatacgtcgctgagacggaaacggcgcagataggtccagctgaaccagagaatcagcgcacagtggccggcgacagccgcgtaccagaggaaaagggacactgtggggaaaaaggcgcaggtataggtagagagctgcatcagcgtcatgaaaaacgtggcggaaacactggcaattattgggttggaaaagtcgtttttgatcttttccgggaacaggatcagctttgccagcagcaggaagaacagcagagcggctgctgtgccgcagccccagcgcaggacaggggaaaggccggcgagcagattgcccagagcggtcagacccagcgttaccccggcaagaggaacggggaccttttcaatcacgcgtttcatatgcagtacctcgtttcttaatataagctgcccttaccatagcacaaagtataaatcacgtaaaattataaatattgatttataaataaaaatattttataat

SEQ ID NO: 3748 - DNA, 6033 bp, Unknown
  16S sequences of unknown bacteria
agcaaggtatttgatctctatgaaaaagaacagattgtggatcatgtacagaaggtcggtgcatatctggaagaaaaattgaatgcccttgtggataagtatgatttcctgaaagaacgcagaggaaaaggtctgatccagggactggaagtggaaggaagaccggtgggagagattgtgaaccgagcactggagcatggactgatcatcatcaccgcaggaagcaacgtgcttcgctttgttccgccgcttgtgatcaccaatgcagatgtagatgagatgattaagaaactagaaagttgcttttagtgaagaaagaggaataaatgaaatcaacagttcagaaaatactggcagtgctggtagttgtattactggtggcagagattattcatgccagtaaactgaatcagaaagacagtgtgacactggcggagaagcgtccgctgctgatctggtatacagatccggatatacaggaatatatgcagcaaagtgcagaagcggcggctgcccagtatggggttcaggtggagacggagctggtatcggaagtagactacattgaaaatatcagtgaacgttctgtggcagagaccatgacaggaccagatctctacgtgcttaacagttctcagatggagaaggctgctctggcaggtctgaccgatcagctggacgacaaacagatggcggacacctattcagaaaaggcggtccatgcagtaacctatgatggaaaagtcatggcatatccgttctatgtggagaccagtgtacttctctataaccggtattatgcagatgaggctccagctactattgatgcgatcctggactattcagaaaattatgaagccagcgaagtgacagccaaagttgagaatatgtttgagtggaacgtggctgacgtgattgaaaactatatgtttctgggtggctatacagatcttggcggagaggacggagatgacaagagtcaggtatccatggatcttgataaagctgtggaatgcatgatgtattatcagagtctcaacagcttcttcgcattggatgcggataccatcacctctgatgagatcattcaggatttcattgatggtaagactgtatttgccattgccaatgcaagtatgatcggaaaactggatgaagccattgcaaatggtgagattccggagtatccgacggaacgtacagtaaccgatgaaaacggagaagaacagaccgaagaactgaactttgattcattttatgcagcagcaccgctgccggatctgaccaatgatctggagacaggaggattgtctgtgaccaatgcaattgcagtgaatccctattctgtaaaccgtgatgcagctgcagcgatagcccgttatctgacggagaaaaatgttggcagtctctacgagatgaccagcaagattccggcatgtcagtctctggcagaagccccgactccggcatgggatgcagtatgtgaggcttatgacaaggctgcagaggttccaaagatcatggaactgtctgatatgtggcttcatctggaagcaaccatggcagatatctggcgaggggaagacgcagcgacccagatgcaggcattttcagatcttatgacagagcggttgaactaaagatatcagaataagattccaatcctgtggaaatacttaccgaaaaggaggttttcacatgattggaatttttgttgcccttttatcgggtgcactgatgagcattcagggcgtatttaatacagaagtgaccaggcagagcagcgtatgggtgtccgcatcctgggtgcagttttctgctctcattacctgcctggtgatatggggaatctttgaccggaaaaatctgatgctgatcaccagagtctcgcctgtgtacatgctgcttggtggtgtgatcggcgcatttatcacatatacagtgattcagggaatgtcggcactgggaccggcaaaggcaacgatgctgatcgtgattgcccagctgacgatctcctggctcattgagctttgcgggatgttcggggtagaaaaagcggatttttccatgcgaaaacttatgggacttctggtggcgattgcaggcgtagtcctctttgaatgggaataaagtttgtgcttgtgtttccggcgcaagtccgatacaataagaaatggatatggacaggacttttcttcggaaaaggagaaggaaagttcgatgaaaaaatggaaaatgatggcattgatctgtgtgctgtgcggcagcctgtctggctgcggcctgtctttttgtggaattccgctgggaaaaagggaaccgcttacgtttgtctgtggggagaagaatgtggaaatgcaggcggatgaagaagcggatggtggaaaactatctgagcaggatggtacagaggtgcagatgacagatgcatcggagacagtccgggatgggaccgcttctgcggatacatctgtcacgtcaacacagtcagatacctcgtactccgatggaaaagtcaacatcaacaccgccgggctggaggaactgatgacattgaagggcgtaggtgagagcagagcaagggccatcatagaatatcgggaacaacaaggggcttttgagacaccggaggatattatgaatatttccggtatcaaggaaggcgtgttttcaaagataaaagatcagattgctgtgcgttgaggtgaggagtatgggacagagagtattagtagtagatgatgaaaagctgatcgtcaaaggaatccggttcagtctggagcaggacaatatggaagtggattgtgcttatgacggagaagaggcattggaaaagctcagagcaaatgagtatgatatggtgcttcttgatattatgcttcccaaactgaccggccttgaagtatgtcagcagctccgggaattttccaatgtgccggtgatcatgctgaccgccaaaggcgatgatatggacaagatcatgggtctggagtatggagcagacgattatattaccaaaccattcaatattctggaagtaaaagcgcggatcaaagcgattatccgccggacgaagaagaaagagccggagaagcagccaagccgcgtggtggagaagggagatcttcacttggattgtgacagccgcagactctacattggtggaaaagagatcaatctgacagccaaggagtttgatctgctggagttgatggcgctgaaccccaataaagtatacagcagagaccatctgctcaatgcagtatggggctatgactacccgggtgatgtaaggaccgttgatgtgcatattcgtagactgcgcgagaagatcgagagcaatccaagcgagccgaaatatgtacatactaaatggggagtaggatattatttcaatgcataagataaagtttcagggaaaatttttcaaaagtctgaattttcgcattatgctttttcttctgctcatgggaacagttccggcgttgatcatcggcggagtatttcttatgtcctatgagcggcaggccatggcgcaactgagcaatgatgtgaaaaatcagtgtcagatcctgtccacccagctcagggacggagagaatctgctgaagacagaagatgaggtgctgcagggggaactgacccagctggcttctctttatgatggaaggatcattattattgatcagaattttcagatcattgaggatacatctcagctggaagaaggacggaccatggtggcggaagaagtggtgcgttgttttaagggtgagaataccagccattatgtgagcggtcgttttattgagatgaccgttccgatcattgtggaaaacaaggatactaagaccgtgatcggcgtgatcctggcaagtgcttctacagatgcgatccatgcgcagatggagggactgacagcttctgtacagatgtggatcgtagtagtgatcatctgtgcactggcactctcaatcattcttgctaactggctggtgcgtccgctgcagcatatgaaccggtctatcggaggactggtagaaggatcactggacggggatctggatatccatgattgtacagagacggaaaatatttctgatacattcaatctgatgcttgcgaagctgaggcttgtggaggaatccagacaggaatttgtatccaacgtgtcccatgagctgaagacaccgttgacttccatgaaggtgctggcggattctcttctcatgcaggaagaagtgccgaatgaattatatcgggaatttatgcaggatattgcggaggagatcgacagagagaattccattatttcggatttgctgactctggtaaagatggatcgaaagacccaggaactgaacatagcagttacagatgtgaacgaatttatggagacgatcctgaagcgtctgcgtcctattgcagaaaaagccaatgtggaagtagtctttgagagtaatcgaagtgtcagtgcagagatcgatgcgtccagactatcgctggcattttccaatctggtggagaatgccatcaaatacaacaatgaaaatggatgggttcgggtgactctggatgccgaccacaagttcttctatgtgaaagtgagtgattctggtatgggaatcccacaggagtcactggattatatttttgagcgtttttaccgggtagataagtctcattccagagagatcggcggtacaggactgggactggcgatcacaaagagtgcagttgttgcccacaggggagctatcaaagtgcagagcaaactgggagagggaacaacctttacggtgcgtattccacttcgatatattgtataggaaggatcatttatgagaaaatggttatggattcttctgctggcaattccgctgcttatggcgggatgcagaaaacagcagcaggtggatgagagtgggtatcaaatctggtatatcaaccaggatgagacctgcctgaaatatgaaaataaagaactgcagtccaagaatgaagagggattgctccgggaaatgatggaagtcatgcgggagacaccgacagacgatgagctgaagccggtgatcccggaggatgttgaacttctggattttgactttgagcataatcagctgtatctggatttctcgccggaatacaagaagatgccgaaggtctatgaagtgctttgccgggcggcaattgtacgtaccctgggacagatcgatggtgtggaatacgtggactttcaggtcaatggagagccactgaccgatcttgagggaaaagagatcggtcttatgaatgaagatcagtttattgaaaatgcaggtgaggagatcaatgcttataagacagcggatctgaccctttatttttccaataaagcaggggataagctggtagaacagagggttgctatggagtataacagcaacatttcgctggaaaaactgatcgtggagcagctgatcgcagggccgccatttgagggtgcttatccgaccattccatcagagaccaagcttttaaatatttccatcaaggacaatatctgctatgtgaatctggatgagggatttcttggaaccggttataatgtgattgagagtattccggtctattccatcgttaattctttgattgaaaatacagatgcacagaaagtacagatcagtattaacggtgagaccaaccggatgttccgggagagcattaattttgatacgatctttgaaaagaatgaggggctgatcgaacagtgagacaacgaccagtagcgtgcgcggcgtttttgctgttcctgatcctgcttctgatgcctgcggagtttttttacaggactccgcggctgacagaaaagtgtaaggcagaagtgctcggttatgtggaacgccgtacatggaaaaatgaaaagatgcagctgttgctggaagattgtcagatccgtacaggggaagacgagtttcaggaggatcggctgcttatctatacgaaagatcccacagaatatgaggtgggaagtattctttccttttcgggaac

SEQ ID NO: 3749 - DNA, 17099 bp, Unknown
  16S sequences of unknown bacteria
gctgtaacgaaagcagacgagccggtctgtccggttttatccgggtctgtttcacggcgtaggaaaaggccgtgagaaatctgtggtacagacagagaaaaacaaaagaagacaatcataataatccaaccataataatttaacaaaactcaatgaaagacggaggaaaacatcatgtctaagaaataccctatcaccatcagttcctggacactcggagatcagtgcggctttgaagagagagtaaaggctgcaaaggacgccggcttcgatgggatcggtctgagagcggagacttatgtggacgctctggcagaaggtcttcacgatcaggacattctcgatattctcgagaaatatgatatgagagtcaccgaagtggaatatatcgtgcagtgggcggaggaaaaccgttcttacgaacagaagtacaaagagcagatctgcttccatatgtgcgctcttttcggcgtaaatcacatcaactgcggccttatggaaaattattctgtggagtatacggcgcagaagctgagagaactctgccacagagccggagattatgtcatcggtgtggaaccgatgccttacagcggccttccgaatgtggaaaaggcatgggcagtcgtggaagcttccggctgtgacaacgcaaagctcattctggacacctggcactgggttcgcgcaggacagccgtgtgacgtatccgtactcgaaggcattcctgcggacaaaatcgtagcgattcagatcaacgacgtacacgaccgcgcttatgccgacagcattctgagagatgaatctatgcacgacagactggctccgggaaccggatacggtgatacagcggcctttgtcagaatgatccgcgaaaagggcgtagaaccgaaagcggtgggcgtggaagtaatcagcgacagaattctttcagaaggcgtggagaaggcggcggaaatcaactttacggcagcacgcaaggtattggaagaaacctggtcggagatcgtctccgcataaatccggacaaaaacagacgaaaaacgattgtactcaattttacagcgcgaagcgcagataaggagatctatattatggaaagcagaattacaggacacacacgcctcttcggcctgatcggctcaccggtggggcattccggttctccggcgatgtataattacagctttgaacgcaccggcctcgacaacgcttacctcgcattcgatattccgctggaaaaagtggaagaagccgttgcggcaatccgtacttttaaattcggcggattcaatatcaccatgccgtgcaaggcggaagtctgtaaatatctggatgatatttctccggcggcaaagctgatcggcgcctgcaatacggtagtcatcgatgaagaaggcagactgacgggacacaataccgacggcatcggttttgtacgcaacctgaaagagcacggtgtggaagtgaaaggaaagaagatcgtacttctgggagccggcggcgcggcgactgctatcgcggcacagacggctctggacggcgcggcggaactggcgatgttcaaccggaaggacgaattttttgaaaagggtgaagccatcgtggaaagactgcaggaagccgttgcagagtgcaagacttcgataaccgatttgagcgacgatgaagcgctcagaaaagcggttgcggaatgcgatattctggtcaatgccacgaaagtcggtatgaagccgcttgatgaccagacactgatcgatccttccatgttccgcccggacctggtagttgcggataccgtctataacccgaaagagacgagaatgattctcgaagcgagagaattgggatgtaaagcatcgatcggcggtatcggcatgctgctctggcagggagctgcggcatttaaactctttaccggtgaagatatgccggctcaggaagtacttgagaaattcttctcataaaactctctgttcgttctgaggccgaaagcgcgtcaatctgcggaaaaaataaacccgcagaattggaaaaatggaaaagggaagccgcagaggccgcaggggcggatgaaaaaagagatcagcacaaagatcagcgcaaattgattcaatgaagataagagatttaagaagagaaaatataagatgagaggtacatacatggaatacagaacaatgttttcaccggttaaaatcggcacagtacagattccgaaccgctttgcgactccgccgatgggaaataatttcgctaatacagacggtacgctcagcgagagatcgaaggcatattacgcggcgagagccaagggcggcttcggtctcgttaccatcgaatccactgtagtctacagcgaagccaagggcggtccgagaaagccgtgtctcttttctgacgatacggtagacagctttaaaatggtggcggatgaatgccacaaatacggcgcgaaagtatctattcagctgcagcatgcaggtccggagggcaattcccagctcaccggttttccgctgaaggcagccagcccgattccgtcggcattcggaagagagatcccggaagcgatctccaatgaagaagtttaccgtctcatcgaatgctacggagacgccgctgcgagggctcagagagccggtatcgacatggtggaagttcactgtgcccacggctatctggtcagcacattcatttccgcccgcacgaataaccgcctggacgaattcggcggatgttttgaaaacagaatgcgtcttccgagactgatcatcgaaaatatcagaaaaaagaccggcggaacactgccgattctctgcagaatcaacggcagcgatgaagtggacggcggacagtccgtacaggatgccgcggcggttgccgtttatctcgacgaagtctgcggcgtagacgcaatccacgtcagccgtgccgttcaccttcacgatgaatgcatgtgggcgccgggggtcgttcacggcggattcaacgcacctttctttacagagatcaagaatgccgtttccgtacctgtcatcgctgtaggacgttttacggaacctcagtatgctgagctcatggtgagacagggcaaagcggatatcatcgctttcggacgtcagagcatcgccgatccggagcttccgaaaaaagcgaaggaaggccgcctggaagaactgactccatgcatcggatgtcttctcggctgtgttccgaatatgtttcagggcaatccgatcacatgtctcgtaaatccatccgtaggcagagagcaggaaatcctgccggcagagagcccgaaaaaagtggctgtcatcggcggaggtcccggcggactttacgctgcgcagttatgcgctctccgcggtcacgacgtcactctctttgaaaagaccggagaactgggcggaaatttccggatcgcggcatatccgccgggcaaaggggatattaccggagcgatccgcaatctgatcgtcaaatgtcagatgaacggcgtcaggattcagctcaacacggaagtgacagaagaacttctcagagaattccagccggatgcggctatcatcgccacaggttccacaccgctgattctgccgatcaaaggacttgaggactgcggttatatcacagcacaggacatgctggacggaaaagctcaggtgggacggaaggttctcgtggtaggcggcggaatggtaggctgtgaagcagcggaattcctcgccgaaagagagcacgaagcggctatcatcgaaatgaaagacgtgatcggcgcggatgtggtcccggaaaacagaccgttcctcttcgctaattttgaaaaacatcacgtagcgctggagaccggcgcgaaggtaagcgaattcttcccggacggcgtatcctacgaactggcagacggtacgaagggcgagctgagaggctttgacagcatcattctcgctatgggttccagaagctgcaatcctctggaagaaaaagtaaaagaattcgtgccgcagactatcgtcatcggcgaagcgaagaaagcgccgggcaatgcctgcatcgctaccggcgaggcctttgacgcagccttatcgatttagaaaaatctgccgtaccggtttttctctggagaaaccggaggaacggccaaccgcaggatcggcggggaatcaaattgcaaaattctttcaaatacagataaactcactcactcttaacacagaaaaaggagcccttttccggctcctttttctgtgttgtaaaagacgccggctgtttttacagccggcgtctgtctctcatgcatgttttctcttatctgtgcagatcagcaaaaattccggagacgacgatgcgtctctcctttttcagctttacagattttttccgcagcacttcttatactttttgccgctgccgcacggacatgggtcgtttctgccgatcttcggctcttttacgacggtcttggaacggcggtaagctttggcgatctcttctctcttttcttcggtgaggatatcgtcccattcgggaagggtgtagagatagtccgctttcgcgtccagcatgttgaagtagagcttttcaaaatcgatgtccagttcgaatcgggattcttccgtcatctcttccaagtcttcgttttttttctttaggctgtcattgatgccgtcgagaaagcccatgaagagaactttgtctacgcctgacttttcagcctgctctgcgattgtaccgctcatctttacggaaggatcggagaggattgcctgatagatcttcttttctgcggaagaataatcttcccagaaatctctgaaactttcctcggtctgattttcgtaaagatcaacccaatcctgatataatgccatagtattttctccttcagttgattttacaggcagaagatgcggtgattttataccgcagaaactgcctcgttgattttatcataactattacaatatcacaggatttgacacttgtcatcaatattgttattctaaaatccggaaagaaacgcgcctgcaaagagaggcggaccgccgcgctgaaagacacctttcgacagcgcggatcgagggcaactgcatacggaaaacgctgagatatatttttgcggtgcggacacaggcagaaaaatgcggggaggatatctatggaggagaaagaatggttgtttcacgtggttctggtggagccggagattccgcccaacacgggtaatatcgccagaacctgtgcgattacggggatgaagcttcacctggttaagccgctgggtttttccatcgatgacaaagcggtgaaaagagcggggctggattactgggatcatctggagctggaggtgcacgaaagtctcggggaatttctcgaaaaatataaggatcgcaaaatgtatctcgccacgactcacggcggcgtgcggtatacggatgtccgctacgagagaggttccttcctgctctttggaaaagagacggcgggacttccaaaagagctgatcgcgcggcatcccgatgccgcggtgcggattccgatgggcaagaacccggacctcaggtctctcaatctgtccaattcggcggcaattctgttatacgaggctatgcgtcagcatgattttccagggctgcggtaaggcggtttcgaaaaataaaaaagtgtgcaggatcaagtttttgcattcctgtgtatttcatcatttgtttatgatataatttatcataggataggtgtgaaacggcggtctgtaagccgcccggagagcatctgtccctgtttgtatttctaaattcagatttaaaagttactggctgcaggatcagattttttcttaatgtttcagaggattctataaggcaagagggctaaaaatggaattaattcttggcaatcatttaaaaacggaacagacgcagaaactggttctgaatacggagataattcagtcgctcaatctgctgcagtttaccagcaacgagctggctgactacatcgctgaggagatgaccgacaatcctcttttggacttcggtgaagaggaatcatccgtttatcatatggtggacgccgatcggatcatgaatcccgatgaagagccgcatatagacgaatacaacgggtacggccgcgaatccgatacaggtgttctgtatgcggatccgcaggaatggcagcggtattccgaattcaacggcgacggctgggcagaagaaggcggattttctccgtatcacggatacggagattttgacgattcgccgtatgatctcagcgtaagcgatgaatttactctggaggaaagtctgctgaatcaggtggatctcagcgaggaaccttatctggtcagagctacagccgcgtatatcgtccagacgctggatgagaacggctacatgacattctcggttccggaaatcgcgcagcagctgaatatatcggaagaattagcggaggaagcccgccgcctgctgtggactttcgatcccccgggagtcggcgctgtggatctgcaggaatgcatgaagattcagctgagagccatcggccgtctgaatgacaaactgagccttatcatcgacgagcatctgccgtctctggctcggggcaggtattctgcggtagccagggctgttggtatgacgccgaaggatgtcggcgaggcggcggaactgattcgttctctcgagccgaaaccgggacgcggttatgcttcttcagaggcgacgcgctatatcgtgcccgatatcgtattggagaaggtaaacggcagatatgcggttaccgtcaatgggcataccgctccgcggctgattttgagaaacgactacagagctatgctgcgggattcggaaaaaaattcgggggtggcgtcgtttctttcggacaggctgaattcggctgcctggctcatccgcagcattgagcagcgccgagatacgctttaccgcatcgcttcggaggtagcggattttcagagagaattttttgaaaaaggccggagttatctgaagcctatgactatgaaacagatggcggaacgcaccggagtccatgaatccacggtaagccgtgcggtaaacggaaaatatatacaatgtcctcagggcgtctacgagctgaaatatttcttctccggcggatcgagtttttcctcgggcagcggagaagtggattccgccacttcggaggggctgaagtctatgatcgttcagctggtcgaaaacgaggacagcgcttctccgatgagcgaccggcggatcgcggaggcgattctcatcaagggaatcgcggtctcccggcgaacgatagcgaaatatcgggaagaactggggattccatcttcttctgaccggagaagagaaaaagtgaaataataaagtgaaagataacccgctgaaatcggaaaatgaagtctatccgccggctgggcggaccgacagagaagaaggacatttgttccgtcgggaagagcgtatttccggtttcagctgtgattttcaggaggagttaatgaaaaagacggtaagagatatcgacgtacgggaaaagagagtgtttgtgagatgtgattttaacgtccctaccgacggagaaggaaacatcacagacgatcgcagaatccgcggggcgctgcctactatcgaatatctggcggaaaacggagcgaaggtgattctcgcttctcatatgggacggccgaagggaaagcccgatccggccttttcactcggcatggtagcgaacaggatttccgaacttctcggaaaagaaatcctcttcgtcagtgagcctgaagtgacaggaccgaagacgaaggcggctgcagaagctctcagggcgggagaaattctgctcatcgaaaatgtcagataccgagcggaagagacgaaaaatgaagaagcgtttacaaaagaactggcttctctcgcggagattttcgtcaacgacgctttcggcacagcgcacagagctcactgctctacggcgggaatcgcagcttatctgccggcggtcagcggttttctgatggaaaaagagatccgctttttcggggacatgctgaaagctccggaaagaccgtttaccgcggtgatgggcggagcgaaagtcggagacaagattcctctcatcgaaaatctcatcgaaaaagtcgaccgtatcatcgtcggcggcggtatggcatatactttcctgaaagcgaagggatacgaaatcggcacgtcgctgctggaagaggataaagtggagatgaccctggcgctcatgaaaaaagcggaagaaaagggcgtggaattcctgcttccggtggatgtggtctgcgccgacgagtttaaaaacgattccgcctgcggggtctatcctgcggacgctatgcctgcggacaggatgggtctggacatcggaccggagacgagaaaactctacgaagaggcagtagtcaattcccggaccgtggtatggaacggaccgatgggcgtatttgaaatggaaaatttcgctcacggcacgagagctatcgccgtagctatgaataaatgcgagggaatcaccgtagtgggcggcggcgacagcgcggcagcggtcagagaattcgatctggaggacaacatctcccatatctccaccggcggcggtgcgtctctggaatttttagaaggcaaggatcttccgggcgtaacctgcctgatggactgatgacccttttaacgagagaagacaggagaacagaaatgatgagaaaaccgtttatcgccgcgaactggaagatgaacaaattagtggaggaatccgtggaatacggagagactctcgtggaaaagctgaaggcggaaaaggtggatctgaagaaagtagacgtggccgtctgcgttccgtttattcacatggccgctctgaaggtcatatttgtactgcgcaatatcaatgtaggggctcagaatatgcattatgaggagagcggtgcatataccggagagatttctccggcgatgctgaaagatatgggcatcgaatgcgtcatcctcggccattccgagcgccgcatgtatttcggtgagacagacgaagcctgcgccagaaaggtgtcggcggctcacgcctccggtatccgtccgattctctgtgtgggcgaatcccttgcgcagagagaggctgaggctcacttcagtacggtaaaagcccagctcaccggatgctttgcgggagtcggcagagaagaggctgcgaagacggtgatcgcctatgagccggtgtgggcgatcggtacgggaaagacagctactgcagaacaggcgaatgagatggcagcctatatccgctccgtcgtggcggaattatacggtgctgagaccgcggagcaggtgatcatccagtacggcggaagtgtaaagtcttcgaatatcgcggagctgatggcgatgagcgatatcgacggcgccttggtgggcggcgcaggactggatccggcggaattcgcgaagatcgtaaacttcgatccggctgtggtgggaaaagatccgcagtagagagcggaataaaataaaaatgaaaaaacgatttgaaaaaagaggaatgaattttcattcctcttttttatgacatgttttttgtttcagacgatccggtttctcttcccgccgctgaaaaaggattcgatgttggcggccgtctcgttcacggagcgctgacgggattctttcgccgcccaggcgatatgaggcgtcaggatgagattgctgtaatcgctgaggccgaggtagggactgtcttcgcggatcggttctttctcgtagacgtcgatgcaggcccctccgatgatgccggtacggaccgcttccgccagatcggcctcatttgcgatgcctccccggcccacgttgatcaggcaggcggtgggcttcatcatctgaaattcccgggcagtcaggaggttggacgttttttcgttcagaggagcgtgaatcgagaggacgtccgactgtctcagaagctcctctatactgacccgctcatagcggttgtcccggttctctccggaagcggagtaatagatcactctgcagccgaaagccgaggcgatttccgccacacgttttcctatatttcccagtcctatgatgccccaggtcttatcgcgaagctcaaaaaaatgatacggaaccagactgtgcaggtctctgccgataaaatccctggtgtggacgtgggcttcaaactcgctgattttttccatgtagcgaaacagcagggcgaaggtatgctgcgccacgctgtcggtggaataggcggccacattgcacagagcgacaccgcgttttttgagataatcgagatcgcagttgtcatatccggtggatgtgatacagatcagtttcagatccggggcctcatctaaagtccgttcgccgaagaaaaatttatttcctacaatgatgtccgcatctttgatgagctttttcatctcttcttcgccgcatccgggattggccgtcacactgcccagccggtaaagccgggaataatccagatccatgccgatgctgcgctgttccagcaaaacgattttcataattaattcctctctgcgatcctgtttccgccgctgattttctctgttatcctgtttccgccgccggctccctcgttcgtttgccggacctttataaatccgccgccggaccgccctccggcggaaaaatttgatgtttctctattgtaacacctgcgctttttaaatacaaaaggtcgaataaattatttgtttgggattttttgtggtataatgtttgataattccggcagtcggacttcgccggacacagaaaaaacaaattatcatacttacatttggaggttaaaaatgtcttacattgaagaagtcattgcgcgcgaggtactcgattccagcggcaatcccacagtagaagttgaagtatatctcgatgacggcactatcggccgcgcgatcgttccttccggcgcgtctaccggcgcttttgaggcggtggaactcagagacggcgatgagtccagatacctcggcaagggtgtgcttcaggctgtaagcaacgtaaatgatattatcgcagacgaaatcatcggcatgaatccttttgatcagcctgccctcgacaagctcttaaacgaattggacggcactccgaacaaaggcaagctgggagccaacgcgattctcggcgtttctctggcggtcgcccgggctgcggcggaatccctgggactgcctattttccagtacatcggcggcgtaaacggcaaagttcttcctgttccgatgatgaatattttaaacggcggaaagcatgcggacaacaacgtggatatccaggaattcatggttatgccggtaggcgcaaagagcttccgggaagctctcagaatgtgcgcggaaatcttccacaatctgagaacggttctcaaatccaagggtatgaataccgcggtaggtgatgaaggcggctttgcaccgaatctggaatccaatgcggacgccatcgccaatatcgtggaagccatcgaaaaggccggatatgtgccgggcgaagacgtaaagatcgctttggacgtagctgctacggaaatctatgacgctgaggaaaagacttatttcctggagggagaaggcattaagaagacagctgcagagatggtggactattatgcggagctctgcgaaaagtatccgatcatctctatcgaagacggtctcgcggaagaagactgggacggctggaagctccttacggaaaggctgggcaagaaggttcagctggtgggagacgacctcttcgtaacaaatacggaacgtctcaagagaggcatcgacatgggcgttgccaacgcgatcctcatcaaggtaaatcagatcggtacgctcacggagaccatcgacgctatcgaaatggcgaaagaagcgggttatacggcagtggtttctcacagatccggagaatcggaagatacgacgatcgcagatctggtcgtagccctcaatgcaggtcagattaagaccggcgcgccttccagaacagaccgtgtggcaaaatataatcagcttttaagaatcgaagagcttctcgacgagaccgcagaatacagagggctggacagtttctacaatttgaaatagctattgaatatcaaatatatacgtggtatactttataggattgatttaggatgcagtaaggcatcggacaggttcgttttctctgtgcggtgcgggtgctcattacatcaaaaggatctgtaacgcttaatagcacggaaaggcattttgcctgtcgaatacaaaaggaggtcatctgcatgaaaatcgtattgatgattctgctgttaatcgcttccatcgttctgatcgccagcattctcttccagtccggaaacagcgcgggtctgtccggctcgatcggcggcggcgcggaacagcttttcggaaaaaagaagagcagcggttacgaagcaattctcagcaagattacggcagtgggtgcggtcgtctttttcctctgcaccattgttcttacggcaattgaataatctttacaggcgggcagaaatttatttctgcccgttttttctaatcgtcagccatatcagggcagagagctttgcttttcgattttaacgaacgtctgccgggatacgggatgagcggcatgttccagtcgggaaactgcgccgggattttgctttgattagaaaaaaattttttttgtgaataaaatgaatctctccggcggatactattcactgcagataaaatgcatattttcatatgataggaaaggagaacatcatgaagaaaatacgttttgcagctgctatggtattaataatttctgtccttttgctgcctgcctgcggcggtacaccgaagacagatgacggaacgaacagcagtacgtcatccggcgaggtggacggcgcgggaaaggatctggcagacgacgcgaaagatgtcggagacgacatgaaggatgcggcagacggtatggctgacggcgcagaagacatggtagacggtgttgcagacggcgcgaaagatgtcggcgaaggtatggctgacggcgtcaagaaagcggccgacggcgtaaaagatgcggtgacgacagacggcacaaaagacaatacgaatactgccaaagataccgcaggcacaaagcagtaaaattttacggtatgttcagatgtctggggaaggcggcttctttccgggaagccgtatccctctggcgtctgagacagcaatagaaagtacatagaagaggaaacagggtatgggaaaaaaatatgcagtccgcggcgagctgagcgaagagcgcagggcaaagatacgggaaagtctgcttcgggcggctggagatgagaagacgactctcgtatcggagcaggatgttctgcatctggtcggagcaaaacctcatgaattcggcgcggtactccagcagctggatcagcttgaagcagagggggcgctggttcggaacaaaaaagggcggtatctgctgcctgagacatacgatctctttgcgggaacgctgagaggccaccgccggggttttgcttttgtctcgctggacaatggcagccaggatgtctatattccccggtcatccgtgggaaatgctatcgacggcgatcgggttctgattcgtctcttttctgagactcatggggatcatcgtaccggcagtgtggaaaaaattttatcgagaggcgtgacttttgtcacgggtacgtacgcgccggaacggagtttcgggtttgtcatcaccgacggcaaatttctgccggatgtctatgtgcctcaggaagacgccatgggagcgcgccggggggataaggtaaaggtccggattacgaaatatcccgatgaagtctcaggactgagaggcgaggtgacggaaattttcggagccgcgggagacagccgggcagagacagaagcggttatcgcccgctatgacgtgaggactgaatttcccgagagtgtatgcggcgaggcggcgggcgcgcctcaaaaggtgacgaaaaaagaccgacagggcagagaggatctgagggagaaaactttaatcacgatcgacggcgccgatgccagagattttgacgatgctgtgcgggtggagagaaaagagaacggaagttatcttctttatgtgtgtatcgcggatgtggcggaatatgtgacggaaggttccccgctggacaaggaggctctcgccagaggctgcagtgtctatttccctaaccgggtctgtccgatgttgcccgcggagctgtccaacggcatctgcagtctcaatgaaggggaggatcgtctgacgctcacagcagagatggagatcagcgaagcgggcgaagtggtgacatatcgcatctatgagagtgtgatccgctctgccgcccgtatgatttacacagatgtgtctgacatcctcgaggaatcggatctttcggaatccgcagatttttccgaatctgccggagattcggctgggcctgaggatgggaacgccgtgcagaaaagagcggaagtacgcgaaaagcgggaagcgaaggaaagtctgaaagaaaaatacagagatcttctgcccatgctttacgatatgcgggatctgtcggagattctggcacagaagagatatcgggagggcagtatcgatttcgatgtggcggagacgcagatcctcgtagacgaggagggcgacgtggtctctctggaacctgcagagcggcggaccgccaataagatcatcgaagaatttatgctgactgccaacaaagtggtggcagagcattgtttctggatggagattccgtttttataccgggtgcatgaaaagccggatcagatgaagatggagcagctgaaacactttgcggcaacattgggctttacgctgaaagggtcctgcagcaatatccatccgaaagccgtgcgggaccttctccttcaggcagaaggcagcgacagtgagagagtcatcggtaaagtcgctcttcggtcgatgaagaaagctgtctacgatacagagtgcggaggacatttcggactgggattccggtactattgtcattttacctctccgattcgccgctatccggatctgatggttcatcgggtgattaaggagacgcttcacggcgcgctgtcggacaggcggtaccgccggctggaaaagctgatgaaagaagccgcggagatatcttccgttagagaaagagtcgctgtggatgcggaaagagccgtggaaaaaaagctgcgggcggcgtatatgagccgttttgtcggcgagaagtttgaggggatcatcagcagtgtggtcagcgccggatttttcgtagagctgaaaaataccgcagagggttatgttcccgcagaaactctcctggacgattattatattttcgatgagaagaattaccggatgatcggagagcggcaccgccgtattttcgctattggagacagggttgtcatccgggtggataaggtgaatacgattaccgacgaaatcgattttcatcttgtcacggacgatgaggagcatggagagctgcagagaaagaaaagcggtccgcggaaaaggaaaaacgacgtggctgagcgaagctcttcctcagaaaagcggtcacgccggagcaaaagacgccggaaaaattccgggaagaaaaaagaacggagcatcggagaagttctgcccgcagatgcttcggccggagaatccgggaaagaaaacggcaattctctggccggaaaaataggagaaaaaagcggaggaagcccgcgcaaaaacggccgcggctatgcgaagaagcggcgctctcgctgagagaagccggatcgggcgaagagaatatctgtgaaacaccacacagaaaaaaggagagcataccgaaagaacgcagcgatctttcggtatgctctcttctgcttttgcacgatgattggatgatatatgattgcgataaaacgatagaagcagatgcagacaaccggtttttctttttacggaaaattatcttccgcagagaaaaactgaattttttctcttcctttgctgtaatgtttctgtgttctgttccggcgaaacggccggaagcccgctgtgatctgaattaaaatcagatcagtccaaggatcaggatcaccgcgatgattaccggcagtacgaaagtgacataacctctgatccaatttggaatttttgcgcccgtccctgtgttcgcttcgctctgataatttttaaagccccatccgactctggaaacgcagaacagcaggtataccagagaacctaccggcaacaggatgttgctgaccgcgaaatcttccatatccagaatatttttgccggcgatggtgaaatcgctccatacattgaagccgaggacgcacggcatggagagaatcgcgatgagaatgccgttgatcaggcatgctttgccgcggctcatattccacttgtccatgaaacatgcgatgatgttttcgaacaccgccagcacggtagacagagaggcgaatgccataaacaggaagaaaagcgctccccagaatcttcctccgcccatagcgttgaatacgttcggtaaagtgacaaagatgagcgagggtccctgatccggattgactccgaaggcgaaacatgcagggaagatgataagtcctgatgtgaacgctacaaaagtatccagtacagcgatccgtccggcttctcccagaagggcatgatctttgctcatgtagcttccgaagatgagcatcgcgccgatgccgaggctcatggtgaagaaactctgattcatcgctgccaccagtgtattgagcactccgtattccttcatttttccgaaatccggcttgagataaaactcgagaccttccgacgctcctttaagcgtcatgctccggatcgccagcacgacgatcagaaggagcaaagctaccatcatacctttggaaattctctcgagacctttctgaagcccccgggagcagataaagaaaccgaaaattacggtaaagagcgcccaggcgcccatttcgacaggatttgccagca

SEQ ID NO: 3750 - DNA, 2404 bp, Unknown
  16S sequences of unknown bacteria
caaagcaacttggatatagtttgcatggattatggattttagatggagttgtctactggctgtttacaaggcaattcaaaccaaaacagtacaccattgtttgtatttgaaatgccgtaatttgctcgatgcatttccatgattttgccaacaatataaagccctaatccgcttccaccggtattacggttacgagatgtatctgctcggtagaaggcttcaaacaaatgtggaatagaatcgtcaggcacacggacacctgtgttttcaatttcaccacgaattgtaccatgcgtttcggacaaagatatacgaatcagttcaccacttggagaatagtgagttgcgtttaccaatatattttgaatcgcccgttccatctgtgcttgttccacttcacaataaagacgggtaggaatatttgcttcaaggcactgttccttttcttccaataaatctgttacagtggcaatctgtacccgaaatatttccgcaaaattaatggttttatattcggatttttgagttccctttgctttggaaacatacagcagctcttttaccaacttttccatcctatcaacaacggccagggaacgctccatgtactttatatggttttcataaccgcagactccgttcagcattcccgccaaatgtcctttcaagatggttagtggtgttttcagttcatgggatgctgccgagaaaaagtctacccgctgtctttctaactcctgttccttttcaatatctgttttgagctgttggttggcagtttgaagatcgttcaatgcagtggatagcgaagcagataatgaatttagattttgcgccaaacaccctaattcatcttctcgttctgtaccacattgaccggaaaaatccaattctgccatttgctttgaaatcttgctcagttgcacaataggtctagtgatataccgtgtatagagccatgcacaaaggagcgaaagcagaaagaccattaggataacatacggaagaatagacagcaatacctttgttgcctgctgtacaacgaacaaatctgtttgaactgccaacgcataagcagtgccgttttttaacgtgaacgggtaaaaatttgtcgtggtttccccagacggttgcatatctatgaacgattcatcttcatcgaatgtaactgtgcaatctgccgaagtagtagaggtttccattgatgcctcgtcgggatatatcatacgaccgttactatcctcaatccaaaaagcagtatttgtttcctttgaaaaattagatatatcattttcacaatcagatatattgtcaaaagctgtcatttgctcaacaaggtgcatagcggctttctctgtggacacatttatcaaattggagtatgtcgcaggtaacagctttgaaatgaaaaaatatgttccgccgcaagccgcacccagtagaaaaaatgtaattataaaaatcttaacggataaacgttgcttaatgtactttgtcaattctgtatcccactcctctgattgtttttatatagtcagcatttaattttttgcgaatgttttttatgtgactgtcaacgatccgatcttcgacctccaaatcgaccgcccacaatcggtcaagtagcatttgccgagtaaagacctttccctgattttcaagcataagcctaagaagcgcaaactctttgctggtcaaaacaacctcgtttccgccttgatatacatggaatccgtcaacatccatactcagctctttataagtaagcagggatggattttgattttccgcagtcctacggcgaagaatagccgcaatcttgcacagcaggattttgggcgaaaagggctttggaatgtaatcgtcaatctgctgttcaaaaccccgcaactggttttcttcatccgaaagcgcagtaagcataataatagggacttgtgaccgcttacgaatgacctcacatacaccataaccgtcgattttagggagcatgatgtctaacagcacaaggtcgatggtatccccaaacattgcaatccctgccacaccgtcagaagcaacagcaacttcatatcccgcatcaatcagatggttctttaatatatcctgaatgtcaatatcgtcctcaacaattaaaatcttctgcattgttccacctccaatttttcaaatatagcagagaaatatgtatctattatggagtctcaaattttatccgcatttattttaccgccattctttcaatctatcaatgttgtcatcgagtatgtagataaaatactactaaaacataaaactgcgtatcgtcctcataatcaaacctgaataccttttaccaaatcgtcaccttgctggacatttccgtagaccagttcttttatcctgacaggcagaacagcgaaag

SEQ ID NO: 3751 - DNA, 3100 bp, Unknown
  16S sequences of unknown bacteria
aacgccagcctgtcacgctggaggtcgtgggttcgagccccatcttggtcgccatatgctgctgtagctcagtcggtagagcgcatccttggtaaggatgaggtcggcggttcgaatccgcccagcagctccacgcaaaccctgtaaccacaacggttacagggtttgttttgttttatcgtttcttagtttcgttggactttccaacagatcttccaacaagctattgctgcgtctgtttttgcagcgttgcaatgatcaatttagcaatgtcgggattttcttgcagcaggcggtacgcctgttccgcagagttatccagcggcttttcctgcggcacatcagcccgtttctggaagaaatccgcctctaccttctccgtcaaccggcggcgctcctcgttgttggtatgggcgtacagatctgttaccatacgggattgtgcgtggccagtatcgccctgcaccgccttgatgtttccgccgccgatttgcagcttcagcgaggcgctgcaatgccgcagactgtgaaaaactaccggcggcagtcctgtggcatcggtcagcttgcggagcagaaaggcaatctgcctttcctcgtagggacgtccgtcctcatgggcaatcacaaggccaaagtcctgataatcgctgtccagcatttcttttgccctctgctgcctatctttctcccctgtgagcgccatcgaaacggttttcgccagaaataccttccgcacactgctttccgtttttggagcctttagtaccagcgatgttgatgatccggtctgcttccactgcggacgctccgtatctgtccgctgcggatcagttcataggcggtgttgcgcccgatgccgagaatgggcatcaagtcccccacccgcagtgtcacgggcagctcatgcaggtcacgatacttattctccatgggcagcgcctccctttacggatgccagatagatgtccgttacatcgggccgctcgtgccccagcagacgggagacggtaaaatgggcatccaaaggcgtcatgccgccgttgatgagagatgtatacttttcagcagcgtaggtatgtcgcagtccatggaaggtaatgcgcctgtccggcgctgtagggtcacagatagcgtcagggtcgcggaggataaactgctgcatgccattgatggcccggtcggtggagatgccatccggcaccagcagcttgtgtccgcgctccgttttgtccagcagccgttctagcatcatcgtgatacggtcgtcctcgatgggaacaatacgcaccttgccgctcttgccctttacggtgagggcgttttcgcgcagcgcacgctccgccgcggcggtgtccatgcgaaagcactcgtggatacgcagaccggcatagcgggccagatacagggagaggatgtagtcctcccgctcctccgccatggctcggccgatcagcttgccgaactccgagttcgtccatgtacgatcctgctgcccgaagcggcggcgttccaaagcaacgcctagttcctcgttgcccggcagcgcataacggggatgggacatcttatcatggaaaaaatggatagcggagaggtcggtcttgatggtgctggcggatttgccttgctcttgtagatagagaacgtagcttactagatgcttgccgctgacgttctccagcttttggagatggtagtgggcggcgaggtaggcgcagaaacgcttgaccgcctcgtagtaacggcctttcgtgcggaagctgccctgacggttgtggcgggccagcttgtccaactgggtaacgagggtgtggtaaatgccttttgtggtcatatagagaaatctccttgtaatcatagttgtgttcagacgggcgcacttcacccgttggcaaggagcgccgtttccggcgcatttccgcagaaaggatagactgccgcaaacggaaagccttgatgctgcgcgcttttcgcggcctgtccgtatgtctgtctctctttacttgtgccaggtcagtacactgccacatgaggcaaacatgccctgctccgatggagcggtggcggacaccaggccgctgaactcggctgcggaaggctccgccggtgtcctgtgatccgcccggtgacggatcgaaggatgtgcgataccccgtatgaccggcgccgcactctgactgcggcatacagggcgggagcttgcctctccctgaacgattttcctgccgtatcgtcccaacggctttttacaaaacttcttttcctgatctgcgccgaagtgattccggcgctctttcttttcctgcggtatcgcggcgtcggcaagtgccgcgacaaaatagtaagcaaaaacgcaggaagaatcttcctgccgtttcggcttcatacgatccttcctgcgtttgcagtattgttcaatttttgatggccaccccggtttcgggaggcgcattttgacatacttcgggttcttagtcagagcgaaaagctgttgattacagccttccacccgtgcctgctctgctccgacctaaatgcgcgatgccttaagtacaggtacatcatggcacggcggcaaagcggcatacaggtggaaaatgccgcgagagaaaatttctcgcagcatagtcattaaagcacgagggcgcagtggcccgaatctcaaacgggagcgtggcgctcctcagtacaaactttacaacgtgtgcggtgcagatcatagacctgcaaatggtgcacaaataactggataatctttatataccacaatatattgtcgctgtcaatatagaaattccgatatattgcactttcccggtagttgaaaatagctaatacgcattatctccgtgttaaatgcgtattacaggcgcaccgcaaaaataatgcgtattgcgtgcgtattaaaagtgtattgggcaaatatgcttccgctcatttgcagcaagataatgtacaataatatgaccgcgacgtcacgctccacatgccccgcctcaagggcatatccttcgagactgccatcatcgagcggtatcgccaccgggagagcagcgtggaggaggccctcatcgagatgtacctggcaggcgtttcc

SEQ ID NO: 3752 - DNA, 1598 bp, Unknown
  16S sequences of unknown bacteria
cagccgcgtggtgctcgaggcggacggcaagctcatggacgggcgcgacgtcgccgtggcggcgctgctcggtgccgaggagttcggcttcgcgacgatgccgctcatcgccatgggctgcctgatgcagcgcgactgccagcaggacacctgccccgtgggcgtcgcgacgcagaactgccacctgcgccaccatttctcgggcaagccggagtatgtcgtcaactacatgaccttcgttgccgagcagctgcgccgcatcatggcccagctcgggttccgcaccgtggaagagatggtgggccatcccgagtacctgcgtcaaagcgctcctgccaagagctggaaagcgcagctcatcgacctgtccgatatgctcgtcgagggcaaggccgaatacggcctcgggattccggaggcaagctgcaggcattcgctcgcggtcgcggggccggaagacacgctgcccaagacgctggacgcgacgctgttcatcccgtacacccgcgaggcgcgccgctcgctcgtgccgcagcgcttccatgccgacatcagcaacgtcaaccgctgcgtgggcaccatgctcggcagcgccgtgaccgccgagcatcccgagggcatcccggagggcacgctcaccatcgactgctcgggttcgggcggcatgagcttcggggcgtttctgccgcagggcatcacgctctccatcgccggcgaggccaacgactactttggcaagggcctctcgggcggcatcctctcggtcgcgccgcctcctcaggcgacgtatcgccccgaggaaaacgtcgtcgtgggcaacgtcgcgttctacggcgccacgggcggcaagggcttcatcaacggcctggccggccagcgctttgccgtgcgcaactcgggtgccacgctggtggtcgagggcgtcggcaacaacggctgcgagtacatgacgggcggcacggtgctcgtcttgggcgaggtcggcctcaactttgccgcgggcatgagcggcggcatcgcctatgtctacgacgccgagcgcatgctggagaagcgctacaaccccgacatggtcctgctcgaggcgccgtccgcagacgagctggcgcagatcagggcgcttatcgaggagcacgtcgagcgcacgtcgagcccgctcggcatcatgatgctctaccgcttcgaggcgatcgcgcacgacttcgtgaaggtcatacccaaggagtacaagcgcgcgctcgcgctcacggcgcaggcggagcaggcaggttcaacgcacgaggaagccgtcgagctcgcgttcgaggcgatgaggaggggcgagtagtcatgggaaagccaggagcatatctcgagcgcggccgcgtcgagcattcggttgagccgccggagcgtgccgtcaagagtttcgacgacttctcaattccgctttcgctgcgcgaacaacgcgggcaggcgagccgctgcatgtactgcggcgtcgccttctgccaaagcggcatcgtgttcgagggcgcgcgccgcgagacgggctgcccgctgcacaacctcattcccgagacgaacgacctgctctaccagggcaggctcgaggatgc

SEQ ID NO: 3753 - DNA, 32759 bp, Unknown
  16S sequences of unknown bacteria
gagaagctctatggactattcaatttgcatgttcaacttaatattacaatcggcgaaaatcaaaagccataataacctccaaaattccgatttttagctctagtataatccatttttcctaccttgcataggcatttattttataccacatcaggcttatgggatggatttgtatatataaaaacgtgtaaaacgttgaaatttcaataaaaaaaagagacctggaacaggtctctaaagtatggcggaggacatgggactcgaacccacggggctgttacaccttacttgatttccaatcaagctccttagccgctcggtcaatcctccaaaagtatttagtcatttctgacgctcatttatattaccataggaacgaagtgaatgcaagcacttttttaattttttcgaattattctgaagttgtggagaaaaccggcctcggaaggtccggtttctccactttctgcaaagcctctcaagcctcacacgttattccatatcttagaacagctcaaagatggacacctgtgccgtatccggcacgccccggaacatgcccacggctttcaggtcgtcgatattactctgggacagcttggtctgctgccgcacatcgtccagagaggtgaacggcgttccgtcgtaggcatccgccagggattccgccgccgctttccccagtccgctaatggccatgtacggaaccaccacttccccatcttccacgatgaagtcgcacggctgagacacccccagctccggcatgcggaactgaagtccccgagagaacatctcgtacatcacttcgtagacggtgagatgatctttctgcttagtggtcatctgatttccaagctgctccagattcttcatctcccgctccaccgcctggattccgtctcgggccgccaggacatcgaaatcatcgattttggaggagagccatgcggcgtagaattccgccggatagtacaccttgaaccaggccattcgaatggacatcagcacgtaggccaccgcatgggcccgagggaacatgtacttcaaggtttcgcaggaccagatgtaccagtccggaaccccgtgactcttcatagtctccagttcctcctctgtcagcggcttgtttttacggacgtgctccatgatccagaaggcttcctcattcgggatgcccttcagaatcaggtagttcataatatcgtcacgacaggaaatcagctcatcgatggtggcttttccgtctcgaaggagttcctgtccgttgttggtccacacgtcggttccgtgggaaaatccggaaatctttaccagcgcagagatggtggtcggctgaatgtcgtccagcatctgccgcgtaaagttggttccgaactccggaatggcataggttccgtgaacgaatttgtagtccggattctgaatattcaaggcctccgtagaggtgaacaggctaatgaccttcttatccgcaacgtcgatggtcatcggatccacaccggtcatattctgaaggtgacgaatcatctgcggcacatcgtggcccagaatatccagcttcagcaagttcttatcgattttgtgataatcgaaatgggtggtgatgatatctaccggtttgttggccggacgctgcaccgggcagaattcatagatttcatgatcgtccggcacgacgatgattccgcccggatgctgcccggtggttctttttacccccgtacagcccttggtgagataatcgatgtcgtatttgctcaacttcttcggcgattcatccgcatagtgctttacgtagccgtaggcggttttgtccgcaacggtggctaccgtgccggctttgaagatgtttttctctccaaaaatcacacctacgtatttgtgggccgtggcctggtattcgccggcgaagttcaagtcgatatccggctccttattgccgctgaatcccaggaaggtggcaaacgggattcggaagccgttcttctcgtacggggtgccgcatttcggacacaccttgtccggcatatcgaatccgcagtcgtactttgcttcatcttcctccgcaagccattccaggttcttgcacttcggacagatataatgcggctccaacgggtttacctcggtaatccccgccatggtagcggcgaaagaagatcctacggatcctcggctgcccaccaggtagccgtcatcgttggatttttttaccagacgcatggctgctacgtacatcacggcataaccgttattgatgatggcgttcagctccgtatccagccgggtttgaatcacttccggaatcggatcgccgtacattgcctttgcattctcgtaacaggtatcccgcaggaattcctccgcgccttcaatcttcggcggacacttatccggcggcaccggctcgaacacctcgcacatatccgcaatccggttggtattggtaataaccacctcttccgcccggtctcccaggtaggaaaattccgccagcatctcgtccgtagtgcgcaggtacaggctgttggcgttggtctcgctaaagcccatgctggacatgatgatgttccgatatatcgccgactccttcgtcgggtagtgggagtccgtagtggcgacggtcatcttccccagctcgtccgccagggacagaatcagcaggttattgtccgccagctccttccgggatgccaccatccctttgtcaatcatgaactggttgttgtccaacggctgaatctccaggtaatcgtagaaatccgcaatctgaagcagctcctcccgggaagccccccggttgattgcctgatacagctcgccggcctcgcaggcactgcccacgataattccctcccgatgttcctgcagtacggaacggggaagtctcggtttcttgtaaaaataatctacgtgggaataagagaccattttatacagattccgaagtcccgtcaggttcttggccagcagaatgatatggtatgtccggttcttcttgatatcgatggttccatccggcagcagggcatcctcatcgggatacaaatatccttccatgccgtagatgattttgatatccttccctttgccccgaagttttgccgcccgattagccgcatccgggaaggcctgcaccacgccgtgatccgtaatcgccaccgccttctgaccccaggccgccgcctgatccaccagttccgcgatttcgttgaagccgtcgttgtcgctcatcttcgtgtgcacgtgaagttctacccgcttctcccccggatgctcatcttttcgctccggttttgacgactggttgatggaacgggccatgatgcccacttcgttttcaaaagtatcgaattccacgtttccggagatcttcagccagtctcccagggaaacgttttcctccagcagttcaaaatcctcggtcttcataaaagccttgcagcaggtggcccgctctttatcggtgatttccatggtcaccagaagtttgccgttcttgatggcacgggaatccaggctgaacagttctccgcgaatgaccacctggccccgctcccccaccttgccgtagatttcctcgatgggaatgggttctccggagatataggtaccgtacagaaccccgccggaaacgttgggcttcttgctgcctttgcttttatccgacgccttcttcgctgccggtgcttcggaagcttgataggcgtaccggaaccgcacgtccttcgcctgtcccaccttcttcagaatccgatcccgcatgcgcttctcatgaattcgaggtatcacaaaattgagtttgacaccgactaccagcgtcaaactctctttttccagatataccctgggtatttcaatattaatatcctgttctttcatcccggaaatgcgttccagctcttccgttgtcagaatatcttggggtattttgatcatccactactcttctttctctatcatttcaatgagacggtctaccagttggttttccggaacctttccgataatctccccgtgggagaagagcaagccttcgccctttccaccggcaatgccgtaatccgcttcccgggattctcccggaccgttcaccacgcagcccattactgcgacctttaacggtctcaggcctttctcctgacgtcttttcgcaaccggaaccaaacggttctccgtttcctctgccaaggaaatcaaatccacttccgttcggccgcaagtcgggcaggaaacgatttcaatgctcttttcccgaagccctaccgcttccaaaatgcgctgcccgaatagaacttcctgaaccggatcgtccgtaagggacacccgcagggtatctccaatcccgctgaggagcagtccgccgattccgatggcggatttcagctttccgttggatggcgtgcccgactcggtgatgccgatgtgcatcggtacgtccgtttccttggcggccagcgtataggccgcataggtcatgggaacgttggaggatttgatggaaagcaccagattatcgaaatccagattttccatgtagcgaaccgtattcagcgcgctcttcgccagcgcttccgccgttacgccgccgtattccgccagaatttctttttccagggaaccggagttgacgccgacccgaatcgggatgtgccgctctttggccgcctgaaccaccttctgtacgtactccgcttttccgatattgcccggattgatgcgcaccttgtccgcaccggcttcaattgcaccgatggccaatcgatagtcgaaatggatatccgccaccagtggcacttccgtcttcttccgcacctgtgcaaaagactcacaagcctccacatccggaatcgccacccgcacgatatcgcagcccgcttcttccagttcctgaatctgacgcagcagcgccttctcatcccgggtatctacatttgtcatggattgaatggaaaccggtgctcctccgccgatttgaattcttccgcattgtacgcttctcgtcatatcattctcctatccgaacaatcgcataatatcgttccaggtaataaacacagcaaaagtaatcagcaggaacatgcccgccagatgcactttcccctccatatcatcggaaatcatatttcccgtaatcttccgaatcatcacaaagataattcttccgccgtccagcgccgggaaaggcagcagattaatgtaggccagattcaggcaaatcagggctgccagatacagatacggcaccgcgcccgccgaggccgtctgattcaccagtgaaaccattcccaccggacccgccaggtcgtttcgggacatctgcccggtaaagagcatcttcaagctcttgagcatcagtttgttcaagttccaggtggccgtcgcgccatatcgtccgcaagtaaaaatattatggctttgtctgcaggcaatgcccaccatcattcgtttctctttcttggagtattccggctgaacggtgcaattctgtttcttgccatcccggtccaccgtaatccgaatttctttcccggacttgtctcggtcgatttcctgtaccacttccatccaaccggatgttttgacctcattcactgccacaacacggtcgcccgcccgaagaccggctgcctctgccggtgaattcttcaccacagaatccagcgtgttggtgggaatgccggatacggttaccgcaataatcatcaccagcagtgcggtgatgacgttcatcacggcgcctgccaggagcacggcaatcttctgccacaccttcttgttgttaaaggctctcgggtttccgctttcctcgttctccccttccatggcgcaatatccgccgatgggcaggagccgtacggaatacaaggtctcccccttctgtttctggaagagaaggggacccattcccatagagaactcgttcacctgaacgcctaccaatttcgctaccacaaaatgtcccagctcatggggaatgatcataatgcagaaaagtatgattgttagaattgctgtcagcaataaagtaccctcgtttcttaactcatttatttccgttcttcactctccggtgaaggtttcggaagagaactaaccttgtgccagttcccttgccattcgccgggcttcccgatcgatttccagaatttccgatacgctcttcggatccaccggattgtgggcctccagcaccttctcaatggtgcgctgaatatccaggaagcgaatttccttgttcaggaacatggccaccaattcctcattggcgccgtttaatgcaatcgggtaacttcttccgtcttcaatggcctgatacgccaagctcaggcagcggaacacatccatccgaggcttctcgaaatgaaggttggcgccctccttgaagaagtccaagctgtccccggaatactccagccgcttcgggtatcccaaagccaaactgatcggaatccgcatatccggaagtcccatctgagcgatcaccgaagtatccgcaaattccaccatggaatgaacgatactctccggatgcacgtgcacatcgattttggacgccggcacatcgaagagccagcgagcctcgatgacttccagacccttgttcatcatggtggcggaatcgatggtaatcttccggcccatggtccacttcggatgattcagcgcctgatccaaagtcacatcttccagctcttccggagagtacttccggaacggtccgccggatgcggtcagaagaatccgccgaatttcccgtcccttgtttccttccagacattggaaaatggcgctgtgctcgctgtctaccggcaagagcttcacgccctttctcgccacggcatccatcaccagagcgcctccggccaccagggtttccttattggccaaggcaatatccttccccagccggattccgtgataggtcggtgccaaaccgctgattcccatcagggaattcacaatcatgtctccctcgacttccgtcagctgaatcagaccctcgtcaccatagtacacggtaagattcgggaatcgttcctgcacccgacaagcatccgcttcgtttcccacgcagaccccaaggggccgatatttctcaatctgctgaatcagttcatccacccggcttctgcagctcaaagcggtcacggtaaacaaatccggattctcatccacaatgtccaaggtctgcgtaccgatggagccggtgcttcccagaataattattttcttcatccgattaaccttctatcctcttcttctctgttccgtttataccagaacaaacagaatgtagtagcacactgccggtgccacgaaaatcacactgtcaaaacggtccataatgccgccgtgacccgggatcaggtgtccgtaatccttaattcccattccacgcttaaacatggatgcggtcaggtcgcccgcttcggccaccattccgcccagcacgccgataatcatgcagtgcaccatcatggttgggtaaaagaagtatccgaagattccgcaaagaaccgcacttcccacgactccgccgacagcaccttcgatggtcttcttcgggctgaggttcggtgccatcttgtgttttcccagaaaatatccggtgaagtaggccatgatatccgaaccgaaggccgcaataaccaccagccaggtcatctttggatatggggtgttgtcaatgataacaatgtggtaggagaacagcacgatgtacacaagcgccgtcagcgtggcaactgcatcgtacggctttctttccgtaattttccatccgtagatcatgctgaccatcatggaaagaattacccatgccatcaggaaggtgtggttcacgcccaggaacaggtgtcccgcatacagaatggtaatcataacgtacgcgatcggtttggatgggtgaacccccatgttttcaaaaccgttatagaactccgttacgccaacgtaggcaatcagtgccgctgccgccaacagcggaataccgccaaaatagataatcaacagcaatggaaccattacgattccggaaataattcttgtcttcattacttgtcgtccttgtcccttcctccgaatcttcttttgcgatgggaaaattgttcacagaggttcccaaattcctccgccgtgaaatccggccacagtgtatcggtgaacatcaactcgctgtacgccgattgccataccagaaaattggacgtccgctcctcgccgctggtccgaataatcaaatccggatccggaatatcatcatggaatcttccggtatagagatgcgcactgatgtcctcctccgtaatttccgtccggcccggttccgccagcagctcgttcactgcttttacgatctctgcccggccgccgtaatttaccgcgatgttgaataccagacctgtattatccttggtggcatccagcaatttatcgattgcggccacagaatctgccggaagctcccggtattcgccgatgatgttgatccgcacgttgttcaccaccagctccttcagttccagctgcacgtacttcacgatgagccggaagatgccggagacctcttccacgctgcgcttccaattctccgtggagaacgcgtataccgtcaggtactttattcccatattggaagccgcaattacgatttttttcatggactccatgccggcattgtgtcccatcaaacgaggaacccctttcttctttgcccagcgtccgtttccgtccattataacacctacatgtgtaggaagtttgttcggttctgtcataaatatacctcttaatacaagcaaacgtggctaaagagccacgttatactcactcattattatactgccatcagttcttcgttcttcttggcaatgatttcgtcaactttcttgattgccttgtcgatggtcttctgaacatcgtccagagcattcttcatctcgtcttcggtgatgtctccggctttctgctgcttcttcagatcgtcgttcacatcacggcgtacgtttcgaatggcaaccttcgcatcttcgcccatcttcttaatctgctttaccagctcttttcttctctcctcagtcagctgaggaattcccaagcggatgcactttccgtcattggatgggttgatacccaggttcgcttcgttgattgcatgttcgatggttcccagtgtggatgggtcgaacggtgaaatcattaatgttctggcatccggtacggatacgtttgccagactcttcagtggagtcggaacaccataatagtctacatttactctgtccagaagagccggatttgctctgccggcacggacggtgttcagattttctctcagcacgttttcagttttttcaagcttttcttccagggatttcttatgagacatttttcttcctccatttgtgtcttctaatgaatcagcgttcccacattctcaccgttaatgactttcatcaggtttccttcttcggccatcgcaaaaacgtacagctgaatgtcgttgtccttacagagagtggcagcggtgaggtccatcactctcagttctttctctacaatatccatataggtcagttcttcataacgttccgcatccggattcacgttcggatcttccgaatataccgcatcgatgttctttgccagtaaaattacttccgcattcatctccgccgcccgcaaagccgctgtggtgtccgtggagaagaatgggcttcccgttccgcctccaaagattacgactttgttgtcgtccagataatccagcgccttccgtctggaatatccctctgccatatcgcgaatttcgatggcagtcatcaccttcgcatcgcatccgatggaaagcaaggaatcctgcagtgcaagggcgttcattaccgttgccagcatacccatataatctgcggttgcacggtcgatattctttccggtacgaccccggaagaagtttccgccacccacgacaatggcaatctgcaccccttgatcgtgaatttccttgatctgcgcggccgtctttgcggtcatctccggattcacaccgaatttatcctctccggccaatgcttctccactgagcttaattaaaactctcttgtatttggttgccatatttcacctctcctacttctgttgaaatagtatcatattaccacatctttgtaaatcgcattctaccgcttcggctcgatgagaacggtttccgcagaatctacggccgcctttaccagagcgtctacgtccagcgcttcttccgatttctcaatattcttcagcttcggcttcgtcaccggatgcttcggcaggaatacggtacagcaatcctcatacggctgaatggagatatcgtaggtcccgatttcctgcgccttatccatgatgtccaccttgtccatggcgatgagcggacgcattaccggcatcttcactaccgcatcggttaccaccagggcttccgccgtctggctggccacctgtcccaggtcctctccggtaatcagcatcatatcgtgtttcttaatcgccatttgctccgcaattcgcatcatgaaacgacgcactaagatggtggtttcatcctccggacagttctttacgatttcttcctgaatcggcagcaggttcaccacatacattttgatggatcccatatatccggccagcacgccgcacaggtcttctaccttcttctgagctctctggctggtgtacggatacgaatggaaatgaatggcttcaatccgcattcctctctttgccatcatgaatgccgcaaccgggctgtcaattccgccagacatgagaatcaggccctttccgttggtacccagcggcaaaccgccaaagcccttaatcttatctcgataaatgtatgccccttcggaccgaacatccacatagagcaggacttccggttcatgcacatccacgtgcagcaccttgcaggtcttgagaatcgttgcgcctacctgacggccgatttccggagactgcaccggaaacgtcttgtccacgcgctttgcttttaccttgaaggatttgattccttccttctcaatcaattccatcatatatgctgctgcggctttaccgatggcatccatatccggtacgcagcaggttgccggactcacggtggccacgccgaacaccttcgatgccacccgaaccacttcttcccgaggcacatcggccggtacccgaaccagcatcagaccgccaatccaacgggattccacatcgttgaatacggaaagggcactgcgcactctttccagaagtacccgttcaaagtacgggcggttcattcccttcagtgccacttctccgcaccgaacaatgtataaattcttttccatgtctgtctcctatctgtcttctaccggaagcttcccagtctccggaatctcgttaccgcatttttcaggcggtcgatgacgaaatccatttcttccatcgtgttgaactccgagaaactgaaccgaatcgcgcattcaatttctttatgccccaaggacatggcctgcagcacgtggctgtctcccgtgtgatgggatgcgcatgccgaaccggtagatacaaagatgccgtcctgctccagcgtatgcagaagcacttcgccgcgagttcccaggaaggaaaaattaataacggacgggcagcgggttccgtaatgctggagctccaatccctgttcttcgaaaccgttcagctgcacatccggaatctcgtcgataaccgctttccgaaagtaatcgttcacctgtgccatcttctgctgtttttcgaagatattttccgtggccatctgagccgccagcccaagcccggcgattcccggtgtgttctcggttccggatcggaatccgtcttcctgtccgccgcctagaataaacggcggaatgtgaacgcccttccgaatgtagagggcacccactcccttcggcccgtggaacttgtgtccgctgatagaaatcaagtcgaagggtgcgtcgttaaattctacttttccgaaggcttgtactccatcggtatggaacaggatttccgttccgtgttcccgattaaattcctgaacgatacggtaacacggaagcaccggttcaatggtgcccacttcgttattcaccgccatcatggataccagcacggtctcctcgtctaatgccgctttcagcgcctgcggttccacgtatccgttcacatcggaggcgagatagacgatttcatatccatcctcctgaagacgcttcacgcattccagcaccgccggatgctccagctgtgtggtaatcacttttttcccacggcgacgcatcttgcggcaggaggagaaaatcgccatgttatcgctttccgttccgccggatgtaaaaacaattcggccgtctctcgggaatgtccggctcaatgcttctctcgcatcaaaaatataattgccggcttcaaatcccatggaatggagggaagacggattcccgaattcctctcgctgaagccgaatcattaaatccgttacttcatcatattgccttgtagttgcgctattatccagatatatcatgttattccttctatgtcttcttctatgctgtctttgtcattgcgacttgcctttgcggtaaaaaagctccccgaatcggggagctttgattatttcgcgtaatcggttgctcttgtctccctgataacattaaccttgatttgtccgggatattcaagttcgccttcaattttctttgcgatttcacgagcaagcatcggtacttcgtcgtccttcacctggttcggttttaccgcaatccggatttctctgccggcctgaattgcataggacttgtctacgcccttcgtggtattggcaatctcctccagactctccaaacgcttgatgtaggattccagtgtctcacgacgagctcccggccgagctgcggaaagcgcatctgccgccgctaccagcaccgcttccatggtggtcggctccgcatcaccgtgatgtgcctgaacggcgttgaccaccttccaggattccttatacttcttgcagatgttcgcgccgatttccacgtgcgttccttccacctcgtggtcgatggatttgccgatgtcgtgaagcagtccggctctctttgccagtcttggatcgtaacccagttccgaagccatcagtcccgccagcagggagacttcgatggagtgcttcaatacattctgtccgtaagaagtacgatacttcagacgtcccagcagtttcaccatctccgggtgcaggttgtgcacgccggtctcgaagcaagcctgttcgccctcttctttgatgatgttgttcacttccttggtggccttctgcaccatttcttcaatgcgagccgggtgaatacggccatccgtaatcaatttctccagtgcaatccgagcgatttcccggcgaatcggatcgaatccggaaaggattaccgcttccggtgtatcgtcgataatcaaatccacgccggtgagggtctcgatagcacgaatatttcttccttctcggccgataattcggcccttcatatcgtcactcggaagaggaaccaccgacacggtggtctccgccacctgatccgccgcacagcgctgaatcgccatggtgacgatttctctcgcccgcttatctgcctcgtccttcgcttccgtttccacctgggtaatcatggcagaagcatcctttcggatatccttctccacttcgtccagcagaatctgtttcgcttcttcctgggtgtagccggaaatcttctccagctcttccacctgctttgccagatactcgtcgattttctgatgtttctcgttcatagaacgctctctcttcgaaagaccgtcctctcgacgttcgatgttctccagctttttctcgatgttctcttctctctgaagaattcttctttcggatttctccacttccttccggcgatctcgaatctcgttttccaaatccgacttcagtctgtgtgtttcttcctttgcctccaagatcttctctttcttgatattttctgcggcattttccgcatccaaaatcaagttctgagccttctgttccgcacttccgattttgctttcgcccacgttcttgcgcagaaggtaaccaatcaacagtccaacgatcagaaacacaacagaactaaccactccaacaacggtagcattcactgttatgtcctcctttaaatataaatgtaaaaaattgtgtattttcgtacgaatcaactgacggttccagtcagcagaatttcataatcatacaaaataattataatccgaattgcaaaaatagtcaatatatacaactctatttaaaggaatacccccatgtatagttatcgtttccaaaagaattttttcgattagaatatttttatttgtgaagcagtcgttcggcgatatttcggaagtttccggatacataggattctttttttagaacggcgggaactcccgcatcggaagacacccgaaaaatatcgtcctcgagaatcattcccagcatttcgcacttgaactgcatattgatttcctggggttccgattccagtccctgctcggtcaaagacggatagatgcggttcagcacgtatcgccgctgcagcactcgctttcgaatcagccggtcctccagcatgtccgcatttcgaagagacgtctgctccggggtcaccacaatcagcgtttcctctgccgccgccgcacaggtggtgacgaattcatccgcacccggcgccccatcgattacgatgaaatcgaaattctcctttgcatcgtcaatcaatgcctgccatttctcccggtccaaacggtcacggtcttccataaggccgcccggaaggagatacaggctggtcggtttttccatccgaaccaccgcctgctccaacatacagacgccgtccatcacatcaaacacatggtagattgcttcattttccgcatccagcatgagatccaatgtgcgcatccccggattcatatccaccagcagcgtatttctccccatcatgcccagggttgcggccagattcacggcaaaaacggatttgccggttcctcctcttcccgatgcaatatagaatacctgattcatcgctttactccatataaccttcatttctgagactgatgtatcggccgtcaccgataatcagatgatctaacagacgaattcccaccaacttggaaacctccataatgcgtttcgtggattgaatatcatcctggctgggggtgggatccccgctggggtgattatgggccaaaatgattcccgcggcccctttccgaatggccgggcgaaagacttcccgcggatgcactaccgtggatgtcagttctccgatggaaacggtgattcgcgactcgatttcgcatttcgcattcaacagcagggccaccaaatgctcttgcttcagccctcgcatatcctccatcagaaggttggccacggattccggattcttcatggaaatccttgactcatccgattcccttcccagcaagcgtcgcgccagctccaggctggccacgatggagcaagctttggtggatccgattccgtcgatttccgtcagctcctgcacatccgcttctcgcaaactgcccagttccttagcggaataggccagtacgtcttccgccagctgaaccgcggacttgctggaatttccggtccggatgatcaatgccagcagttccgatgtgctgaggctttccgctccggcatacatcagcttctccttgggacgctcctcctgaggaatatctttaattctcatatgcttctccttatgttcgaagcacatccgggtattactgtctttctgtttcacttcatttctacgtgagaaatattatagcaaaagaagttccggtcatcaatcctccggaacttctcgttaagcgcaaaattaaacggttttctgcgttttttaaactcttcatttttctagatatagtttctctgaagaatggtgatattctgcagagccagcaccaccagcgtaacaccacccacgctgagcagcatattaacaattccgctgtcgaattttacatggttgataattgccagggtaatcataaagaactgtaataatacgcagaaccttgcacggctggcatacatgttggcataatccttctcccggccgctgaggaaaatatccacggtggtcatatacttcacgatatgcatggaacccacaatggcctgcgcaccgatcatcagcatgatggcatacagaatctgtgtttcctttgcaccgaagagatgtgcaatcggtgcatagaacatcatgagaatgtcaaacacaaaagtgagatatacaaagaaccggcatttctgcagtgctcccagaccttcccgattcagctgtctgttttttctcgcattgttatttctgtttttcttgaacttcttgctactcatttttcccctctgccatcttcatgatttcatccaagacctgatcgattgtcatatcggatgtatccaacagtaccgcatcctccgcctgctgcagcggattcagtttccgatgggtgtcctgataatcccgttctttaatatcttcaaagatggagttcaggtccgcctctttcccgctttccagaagctgatcgtatcttctcttcgctcgaaccatcggatccgccgtcaggaaaatcttcacctccgcattcggaagcacattggtgccgatatcccttccgtccatcaccacgctctttccttccgcgatttcccgctgcagcgcaaccagcttgctgcgaacctccggcagcttggagcagacagatgccgctttggagatttccggtgtacgaatttctccgctgatatcctcgccgttcagaaaaatctttccgttatcgaaatcaatggtcgtgcgatccagaacatcctgcacctccgcagaatcttctgtattcactttgtttttcgcaaacatccagccgatggcacgatacatggcaccggtatcgatgtattccatgttcatcttctctgccaccatcttggcaatcgtactcttcccggcacctcccggtccgtctattgcaatccgtatcatttttttatttcctctctatacctatctgaattctatctgtcaatccgctatttctcttcgttccgctcttccggtcgaactccatctttctcctgaaggcggttcacctcctgcacaaaggtgttcacgtccgtgaatttgtggtacaccgacgcaaaacgcacataagctacctgatccagattccgaagttcatccataatcagcgccccgatcatcttgctttcgatttccttttccatggtgttgttcagaccgcgttcgattcgttccgcaatcttttccacgtcctcataggtaatctttgtcttctcacacgccttcaggagtccgttaatcagcttgttccggtcaaaactctcccgtcggccgtcgtttttcaccaccaccaacagggaattctcaatcttctcaaaggtggtaaatcgtttcttgcacttctcgcactcccggcgccggcgaatggccagcccgtcctctaccggtctggaatcgattaccttcgtatccgaattgttgcaatatgggcacttcataatgctacctccacattgattctgctattctgccttgctcaatttcattacctgcttcatgattttctcataaagcaaaccctcatacatgttgttctgctgcgcgtactccttcagggaagttccgctctgctcttcgaaggaatcctcggtcatgccgttctgcttcaaaagcttctgaaggtattcgttgtattcctcgtccgtcacggtgacatccaattccttggccagctgccgcattaccagctgctgcttcacggaattcttcgcatacgcatccacctgcttattgaaggacttctcatccatcttcatgtactgtttcagaaaatcttcgtactccagattgtactgcttcgccaaattcttataggtctccttcatggattcctttgacgcatccagttccttctccggatatttcttcacttcgctgtccttcagaatcttcgcaaaaacttccgaatacgcatccttctccgcggtcgcttcgttctccttctccagtttcgtgcgaatcgacttttcgtattccgccgtattcttgtatttcgtatttttctctacaaaagcatcgttgtattccggcgtgttcgtcttcacgatggccttcaccttgatggtaaataccacgttctttcccgccacgtccttattggaataatccttcgggaacttcagtttcaggtcgaacttatcgcccaccttgtgacccacaattccttcactgaaaccgtcaatcatgctgtcattggcgatgtccaaggtgtaatcttcggcggatccgccgtcaaatttctttccgttaatctttccggtaaaatcaattttcaccttgctgtcactgccgaccgtgccgcttttcacgtccttcgtggtactggctttcttgattgccttctttacttccgactgcacatcactgtcggataccttcttcaccttcttcgtgtattggatgcccttgtagtttccaagagtgacgtattccgttaaatcgtcatatttgtaggtgtccggtacggtaatccgatccttctggaagaagtaccagaagcccaaaatcaatatggccgccagaaccacaacaccggttataattttcttcttcttgctgagcatatattcacctcatatcatcgtaattgtattttggcacatattaaatattagcataatggggtgttgttttcaacacctcatatgtcaccgaaatccgcacagcaaaaaggacaccgcaatgcggtgtccaaaagtcattattttccgttcatttccgaatcggctttctgctgggcttcctttttcttacgaacctcttctgccctggccagcgcccgctcccgcttcagtcttgcattcttatccatggaataccaccacaggaatgcacagaaggaaacgaagaaggctgcccctatcagaatccagaaatgactgacgaaatattccatgactagttagctttctttgcagtctcgcacagtgctgcaaagcctgccggatcgtagattgccatctcggacagcatctttctgttcatttcgattccggacttcttcagaccgttcatgaacttgctgtagctgatgccgtttgctcttgctgcagcgttgattcttgcaatccacagtcttctgtattctctcttcttgttctttcttcctacataagcagaacggagcgctctcattacagccggatttgctgccttaaagtttctgctcttctggccatagaaaccctttgcctgcttaataaccttcttatgtctcttgcgtgctgttacacctttttttactcttgccatgttcttctacctccctgattacttcgccaacgatctcagcatacgctttgtatctgcacttgtcagaatggaagactttctcagtcctctctttctcttagccgtcttcttcgtcaggatgtggctcttgtatgccttgtttctcttaagctttccagatccggtgagcttcattctcttgcttgcgcctctgtgagacttcattttgttctttgccattacgctttcctcctaaataatacttacttgttgctctttggtccaaggaacatcgtcagacttctgccttcgaacttcggcttcttctcaattacgccgaactcggaaacttcctctgcgaaacggttcatcacgtcaaaacccttcgccgtgtaatcccgttctcttccccggaaacgaagactaaccttgagcttatctccgtttttcaagaatttcttagctgtattcgctttgacctgtatgtcatgctcttcgatgaaagtgctgagacgaacctctttgacctgagtcaccttctggttcttcttcgactgcttctctttcttctgaagttcataacgatacttaccataatccagaatcttgcataccggcggttccgcattcggtgatacgttcaccagatccaggttgctttcttcggccaatgccagggcttccttaatgctcagaactcctcgcatctccccttctgcatcaataacgcgaacttctttagcgcggatctcttcattgatctgcctgctgtctttgtctctgtgatctctactaatcgctcttacctccatacattaaaaaagcggatacagaagtatccgcaacaaaaacaagataaaagcttgcatatagttaccttatgcacctgcgtgataaggtgagaagcggataacttcttcttcgaccataatataataccgtacattccctgccgtgtcaagtgtttttctgtgttttttcttctgctataataaaaacatctcgacagaaaggacattctcattatattatgaaaattcaagaaatacaaccggttattctggcctctcaatctcccagaaggcgagatatccttcagcagcacggggtctccatcgtactccggcccacccataccgacgaacatcttccggacgggatttccccggaagatgcggtatgccttctttcccgggaaaaagccgaagcctgctatcgggaaatttgccccgaggaattccgcgaaggcctgattatcgccgcggataccatcgtgtacaaggatgaaatcctcggcaaaccaaaggatgaagcggatgcgttccgcatgctttcctcttaccgaaacaccgttcaccaggtgatgaccggcgtaacgctcatggatgtccaaagcggcgccgttcattccttctgcgaaaccacccatatccggtgcaaggactataccgacgaggatatttggagttacatccgggagtgccggcccttcgataaagccggtgcctacggaatccaggaggatttctcgaagtacatcgaccgctgcgacggcgattatgagaacgtagtagggcttccattttcccgtctggaacgggaaaccgatgaatttacagaaaaaatccggtagtgcacaagcactgccggattttttttacatcttgattacgtatatggaaatcagaatcatcacagcaaataatgccacgataacctgaatcacatctccgattaagcgatcctcattctcaaaggacatggatttgattttcagattgccggatttttccgtccagagatacggattgcccagaccggtaccgaagaactgcaccccgtgaagcacatgacgatcgaaccatccgaacacacggtacagccccttggacagcgcttcgattatttttaccagcggtctccgatagaaccagtcgaaatccatgctgatttcatcgtggggcttcatgatgctgagcatgaagaagaacggaatggcgccgccggcgatgattgctacatactccataatatgcggaatcgagaacggatccaccatggttttgtaggtaagctgctgatacagaagctccggtttcatgccaatgacgatggacatgatggtaccgattaccaccgctgttgtcatggagtgggtggcattctgcacctttacctgccgatcgcattttccgaaaaatacgaaatagttaatcttcagggtaatggacagcagagttcccacgccggcgatggtaatcataatcgccgggaaaccctccccatattcgtgaagactttccattatcagtgccttgctggcaaaaccgctgaggaacgggaatcccgcaatggccatggaagaaatcaagaagcagaatgcggtaatcggcattttcttccgaaggccgcccagctctgtgattttgcaggttccggtggctttcataatggatccggcacacatcagcagcacgcctttaaagaatatattggttaccgcatgggcggatgcaccgtccacgccgatttcacttccaacgcccaacgatgccaccatcatgcccagctggctgacgatatggtaagacaggagccggcgaatatcgttctccagaagcgccatgcaggccgcaaagatggccataaaagcacccacatagattagcatatgggttccggagaagaatgtaatcagcgcataaatcgccgccttggtggtataggatccaagatataccgtacccggaatggtcgcctccggataggcatccgcaatccatccgttaaacggcggaatggccgcattgacgccgacaccgatgagaatcagccagaacgccgttccgtgcatatttccggacagattggccagaccgattccgttatggaaaatctgtaccagaattccggccagcagcatgttccctccgaaggcatgcaccagaacgtatcggaacgccgccctggaagaacgccggcagtgccgggcgtatatgatgtacgtggatgcgaaggccgaaatctcccagaatacaatgaagctgatcagatccccggcgagcacgatgcccatattgctccccgcgtagatgcaggtgattcccgcctcccatttgtcctgaagattcatggcatagatggcattgatcacgccgatggtcacgaagaccatcaggaacaccatggatacaccgttggtatcgatcagttggagtgtcagattatcggtaaccttatagggcagcgtgctgtgactgtccatcatccaaaatgcacaaaaagcacacaccgatccggcaagcgtaaggtatttccggcatttttccggaagcgccagaatggtgattccaaagagaatcatcattaaaccgggatgaagattgttccagctcattttcttcctccctttctgtctcgcttgtcatttttctttttactcagattcgcttttcgaagcatctgcagctcctcttctttttccgtggtctcgtaataattgacatctctccgaaggggtttgttcatcactactttggaaagaaaaatcagcacaatcgatcccacgaaagagacaaaaccataatacaagaactcattcatcatacactcctacagggataatccaaaaatcgcattgcccgccatggctgccaagtcgtagagatgcagcccgaaattcggcattacgcccaatatcagagaacaagccgccgtaaacatgatcggaatcagcatcggcaggctggcctctttttttaccgggaactgactgttgtaaaaatcccgcttaaacgccagcagtaccaccggcatcaaataggtcaatgccaacagcgcgctgacaatcagggtcgctacaaaaaacggctgtcccatggaaatggcgcccatgatgatgttcgccttactggtgaatcccacaaagaacgggaagcccgccactgccagagaagccagcgtgaagcaagtcatggtcaccggcatctgtcggccgattccgatcatctcgctgatattctttcggtgagtggtcacgaaaatcgcaccggcacacataaacaatgtaattttcataaaagcatgggcaacgatatgatacagtgctccggttgccgcaaacggtgacagaatggcaattcccaagatgatgtaggaaagctgtcccaccgtagagaaggccaatcgcgccttgagattatccttacggattgcaatcagggacgaaaccagaatcgtcgccaccgccatccaagccaagatttccgaaccgtggcagaagcgtgccgcttccggtccgaacacatacagcaccacccgaagtgtgcagaacgccccggctttcaccacggctaccgcgtgcagcaatgcgctgaccggtgtcggcgccaccatggccgccggcagccagctgtgaagcggcattacaccggctttcacaatgcccgcaccaatcatcagaataaataccgccagcatccaaggcatcggaatatcgccggtgttcacgaatccgcccggaacaaaatccatcctcccggtaaaggaatacagaatgacgatccccgcaaagaacagctgtccgctgatcaaggtatacgctaaatatttccgtccggaacgggttccctcctcatcccgatagtgtactaccaacggataggtcgctaccgtcagcacttcaaagaagatgaagaaggtcagcaggttcgcggagaagcagagtcccatggtggccgtcaggcacatggcgaaagcggaatagtatccggtctggttcttctccccgtgcccccgcatgtatccgatggaatagcaggatgtgacaatccacaaagtggaagctacgcaagcgaaaatcatccctgcggcatccacggaaaattgcagcggaacccccttcacaatttccaacagcgtgaacccgatctcttttcccgccaaagcagccggaatcatggaatataccagtgccgccatcggaaaagccgccgcaaaggtaatcgcctcccgataattcggacgaatatgttctcccaatacgtagattaaacaggacgcaatcagcggcaggaggacaatgatgccgggtctgtaatccagagcagtcagaatcataatgccactcctttcagcgaaatcagcagaatatcaattactttaacgttaaatacgcccagcagcagaatcataagaatgcaggtgacaaccggaatcatgatggtgagcggcgcctccgtcacgcccttcccctccggatgcagcggctttctgtttttatccgcctgaacgaatactttctcaatcaccttgaagaaatagaccgcattcagcagtgaactcagcaccagcacaaagatatacacatactcatgggtctgtgccgctccgcaggccagataccatttgctgaagaaacccaccgtcggcggaatgccgatcatggacagtgcacccaccgtcaacagtccggcagtgaacggcatctttttatatattcttccaaagtcatttaaatcaaaggttccgtacttccaactgatggcgcccgccgcaaagaacagaccgcctttcataaaagcatgtcccagcatgtgcagaaaagcgccggccagggccaacgggcttccgatggcaaaacccagactgatgtatccaatctgagccacgctggaatacgccaaaactttgcggatatccttctgtgccatggcacgaacagatccgtaaatcattccgcacacggaaaccacaccgataatgagaagaacgtaccggaaatatttaaagtccttcccgtagatgcagtacagataccgaaacatggcgtatgccgggatctttcccatggctcccgcaatcagcggacgcgcaccggtatgagcgtgagtgtacgccgacggctgccatccatgaaacggaaacagcgccatcttaatgccgaaagctgcaatcaggaacatcatggccatcagcatcgccgaatcgttgtttccctgcttcaagcaggcagccatatccgacatgttcagggtacctgtcacggaatacagaattcccacccccagcaggtagaaggtcgccgcaacggttcccaccagcaagtaccgaaatgcggatacaatacctcggcttccgcccatggcaatcaggcagtaagctgtcagggaagtgatttccagaaacacgtacaggttgaacacgtctccggtcatggtcatgcccaccatacccagcaccaaaagtgcatgcatggtatacgcaccccccacctgaagcgcatcgccgtttttgtcaaaattgaaggcaaacatgcaggaaaggacccccagcatgcacaccataataacgatgacggcattgatggtgtccacggagaactcgattccgtatggaatcttgtatccgccgaatacgtaatgaatcggtccgttctgaatcacccgcaccagttgaacaacggacagaaccagggatccggccagagcaccgaacaccacatcccgccccaaatgtttatgaatcttcgacagcgctaatgacagcaacgccgaacacaatggtagtaatacaatatatgcaggcagattcttcatcggaactgtttctctccttctataatatctttctcttcaatgcttccatacttttccttaatccgagtcagcaaagctaatcccacaccggtggttcccaggctgacaacgatggctgtgagcatcagaccgtggggcagcggattaatatactctgccgcatgaacgatgtgtttcatcgccaccggaatggttccggaattcttctgagcaaagcaaaggaagaagaagattaccgccacctgcatgatattcatgcagattagctttttcatgtagttacggctgacaatgattccgtataatcccagcgtcagcaacagcagcgtgagaaaataaattcccttccctgccagaattgtctcaatctgtgtcatcatcaaaatgcaccctttccataatcccgttgagaatggtaataatcgtcgccattacgcagattgccacacccatttccaccaaaagcattccggtggagtgtttttccagtgcatgcatcggaatcggcaatttctcatattccagaaaaacaccgccgcccgccatgcacaggattccggtcagcacgtagatgaaggttccgattccgcccagtgcggtggatttatccttcggcagccggatgaggctgtcccgttccggaatgaccatcacatccagaatgtatgtcattcccagaagggcccccgcttggaaaccgccgcccagactgatttcaccatggaacagcacgtagatagcgtacagcataatcatcggctcaatcaacggaatcactacttccttattgatggtgcggtacaccggctttccatcccgggattccttcttccgaacctttcggaaccgaattcgattctttcgctccggatggctggccagaatgagaaccaccgccactccggcaatgaacattaccgtcgtttcatacatcgtatcaaacgctctgtagtccacgatgaccgccgttaccatgttgggcgaattggtctccgtcgtcgcgtgttcaatgtagtagtccgtcgtgtgggtgttgggcttggatgacggatcgccgatttccggaaggaaatccaatgtcaaaaaagatgcacccaggcaaatcacaattaatatcaatggtagcactttccgcatcacttgcaccgccgatctatatttctgagggtcataatgaaataaatggtggagatgacaccgattaccgcttctgtaaaggccacatccggcgcccccatcacaatgtacaaaaacatggtgataaaactgaatgcgcagtaggtcaccactaccaccatcaagtccttattaaaaatcacgaccagcgtgatggcaatcaatgccagcaaaagcaccgcttcaagcatcagcatcgacatctcggtcatctcccttctctttcttaattctctttccgttatatccctgataatcccgggcatgcaccgcctccaaaataatcaggttggttcccagcggattggtgatgagatagattacatataccaggaaaaccttcagggacaacagcgtcaatcccgttttcaccatgattccaacggtcagaaggagcgcccccagggtatctccgattccagccgcgtgaagccgcgagaagaaatccgggaaccgaaccacaccgattgccgccgtccaaaggaatatcgcaccgaccagaatcagcgcggccgaaataattgtccgtatatccattatcttcttcctccgataaacttcgccagaatcaccgtcgtcacaaatcccagaatggaatagctcagcgcgatatcgatgtacatatcgatacgcccatcaattaagccccgcaccagaatcagaaatacgatattcgtgttcatcacgaacatggcatttaacttgtcatagactccgttcttccgaatcataaagaacagcatcagaagcaccactcctgtaattgccagcaggatcgccgtataaaaaatcgtcatatgcgcttcaatcctttctttgcggtaaaagtagtttcgatcaggcgagccgtcttccggttctcctctgcttcctccacatccaatacgcgaaaatcaatcgtctcaccgaacaaccgtgccacctttccctgcatggttccatccagaagacctgccttcgctccttccgtcaacgcgtgcacggaatacgttccatcctccagaatgtccacggtaacggttcccggtgtcagggtaatggaattagccagtaatgcccttgctgccggattgtcataattcgcctgaaaccacacaatctgcggatgcagcgatttctttccccgatatacattccaggtaacactaaaggaactcttgacgatttccttcaagagccaaagaaaataaataagcaatcggatgggattgacgtgaatgagaaaataatatcgatccgaatggacacccttcatatagaaagacttgaaacataaaaaagaaatgatacccgcggtcatcacgccgtagataataaacttcaattcaaagatgccggacaagatgagccagccggccaaaaggattacaaacaactcaacccaattacagagcgaggggttctgccgcttttctttttcaacattgttcttcatagcttctcctaaaatatacctttcacaattatacataatcttttgtgtttttaccagtacaattcttgtagatttacggtaacattgcacttcgtaatattgacacattataaacatgcgtttacaaattcttttaaagcgtgctataatggaacataaaaaagagctttttaaggggtatcatgaatattatgaagaaaattaaagaaggaccaaccgtcaccatgttcgtaccgtatgactgcaacaacagctgtccattctgtgtgaacaaggaagaatatcgaaattcctccagctttgatttggatcgctgctatcgttccttggacttgctggaccggattttcccgcacaacgacgttgtttttaccggcggagaacctctggcagagctggaagcgttggaagatatcatcgcccatgtcggtgagacccataacctttacatcaacaccaccctgccgaccagtgagaaacaggacatccaccgcatcgcggaagtcctgaaccgccatcaggatatgatttcctgcgtgaacgtatcccgccacctgaagcattacgttaaggaatgctccgacgagattttcgatcttctgaaggttcgtcaccgcatcaactgcgtcatttttgaagatgcgaaggaaccgtccacgaaggagaaactgattaaatttctggaccgctttaacggtcacgaagttcagattcgggcgaactactccaatctgacgctggagaacgtttttgagacggagggagatgacctgttcgatcttctctgcgatattgcggaataccagtatccgctggagaaagaactcttccgaaccggctttgtcttccattacaaggacagcctggtaacctatcataagaccctgccgttcagcaagattgacggtaaagtgggcgacatcatcatccgccagagcggactgatttatgacgactggaacaactacggcagcccgatggatattaacgaactgacactgatttaatgccaggaggtactatgaaaaagtgtgaggaaagacaggaaaaaatcctgcagtacatgaaggataccatacgggagcgctgttttcctccaaccgttcgggaaatctgtgccgcattggatatcaaatccacctctacggtttttaaagacctgaaggtactggaggaaaaaggcttgattcgaaaggatcccagcaaacctcgggctttggttgtggtggatcagaatccgccggaaccgcataacgacatccccacatccatcgatgacaccaatacgaccctgattccgattatcgggcgagttgccgccggcactccgattctgtcggagcagaatatcgatgaatacgttcccttccctgcacgattcctgggaaaaggcaacaatttcatcctttccgttcacggcaacagcatgattaacagcggaatcaatgacggggattatatcatcgtcaaggaagaacacgaagctcgaaacggggatatcgtggtggctatgattgaaggggaattcgaggcagaagccacggtaaaaagattctatcgagaagacgggcacatccggctccagccggagaacgacgagatggaacccatcattgtgccggactgcaccatcatcggaaaggtggaaggcgtattccgttacctgagctaaaccggaatgcacgcattgccgggaattgcagacatattaaaaatggacttttgaaacgtcaaaagtccattttttttattcttttttaaccattctctattcgtaatcgttggtcaatttgaaccggtccagaatgtagaacgtcagtcccagtaccattccaaccagagcggccaggctcatgccctgcagcgtggcggaaccgattttgatatacgcgccggaaagtccggtgacgaaaataatcgaggtcatggcgagattccgagctttggaataatccactttggcatccaccatcagacggataccggatgcaccgatcattccgtacagcagaaagctgacgccgcccattaccggtgccggaatggtttcaattaaaccggaggcctttccgataaacgaaaggaaaatggagaataccgccgcaccgccgataacccacacgctgtatacctttgtgatggccatgacaccgatgttctcaccgtaagtggtggtcggcacagaaccgcagaaaccggaaagcgtggtggatagaccgtctgcaaagagagaccggtgcagtcccggatccttcaaaaggtctttgtctatgatttccgaggttaccacctgatggccgatgtgttccgaaatcaccaccagcgatgcggggatgataaccagaatcgcctgcaggctgaatctcggtgcggtgaaattcggcatggctacccaggactgggtttgaagcggagtgaaatccacaatacctaagagcaacgccacaatatagccaatgatgatggcaatcaaaatagcaattgccgatgcgaatcctcgatacagcacctggccgataacggcaaaagccagcgtcaccaggaatacgatgaccagatgaggatcgatgtgatcgtatccttcggatttgataattccgccgttagacgccgcattgctcgccagttccagtccgattagcgccactaccggtcccatcgccgccggcggcaggatgacatcaatccaatccacacccacatacttgatgagaatggctacggccatgaaaataatgccggtgacgatgaatccgcccaatgcgtattcgtatcccatcttattgataacaatcagtgccggggagatgaaggcaaaactggatcccagatatgccggcgccttccccttagtaatcaaaataaacagcaaagtgccgatgccgttcatgagaagcgcaatggccggactgattcccaggatatacggaaccagaaccgatgcactgaacatggcaaaggtgtgctgaatacttaacggaattcccatccgaagcgggaccttctcgttcacttgaataattcttctgtcgctcatcgtttctccaatcaaacaatctataacaatacatttccgctacttattatacatgtaccggaacgaatttcctacaataaaatccggtcatccaatatataattgcattgggtaattgtgatgattttttcaccttgagacggccctgaaaccattgaagaataaggaaaaacacggtataataagaatgtatttttgtgtgcagatgctgcgaactccgcggtagaatagaggtagattatgaaagaaaagaaggaaaaggaatccgccaaatccgtcatcatcaattcggtggatcgaagcattgacatcttggaatatctctttcgtcagggaaacgacacatccatttcccagatcagcaaagatttagacatatataaaagtaccgtatttcgcactctggccacgctggagaatcgtggatacgtcgttcagaacaagaattccgatcagtattccatcggaccgaagctgtatgcctacagtacccttccccacaacgatatcatcaccgagagcgtgcggccgttgctgcaggaaatcagcgatgcctatggagaatgcgttacatacggaattctggaacaggaatgggacggaatgtacgcaaacgttcccctcatcaccatcgaatccacccacaatctgggactttcacggaaaatctccaatcaaacggagtgctattgtgcttctctcgggaagtgccttctggcattctccgaaaatgtgaacctggatgtatataaggatgcggaattcaccccttttacagaacataccatcaccaactacgaggatttgatgaaagaattggagcaggttcggtaccagggatatgcggtggatgcggaagaacgagaaatcggactgtactgcctgggggttccggtactgaacggtcacgggaacgccgttgcggccatcagtatttccggtccgaaatccagagtcaagggagagcatttcgaagaaaaaattacattgatgaaggaagtcagtgcccggattacccgggaggtttatctgtaattcagcgacgctgcggaaaaccgcggcgc

SEQ ID NO: 3754 - DNA, 3115 bp, Unknown
  16S sequences of unknown bacteria
ccgaccggtccgaccgggccgacgggaaccgcgggcgcaacgggcgcgacgggaatcacagggcccacgggtccgacagggcctacgggcgcgacaggtgcaagcatcacgggcgcgaccggacctacgggagcaacgggcgcgacgggcgccgcgggcagcgtgccgctggatacagttaccgcctatgcggatacgacgccgacgatcactgccggcagtcccataatattctcggacaacaccgaactgaacggcaccgctctttcgcacacggcgaacacgggcgatatcgtctttaacgaaccgggcgtgtatttcgccgctttcagcgggacggctgttcctgcgacgggcgcgacgttcccttcgaccaacgaggtctatctgaccttggacggaacgcggctggagggggcgaccgcacagcacatcttccacatttccacggaaaacgctcccgaatctgtttcacggatcataacggtgactgcggcgggttcgcggctggaagtcgtcacggagggcgatatcgtcttcaattacgccactttgagcgtatttaagatcgcagatcttcccgcaaacacgtaaaaacagacggagggcccgcaaaagggtcctccgtttttgccgctttgcgcttgacgaacggcaaaaaaaacattattatgatagggaaaagaagttgagaggcaaaacgatgattttgacggatatccacacccacaccaaattctccgcggacggacgcggcgatatacgcgatatgatcgaaacggcgcttgccaaagggatttcctattacgggatcagcgaacacgtaaattatgattataccgagcagggcatagagatcgaaggcgaaaccgaaaacgagatcaatattccgctctattttcaaaccgcgcgcgccttgcaggaagaataccgcggcagactgcatcttttgatcggctgcgaattcggctttcacgacgggcccttttgctttcgggaataccaaaagatcatagattcgtttcatcccgatttcgtggtgaacagcattcatacctgtatgggcgaagaatgttattttcccgaatacacgcgcggcaaggaaaagcgcgacgcttacaacgcctattttcaggcggttttggcgagtctggacgcgccctacccctacgatatcgtggcgcacatcggatattgttcgcgcaacgccgtatatgccgatcccaagatccgttacgaagatttttccgaaatactcgaccgtattctgtacaggatcgttgaaaaagataaaatcctcgagatcaatacttcctccaagacggcgggcagcccctttctccccgacacggatattttgcggcggtactatgagatgggaggcaggaaagtttcctacgcctcggacgcgcacgatccgtcgcgcatcatggaaaaacgggatatcgtcgtcgccgcgctcaaaaagatcggtttttcttgtttaagcgttcccgattgcgggaaaatcctgcaaatagaaatttaataaaggactgccgccggcagtcctttttgatttagcggtcttttttgaaaataacgccgacgacggcgcacagaataccgcccacggggaagacgacccagccgggatgccataagccgcccaaaaagcccagcagcaaaaatgcgacggtagcgagcagcatgatgaccgaactgagtttgcccgcgagcgaattgtcttgctcgtcttctctcgcgatcgcgcgcagagcgtcccgctcttccagaaccgcgtttatgtcttctttttcttcgtccgtcaaaaagcgagccgcccgtttcatgctgcggctgacgacttttttgcggtagccgtcccacacgacgccgccgtaaatgaaaaagaaaacgccgacggcaagacaggcaaaccccgccagaataacgccgacgaatgccgcacggctgggcaacagcgccccctcttcgaacagcccgcaggagacgatgccgataacgccgagcatgacaaaggacattcccgccagcaagcggcggataaacgcgccgagttgcgatttccatgcgccgtctttcacgggcagaaaggcatattccgaagcgacgcccgcgtagatgaacagatcgacgccgatcccgatgagcgccatcagcgcgcacgtgacggcaatatgcacccattccgtttcggtgagcaatcccgccgcgatgacggaaatgacacccgccgcaatggaggcgaacccgcacacgataagcgcggcgaattttttgtgccaccagtcgggctgatatttgcgcgcgatctcctctgcgctgtctgcgggaggcgtttcgttttcctgcggcgggatcgcgcattgcgcgctcctgccgcgtaagagttcgtccgtcgtgacaccgaaaatatccgcgagcggcacaagttgcgccgtttcgggaaatgcctcgcccgtctcccatttggaaacggctttgttggtcacgcccagtttatccgcgagttccgcctgcgtatagcctttcgccttccgaagagtgtacaaataattgccgaagtcgttcataattctcattccttttttctttattgtaaccccgaaagaccgaaatcgccaaatacctgcgttcgaaggttgtcgaattacggtagaattttacgaatcttcctctttttgcgtgatcatttccctgtaaatctcgctttttgacacgcccctgtccttggcgacgcgcttgaacgcttctttttgttccataccctgctttgcgtagtgcgccacgtgttcggagacggaaaggctgttcaagggactttccgacttttccgcgccctgcacgagcagcacgtactcgccccgcttttcgcccgcaagccccgtttccagaccgaaatattccacgctttcgtgaattttggtgatctcgcgcaccgccgccgccttccgcggcccgaacgcctcgaataaaagagcgacgtcgtcatccacgtcctgcggggcgctgtaaatgacgagcgtgccgcgatcggacgcatattcctgcaacagcgcgcgcttttcgctctttttgccgcgcaaaaatcctatgaaagaaaagcggtcgg

SEQ ID NO: 3755 - DNA, 32759 bp, Unknown
  16S sequences of unknown bacteria
gccagtataatgaagcccggacgtttacttaagcgttcgggcttctccgtttttgggggttaagtgcttcacatctcatctccctcccccccctgaatttgccttgctgtttgcatgattgtggcaacgcagaaaatagagttttactttagggttttgtgaggggctgtttttttgtcgattgcattaaatatactttgggcttgggggagctactatatgatgatgaaatgaacttttcttcttcaaaatagaaaaatgaactctatctcctatttacttcttctttgatctttttaacgctactccttcctcgcttactctttttttcaccccccatctcatccctccaacacgcttcttatcctctctcaatctcctttttataccccctcactatcattccttccccaactttactctagtaaattataaagggaaaataagcaaaagcgagcatacactgaaaaattttttaaatcttggacttccttttaaaaataaccactcttctgttaaatttttaagattttatagataatttatattttttttgctctttcgcattgttaataaaaaaatgacttaaatttttatttacttggcattgtctatgaatttaatattattttatctttaataataattatatgtccaagttaaatattgatcaaaaaacaattatggggctattttccgatagtcgtgccgatttcttaattccagactatcaaaggccatatgcatggggagagctggaatgccaaacgctttgggatgatatattcacgttcgcaatcccagatgaagatttcacaaagtttgacaagaacgatgaatacttccttggaccaatagtgacatttaaaaatgatcagggaaaaatggaggtaatcgacggacagcagcgccttactactttgatgctactacttcgcgctttttatgcgaagttcagcaatatgaaagacaaaaattctttggcgactaagaagaatatcgaagagtgcatctggaaaacaaatgaatttgatgaaccaaatatggatagtttaaaaatagattccgtcgttgccacagacaatgacaaggatgagtttttaaaaatcttaaaatctggcattgtagaaaaagagcaaaagagtaactatgccaataattaccgcttttttcagatgaagatctctgaatttctcgataaatatccaacatactttgcatatttacctacaagaatcctaaaaaattgcattttactgccaatagaggctgaatctcaagataccgctttgagaatattttcaactctaaacgataggggcaagcctttgtccgacgccgacatctttaaagcacaattttacaaatatttctcgaaggaaaataggaaggacgagtttattcggcgctggaaaaaattggaagaaatatgcgagaaaacatttactacggggtctaatactccgatggacgaaatttttacccgatatatgtattttttaagggcaaagaaaaatataactcaatctaccacggaggcattgcggaaattttttgaaagggacggatatagaatccttcatgacgataaggctctatcagaacttgaagtgttggccaggttctggaacgatgtttctaaccaagatacggatcgcttttcggatagaatattgcgtaggctgtttgtgctaaattatgcgccaaatggaatgtggtcgtattttgtttctgtatattttttaaaaaataaagatgagaacgagaatctggacgatgacaaattcttcaactttctattaaaaattacaggctttatatgggcgtatgctttgataaaccccggtgtaaatgcgctgagaacccctatttatgctgagatggtaaaagtcgtaaatggcgaaagtgccgatttctcaaaatataaatttgatagagaaaaagtaatcgcaacttttaataacagcagctttgacaaccgccgcccgattacaaaatctatgcttgcatggtgggcatttaacaatccaaaacagaaatgtctttctattgatacgcctcttgaaatagagcatatttatgcaaagaaccgctatgatatggaaaaatctcttaagtcaagggactatctcgaattgcttggcaataagtcgttgttggaaaaacgcataaatataagggtctcggactaccgttttgccgataaaattaagtattacaaaggatatacaagttcgcatggcgaaaaacagggaactgacatttatgagcttagaaatatgtctgatgattttaatgactttactgaaaaggacatactggagcgcaacggtaaaataatcaatggtttcatcgatttcttagatgaaaatagcctgttgcaatagccagattgaatcagtataagattaaatcccagatttagttttataatcctataaaagataaaaaacctccgataaattcggaggctattttatttattggtaaactaattttcggactttaaccgttctatcttgcgcgctatctcacgccgcggctttgtgtattcttcagaatccggaagaagcatcggggcgtttttggcgcctgcgcggaaaacaccttacgcatcgtccgcccctatcggcttgagctttgcgcatccggaaatcgggacgactattttcgtcaacccggcgggatattttctccctttcccgacggattcgccgagggcattgaacgtttcggcgtaaaattccgaaggggagtctacgacaagttcgctttccgcagtggcattgaaaacatggcaggttttgccttccggcaaatccgcaacctgtcttgccccgtaaactgcaatgacggcgcggtctcccttttcagcccttatttgtggataattctgttcgggggagagcggcagaaattttccgttttgcagaacctcgcggtgctccgccataaagccgagataaaacttcaacattttgcgatggtccggcgggaggtcttcgagccttaccgaaatttgcggaacggcgaacagggtcgccagcaattggcgcgcggcgtcttccgcaggcgtatctgcgcgccatgtcagcatgtcggaatgcacggcggcagttccgcttgcaaggcgcaggttcgtcgtcccgaggcggttggtaagcgcgtcccccgggcagtccgcaacgcggaacatattgccgtaattgcggattgaaggcccgatgtacggctgtctgaattcaatcagcaaatctttttttatttttgagagccgttcggtcatggaagaaagcagaaaatccacggcaagcggcaggttttttatgtcgcggccggcgtaattttccgctattgcgggatcttcgccgttccagcggaacatgtctataaaatcgaacttgaatccgtcgatgtcccactccctcaaaatgcgctcgcaggtttcaattagatattcgcgcacctcgggaaagcgcgggtcgagcgacgcgcagtccagatctttcatgtcgttcagatatttccctttgaagcgcccgtacgcttcgctggaatagccgataaacggcactccgaaccataccatgtatttcatgcctagcttgtggacgtttttcacatgcgcacgcatatcggggaatcggagcctggaggctttgccgtctccccagaaatcgcagccgcgcttgccgtcgtcggcataccatccgccgtcgagaataatccccttcataccgtattgcgcggcgagttcgcactccttttcgagttcgccggcaaacacgttgtggtggtatgaataccatgtggaataaaaaggctcgcgcgcggtttccggaaccggcagcgggttgttccccgggagttccccaagccagcgcgccgacgctccgattgcgtcgcaatatgggatttcccgcgtgtcgaggcgaatggtggcgctgtaattttttagcggggattccctttgggaaaacagcatgatttcgcagaatatttcgtttgtctcctcgtggacgcctgctttgaaggagaccctcctctttgcctccgaacacgcgaaggtcaggcggttgttcccgtcgtttcccatgagcgcgagtattggagaatttccggaaaggctagaatagagcggctgcccccagtcggcggggattgccccgcatcccttggaggtgtgccaacggtattggatgtcgcgctggggaatgttccacgatatgcatagctgcggcggaaggctttctccgcggcggctttctatggaaatggttatttcctgcacgcccttttcctcggtgcggcattttgccgacagattccaatccttcgaaaaatttccggaaatgcgcatttgtcccacagacgtgtcgacctctgccggagattgcggtgcgccttcggcggatcccgcaaaaagctgcggtgcggcaagctgaaatgcgagcgcgattgccaataggtagtttgcggacttatttatcattttttgcattgttgtctgcggtattggcgggggagtcccccgccggatcacttttatccgactttaaccgttctatctggcgggcgatctcgcgcctcaactctgtgtacttttccggttcaggcagtagcatcggagcattcctcccgcctgcgttcggtataaacgccatcttttttatgcgttcgagcgcgtcgagtgcggctttgtcgcccttttgtttcgcgagtttttccagaattataaaatattcgtagtcttccacgccgtcgcggtggctttccattctcacgctcgcaaacggctccttttgcccgattagcttgcctggatagaatatatatccgtcgccattgggatagcgcacgcggtagtgctttccgggggtgtcggactgcggaatatccagatgtatcccccacttcagcggattcagcgtgtaccagtcggcgccccagaattcatatcccttaaagccgtatttataacaataaagcggcattaatctttcgagcgcattgtacggattgtccaaaacgaaatggccgtcggtcgttgttattatatcggcgccgctctttttaagcagctctatttcctcttccgaggcttgtccctgtgcgccaacgccccatatattaagtttgcctatccactccggaacatacttccacgtgctgcaatatattttcatttttggagccccttcgtgtatggcgtcgcatagcgctatcatttgctttattatgtttgggtgccatgcgaacggctcgtccgatatgtaatacataaaccggtcggtccatcccttctcctcgagatgcttcgatatctgctttaaactttcaactatgtattccctatatttcggatttaatcttgtatggtcggcattctcataaggccattttcccggatacggattttctccgaggtatggccttggcgggtttgcccagccaaatgttcctgcggaaaacggcaaatacaggtacggtaatttcagttcgtttaggtagtattcagcttctttgtcgaatttgctgaaatctgcaactggcttcccgttctccaatttgaaggttatccgcgcgggcagggtatctacgctgagcttcttggacttcataaactttgccgcttcgcggtgggtgtagtttttgtattgcgcgccagccccaagccttaggtcgaaaatcgcgtacacttgtggttcgtcggacagcgagaaaccatagacttttatcttatacggcaacgtttttaatattttgccttcgttttttaactctatcttcccttcgtagatgccgggttttgcatctttgggggcatagaatgtcaaatatactccctttgtttgtttggcggggagatcgaattttgcggacggtataatcgggtcggggtacaataccgcaaagttgttcgggcggacaaaccgttcgtattttttcaaatcggtaaaatggaagtaggcgcttgcggtgtcgattatcacattttctatgtggccaatctggggtgcgggcagagcgggaggattttctccggcgtcttctcctgcgtatttgggcgcgtcaacagacacttccagcgcctttatttctgtaggattgcggatcgcaagctgcatgccctcgtattcgttgccggcaagttccaaatatggttctgtctccgccttcggatagtcgtcagggaatatttttatgatattgtccgtttgccatacggacatttttttattctttttaaagtcggcaatattctcgtattccaaggcgcttgcttttacagattctgcgacgattattccgtcgtacatatatttgcccttggttgccgttagatggacgctcgtttttccggggcaagtcgccgctacaaacattgcgaatatttgccatttgtctcccattagtgtggacgaataggcattgaagtcgcctttctgaaagtcgtaatgcgcgtgtaccgtaccggctccgccgtcgggaaggcgacaccagcctgctatgatatattcattgcctggtattccgggaacagcttgcctgaatccgtgccaggcgctatttttgggatcttttatttcaagcattgccgcgtgttctccgtacaagcccccttccactatttttgcggttgcgcgttctgtgtccattgcgccgaaccacgattcgctccctatttcaaaactcggattttttaacaggttagtggcggagttcattattttaccgaagttttccacgtcggccgaagcggctgcgtcggctttatagtcgctcaatattccgcttgcgtaatctccttttacatttggtgtttggttcttcttatttttatttaagtacacgtagaatactttttccgacattggcccaatgtcaccgactgaggcaagcatgtagccggatgcgagaaaaaatggcctgcgtttgccgtcaactatcactgcgaacgcttccttttcgtagtttgcgtttgttattctattgattgatgcgcaggcgatgacatttccctttttcaacggcgagatatttctcacgcaaaattttattctcgaaggatattttgcgcttgaaagttgccatttatcgctttcgcctgacgatgccaattctagcgattcggtttgtcctatgcttattcctatattattttttggcgtcctttttatatttaattgcaggtcatcaaaccaggctttgccttctgttgcgtagaggacggttccgaagctcaggtcttttactccttctgggatgactccttcaaattctatttttttccagtcaaatgaatctttgttttggtctttatgtatatttcttttcccttcgtggatataaaagcctgcgcgcccttttacgttttcgccgcgcacccagccgctaaatttgtatttgtctccggcatttaccttaaagctccgcgatatgcacacccattgcggtgttgagcctttttctgccgtagtgcttacgcatttgctatcgtctttgccgccgcttttttcgagcgagtttttgtaattttctttcgagttattgtgccagccggagggcgggagcttgtctaatgcctcaaaatcgagcttttcgtttatgtcggatacaccttcggcatttaggttgctcggcaattcccatgcgtgggggttgtcgtaatatacccaaacgcgcgttttcgagttcggcttacaggctacgggcacagcgagagttgaattctctcctattgtatcgccttccggaatgacgtcaaagagaagttccttgccattttcgccgaccaccctcaattcttttgttggtcgggaaactatccctaacttctttgcagggacacagaaaatttctccgtcgagttcatttgccgttttattttcaaatgttatttcaacgcgttttgcgtgcgggtagttcccgtcgaggtacagcggataatgccatgcctgttgcccgacaacgcaaaatcctgtagatagtagtatgtacgcaatagataaaagttttaagattcttggcatattgtcctttcagaaagatggtttttttttaagcatattttttgtttaaggacaacgcaataattcccattttttattcgttctacgtcaaagattgtggaatggtggaaaaaaaagaggcaagtctttcaacttgcctctcttttatctcaaccctctggctaagtcgatgaattgaactacgctaacgcttgcccttcgggtttttgccttcggcaaaaattcatttccccgacttcgcatagagacaaaaaaagaggcaagtctttcaacttgcctctcttttatctcaaccctctggcgaagtcgatgaattgaactacgcttgcgcttgccctgcgggtttttgcctttggcaaaaattcatttccccgacttcgcagcaaaaaaaagcccgagctttttatctcaaccctctggagcgaagtcgatgaattgaactacgctaacgcttgcccttcgggtttttgccttcggcaaaaattcatttccccgacttcgcagcaagaaaaaagcccgaactttcgttcgagcttttttatctcaaccctctggcgaagtcgatgaattgaactacgctaacgcttgcccttcgggtttttgcctttggcaaaaattcatttccccgacttcgcagatagaaaatgaaaaaagcccgaactttcgttcgagcttttttatctcaaccctctggcgtccccacggggattcgaaccccggttcttggaatgaaaatccaatgtcctagaccgggctagacgatagggactctccaaagaatttttgaagcgttcacttcatactaaattcatacacttggcaagcctttttttggaatatttaaaaaaattgtccactctgactaaaatcttaatttttccttccccctccaatgctccacaattagctttatcataaaagtgcctttattatttcttgcgaaataccccatattaataaaaatattctcgtttcttatgccacaagactccccaaaaaatcaaatcgctaaacttcgtgcagaaattgccgaacacgaacgcctgtaccgtatcgaaaacgcaccggtaatctccgacgacgacttcgatctcctcgtaaggcaattaaaagaactcgaagcaaaatatccacaatacgccgatgaatcctccccctcgcgcattgtcggaaacgatctgtcaggggcattcgtggctgtcgaacatctctccccaatgaagagcctcgacaacgtttttaattcttcggaactcgaagaattcgattctcgcctacataaaactctcggtctcggtggggattttatgtattgcgtggagccaaaaatcgacggcgccggcatttccgcagtctatgaagccggtaaacttgcgcgccttttgacaagaggcgacggcactaagggcgacgacattacgcgcaatgcctttgtcttaagaaatctacccgcgcggctaatcggcagaaatattccgtccctgcttgaaatacgcggcgaggcttatatgacacgcgctgaattcgacaggctttccgccgccgcaatctcaaaaaattctgaaccccaacactcaatttccgacaataaccgcaaatcgccatacgctaacccccgcaatctcgcggcgggaacattgaagctgctcgatagaaacgtcctcgaacaaagaaatcttcaagtgattttctactcctttggcgctgtggaaggatttacactccaccgccagtcggaacttgcagaaatattgcgaaattggggcctgccatcattctcatggacaaggcttgcccatggaccgcatgaggcgtttgagcgcatttgcgaattggaggaagtccgggcggatttcccatacaacacggacggagccgtcgtcaaacttgacgattgctcgctttattcgcgtgccggtatgacttcccatgcgccaagatgggctgtcgcatggaaatatcgcgcggaaagggcccaaacaaagctcaaatccataacactgcaagttgggcgcactggcgcggtcacccccgtcgctgaactggaaccggtttttatatcgggcacaacagtatcgcgcgcaactttgcacaacgccgacaacatatcagaaaaagacattcgcgtcggcgataccgttgtcatcgaaaaggcgggggaaataataccggcagttctcgaagtcgtaaaagaacttcgcccgcagtcggcaacgccgtacgaattccctcaaaactgcccggaatgcggctcgcgtttggtaaggtacggcgcaatttatagatgcccaaatttgtcctgtcccagccaagtacgcggcagaattgttcattttgcgtcgcgctcgtgcatggatattcaggggcttggcgtatcggcagtagataaaatcgtggaaactctcggagtcaaagatcctgccgacctatataagctaacactcggcgaccttctaaagctcgaaaatttcaaagaaaagagtgcgggcaacttgttatcgtctattgaggcgtccaaaaaccgcgaactttggaggttgatttttgcgctcggcatacttgaaatcggcgagcaattcgcaaaggatctcgcgcgaaaatacggtacgctcgacgcgctcatggcggctccgctcgaagacttggaaagcaatcaaggctttggttcgcgctcaaaaaagaaagactcggattcgtcaggaggctccgtccgcgccttgtctatacgcgccttttttgacgacccaaataacagggctctcattgaaaggttgcgcgcggcaggcttaaattttggctcaaagccgctttcaaatgtagatgcagcctccctccctctttcggggaaaatctttgtatttacggggaccttgcaaagtatgggaaggtccaaggcgaaggaaattgtggagagcctcggcgggcgctcggcctccgatgtctctaaatccaccgactttctcgtttccgacggcaagatagacggctccaaggccgccaaggcccgcgaatacggtactcgcgtgctctctgaggatgaattcctaaaaatggtgaaagacgcgcgcgaaaaactgtcgttttcagccgataaaagcggaactcccaccgaatctgccattcccgaaaaaagaccttcggaaatattatctaccgtggaaaaatccgcccagacgcgggaaaacactgagactgattctaataccaatggacgcgacaatcttcagaccggcaattttgccgcttcgtctggcggaaaatctttgccgtcggaaaatcgtgaagaatccgaagtgcgttttttggcgcatgcagctaaaaaatcggagggcggaaaagtttctgattgcgaatcagacagccagcttgggttggcattgcattccgaaagcggaagggcggggcagaatgcggacggattatcagaccgcaatattaaggaatctgccggcgaatctactccaaaaaaaccggggaaacacaagaatgttcccccggagagcggacaaatgtcgcttggaatatagggctttttgatacagccctaatttatttggttgttagacgtgtagaacttaagccttgccgtaattcggtaggtaatccgcatttaaatgcggcgcctgtatgcggcaagcgcaagggcaattatccctattactgctgcggcctcgtagggttccggcacgcttacagtcagcatgagattgcttccgtttacccattcgagctcgcttgtgtagccgtcttttagtgtcagattctttatctcgatgtcgtcggaaattatgtcgctaaaaccttcgccgagggagtctgccgatatcagtgtatattctccggcttccatatttgcgtagtttataaaatcgaatactactttatcgaggtgttggaattctcccgcaatttccacaagcggagtgttttctattagagcctggtcgggtatatagacagacagggttccagtgctatctgcatttaaatagctcccaaagtttatggattttgcatatatttcgagattgcctctgttttttattcctgtatttgccattttcacagaatcaaaataaccgtctttatttgaggcgtctcctattattgtagttccattttcaaattttgcctctgcgttgattcgaaatgaaaaagtactttgtgcggcattggcatcgcgcacaaaagatacagtgcctggccctatactatgaaaagagttggtgtggtataggaatttttcgtcttggctatcggacgaaccaaaagtcacggtggcggtcccggagtatttaaaaaaggtatgtggctgcccgctcacggagagcgagtttttcaaaattaggttttggggagaggtatataaagttgattccccattgtcattcgtatagtttatgtctccataggcaaaccacttgctccaatctattgtttgcatcgactgcaatggcacacctgttccggaaatatctatcttattatttcccccccatagacctgtggattcgttgccgtccttgctaaatgtatagtagtttgagggatccgacatatcgtttgttccgttgggcgcgaagtcagtgcctcctaagaatacgttaaaaaatgtgtcttgggcagctaacatgccggctgcgaaaattaacgcgcaaagcgttttgaatatttttgttttcatgatgttttttatatcgtatattttttatagatatttttttaatcaagtagttgtcaacagttttttgtacggcggcgacattaccaagttattccctgtggagaatcgttgcggacttttatttcgactcccggtgttttaggttcttttaggcttattgtgccaatcttatagcgcttgtggccgtcggagttttcgaggggcagttcgtaaatgggtgttccgtcgcgcttgccgacagaaatgtaaacgctgtattcgccagcgggggttgcaggcgtcacagggcctgcataaaattcggctccattgcgtttttccatttttagagtaaattcattaaaaaattctgcgggagtcttaaaccctatcctgaatttgcctttgctttctacatattttggcgatcctttggcggatacaggcaagtctttgacatttagcgattcgtccaccatgactgcgattatcccacccttgttgtcttttattgtaagcgcggggaagcctcctttgtagcacggcgcgactcccaaatttgcccacttgaactccacgggaaattcttcgccgatttccatttcggtcgggaattttatttcggcgggaaatagccggtatccgaggcgcttattgatttcacccacaaattcggcgttttcctctaaaaactgctccggccaccaatggattgacatgtagcttgcatggtattgctctactgaatccgcgagttttttgccgtcccatgcgcctcttgccttagagaggccgtagtgctcgtgctccaacactaccggcattttttcccagaaaaggcctgccattttttcgtggtaccatgatttcttcttctcggttggaacgtcaacgagaatgctgtcgtcgcgcaaagaaactccttgcgagagtgcgtaatcggtagcggggaagtgcggaccgggcgcgttcgagcctgctacgtcgtcgcttattacgagttgcgtctttttaaagtgttttctaaatatgtctatatgtttttttgcaaccgcaaggctctctttggcattgagctttttggtgaagcctgtatgcccttcgccccatatgccgaaagaaccgatgtcaatgaaggcgacattcggattgccgtcgtacctttcggcgagcttgccgaccattcggtcgagatattttagaaaaactgggtcgagatagtcgggttcccaacatgggccgtcgggtacggggccttttcgtatgtggaatggagttccctttgcgcctttgtcttttacccacttgggtgtcgcccacggaatccaatgttccgtgcatgttatccttattgcgatttgtttgcccttgtctatgaatctctgggcgggagtgtcgagcaccccaaagttgaatttgccttcctcgggttctatgaacacccatggaagcctcatatatacgaccgatactcccggaaaccattcgagcgtgtcggagggttcgagaaaatatccgtagttgccggttctgcatgaatagaaatatgcgcaccagcccatgtcgggatttattaacgcttttccgttgtcggttggacggtaaaattcgtagattgtagattccgcaaatgctatggacgataaaaatattgccgcaaggaaatatataactctcatataaagatatgatatatttacttataaaagagtcaatttgaaatctggctttttatgcgtatgggattctccagatgagtgttttgagagaatggattgattttagcgcgaacaaaaaaagccccccctaatgggagctttttattgcctttaaagcaatctcgaaaaaatctgctaaataagttttccctgaggcgggctggcaaagtttttttatttatgccgtttcaatccatcgcgatgctaagcacaggctaaaaaaggcgcgaggcaatatttttttatctccgccgcgtcaatctatcgcgacagccgttagaaatgatgttggcaatggcgttttttatgaattgcggcgcattatttgcgcagccttcttttgtatgcggcaaggaacagcgcggccgcgcctataaatagcgcaacttccgagggttcggggattgttccgtaaagcgcgatattaagcccgtatgcagtcgataaaatctcgtaatctatgccgctcagttcagctccgttatagattaggttggcttcgtattttgatacgtcgccgaatgcttctacgccggaaagcaagagagtgtattcttcgccttcaaatgtcatgtcagacgcgaagtccgacaagtcaacttcaaatacgtactttgcgtcttcgccgcctatttgatttatgcctgttgcggattcaagcgttgtgtggttgattgccagttttatttcgccgccttcccagtctattccgcgcacagagagagtcccgccgacgcccgcgtcgtctctcgtggcgactgtcagcgctccgccttcaagtttgacgcgcgaaagttcaacgtcacctgctgtggatacggcaagagtcccgttttttattattgtcccgacagaatccaaatcgtttctattccacacaccgcttggcgatgtggaaacttggcggatagtctgggtggcattttctgcgccgtccattataacggttatttttgcgagttttgaagccgcgctccagtcgtccatcaatacgcctttgaaagatgcgtctgacgtatttgtgaaaacgagagtcgtgctgccttcaacattgtcgccaaaattatttcttacagttcctgtgccgtctatcccgtttactaagattacgcccgatttataattagcactggcggaagcttggttatttatataccatagggtagtattttggtcgtttggattagtcggtactgcaccgtttagggtcacgcgcccgatatctgccgatattgagttatcggtggctgaattataaaaatagtcgttgccgttattgttgaaagaagtcgagaatattgtggaagttgatacgggtgtttcagaatccgcgccgattgatagttcgcccaacgtaattttcgagaatgtagaaagtttgtcctgcgtgcctgtatataccgtcacttttcccactttaattgatgtatatggagtagtgttgcttgaagttgaggcttgtacattcgtagttgttttgaaaataatctcttctatatccggtgtatcgccgtcttttaggtattttactgcaacctcatttgcggcatcggtatttgtgttagaatcgaatataaatgtgtggccctttaaccattcatacgaaccgctcgagccccctttgggtgaccaagagtttgggtcgtccagagaatagtatgtttcttttcctacgtaattatacacgtctgcgtaagcaacggatgaaacgaagattgctaaaattgagcaaattatactttgagagagaggctttttcatctgcagatataaataaaagttttagatttaatatgtttataatgaggtgatgaaaatgtcaagtttatgtgtatgtttatattataaaatttcagaaaaataaaatgagacaaattgagaaaaatctattctaacggacaaaaacatggtttgcgcgccaaagtagaatgagctaaaatcctatactttggcgaaaaatgtcggcgcgcaatgcgacggttgcaatagagtccgctactaagtctgttttcgcgaaaagcttcggtaaaataaaacaataaaaatctccgaagataaagaaaatattttctttaaaattagcggctcagataaaatgtttttacctcgccttaaatttgagggcgactcccgcgaaagagtgcaaaccaaaggatattttttgcgcttataaaattatccgatagctcctcggcgcgaacatgcaaatgccgcagattccgccgcgcgctctgaggctgcctcaatccccgcgcctccgagtactgccgacacaaacccagccgtaaatgcgtcgcctgcccccaccgtatccacaacttcaacgggctttggcagcccccttagcggagttatgccgcgcccgtatataatatgcccttcggccccgatggtgcaaacaaggtattttaatgacggatacccttctaaaattgcgtttgcggctatatcgaaatcggggctttttttcgcgaatattgtttcaaaaactatcggcaattccgcgtcgtttagctttaagatatcggcgtttgaaagcgaaaagttcaaaacctcgcggttaaaatacttttggcgcaaattggcgtcgaagacttttaggcaatttttggggagaacttttaataactctcttaaagtccctgcggaaacgggcgaacgctgggataatgtcccaaagcaaaatgcttcgcagcgggcgactatcgcctttgcggcgggggttagcgcgatttcatcccatgcggctgggtggcgaatatcgtattccggaagcccgtcgggaccttttccaacgtcaacaatgccggtcggcagggtttcgtggacaataacggcgtcggcatttattgaattttcggatattttttcgagtgccgccttcccgaatctgtcgcgcccaacggcgcttattattgcggcgtcgcagccaaattttgtgcaaaaatacgcgaagttaagcggagctccccccagagtttcggtatttccaaaactgtcccatacaatttctccaaacgacgctattttgtttttcattgggctatttttttgaggtagattttccccgttcctcgagtatcaccattattatgtagataaagacgccaaccgttatcccgcagtcggcgaaattgaacgcgggccatctataatttacaatcggaaggtggacgtctataaagtctatcacatgcccgtagcatattctgtcaacgaggtttccaaccacgccgcctgcgaatattccaagcgcaagctgcccgcactttgagtcgaaaccgagctgctttctaaaaatccaaaccgccgcgagcgcaatgagggctattgatgtcaacagatacgtctgtcccgacagtatgccccaagccgcgccctcgtttgttatatggactatgtatagaaagttgtctatcagcgcaattggcgagctttccgcgccaaaatggtaggtcgggttccccctctcccacggaatattggcgactatcgccagctttgttagctggtcgaggataatcactaacgccgccgccgcgaaaaatacggcggaagatcttttttttgatgatttttccaactgtggcaaaatatttcttcgtttggcggaaggggattttttctctccttccgccggttctgtttgccgtgcaagcctacgacatatcttcttcgtcgtcggtcgggccagactggccttcggacatatcgtatatggatctttgcactgatttcattttgcggttttccgcctctttaatctcctgaccgtgctttgtgcaacgcgtgaagggtatggcttcgaggcgcgattccggaatgggttcgccggtcacttcgcatattccgtaagtgccgtttcttatgcgttcaatggcgtcgtctatttcggcaatcatttccttctcgttcgagagcaggttgtaggccatatcgcgctcgaagctctcagagccggcgtccgccaagtgttgtccgtacgaggacaagtctcccgaatcttcctttgcggagcgttttaaaacctctccggaaatactctcagcgcccattgagtgcctctttctgaggtccacgagcatattgtaatattttttccatttgcgcggaatttccttttccctgtgtttttcaagggaaggggcttccactggattgaatccgagaatatcgaataggcttgccgccgcaacggggtttttaggggacgaagttgccttcatctggactttcgccgatgtttcctttggggcggttggcttgcccgggatattcttgaccaccgcttttgcctgctgggctccggcgccggagtcccgcatttcaagatatgcgtcgagatcttcgagagtgaaggcgatggagtccgacgggcggatatggtttctcttttggcgccttggctttatcggctctggttgcttggtttcgcggacttccggcacttcatttgccggcatatttatggagatttttgcagagccgtcgggtttgcgggctttaggattccccttgggggccgattttaaaatggtttgagcagcatttttttgcgagcttttcgcgggggctgtatcctgttttaaggcggccttgaaaacggttttattctgcgtctcggtttttttaggagccggcttttttatctgagccggcttctttttgacggacttttccgcggaagccggcttagcggtttttaccgcgaccgacggcttgctcgcagccggtttttttgccggcgcagcggattttgccgctaccttttttttgggcgcggcgctattgttttttgcggctgattttttcgtcatatatgttcggacattgcttttttgcatcgcggacagatgccgtcttcgggcagatccggcattactctccaacatctggcgcacctgcgcccctcgacttttgccgcgcgcactgcgggcgtttcaaaattgccttcgaccaccctgaccgccgatacgataaatatctcgggcagatttccggacaattcccgcagagcctccgcctcgggcgaggttgcccccaccattatctctatttcggcttcgaggctcttgcctatcgtcttgttctggcggagcttttcgagctcttcgtttaccttctcgcgcaggctcaaaactctctcgaccctttcgtaggcgacttcgtcgcggtactcggcgccgatttccggccaatcctgcaagtggacggagtcttccgaatattccgcgccgttcttgaaagaatacgcttcgtcggcagtaaaagttagaataggagccgcaacttttatgagggcgtcgcttataatgtctatcgccgtctgcgaggagcggcgctcggctgaatgtgccgcgtaggtgtagagcctgtctttaagtatgtcgtgataaactctggacagcgtcaccccgcagaaattgtcgattagcttatagactttgtggaattcgtaggcgtcgtacgccttctgggcttcgtcaacaaactgcgcagtcttgtacagcgcccatttgtcgagcgcatcgagcttctccggggcgacggcgtcttttgcgcggtcgaagtcgtacaggttgccgagctggtacattatggtgtttctcacgccgcggtaggcattggatatgtgcgagagaatgtcgtcggaaatcggaatgtcgttctgatagtcaactgagcttatccaaaaacgcactatgtcggcgccccatttaccgacgtacatgtcggaggtttgcggtttgccgtccgccgattttgaaatcttcttgcggtcttgtccgacaacaaatccgtgggttattacctgtttgtacggcgcgcgcccgcgggttgctatcgccgtccacaaagagctttggaaccagcccctgtgttggtcggacccctcaaagtaaagatcggcgggccaggcgaggtccggattgcgcgccaagactgcattgtggctcgaaccggagtctatccatacgtcgagcgtatcggtgctctttgtgagcttgtcggccgaaggccagcccgcaggaagtgttattccgtcgagtatttcgctcgcggacatattgtaccacatgttggtgccgagcttttcgactttgtcggcgaccgccttcacgacgccggcgtcgagatacgccttgccgtcggcgtcgtagaatgccggaatcgggactccccacgagcgctgtcttgaaatgcaccagtccgggcgcgattccaccgcgccccttatgcggttttcgcccctttcggggagccacttaacttccgatatagcgtccagcgcctctttgcggaggttgtccttgtcgagcgcaacgaaccattggtccatcgcgcggaagataacgggcgtcttggatcgccagcagtgcggatattggtgtgaaatcttcgccgattttagcagcgagccgttgtttgtaattatttcgaggactttttcgtttgcggcgctcttgccctcggaattttcgaggacgcttatcccgacgagttccgcgggaatctgcccgtcgtcaacgtatttgccttcgtcgtccagcggtgaatagatgtcaaggccgtgctcgaggcctacttggtagtcttcgagcccgtggccgggtgcgatatgcactactcccgtgccggagtctgtcgtgacgtagcgcgcgcagaaaactttgctcttgcggttgatgaaggggtggaaagcctctatgccttcgatgtcggaacccttgccaagaactgatatttttgcgtcttcgagggagcaatcttttatgaaggagtccgcgagcggcaggcctacgataaaagttctcccgccggcggataccgcgcagtattcaacgtccggatttacggccattgcgaggtttgagggcagggtccacggggtggtcgtccagattacgatttcggcgtctttgaggccgaggcgcttgtttgattcttcgtcgagcttaaaggccacccatatcgaagtgctcgtatgttcggcgtattcgatttccgcttcggcgagagccgtggcgcaaggtatcgaccaatacacgggctttttgctcctgtaaacgagcccgcgctctatgaacgcggcaaatgtgcgcaaaatatcggcttcgtacgcgggtttcttggtcttgtattcgtttttccagtccgcgagaaccccgaggcgcacgaattgcgccctctgtttttctatgaaagattccgagaatgcggcgcactcttccctcaactgtggaatgtcgagggtgcgcttgtctttgcgcagctgtttgacgaccttgtgctctatcggcaaaccgtggcagtcccagccgggaatgtagggcgtcgcaaagcccctcatcgatttgtagcgcaggattacgtcttttagaatcttatttagggctgtacctatatggacgtcgccgtttgtgaagggcgggccgtcgtggagcacaaatttcggcgaattttccctgagcttctgaatctttttatagaggccgattttctcccaatgctctatgcgcgcgggttcgcgttttacaaggttgccgcgcatggggaattgcgtattcggcaggtttaatgagcttttgaagtctgtttctgacattttctttatgctgattgcgcgtccgcgcgttttgtgcgggcgcgggcgtcggttaaaattttatcggttgccgttagaacgggaacatgtgaaagccttcgctttcggactctttttcggaaatgcgctcttcggtctttttctcgacttgctcggctctttcctttgtgcttttcacctcgggttcctcttctatcttggccaaccgcgcggcgcgcttggcggcgcgcagctgcttttttagcgcgcggttttcggcgcgcgccatggaaattatttcggcgtcaagcttcgcctgctcgacaagcttggcttttagctgctcaacctgttcttcgagctcttttatccgttcgcgcattgagtttatatcgcttccggcgttgtcagcagcggccgtaaattgcgccgcgaaagccaaaatcgcgacggctgttattgacgcaaattttttcatagcgcgggagtcaaacaaaatatccggacgtttgcaactttttattgaattgccttttttgaatcaatccgccaaaatcgcgcgattatgaaaaaaattattattgttgccataatttccgccttcgccctcatgcttggcgggtgctcgtccaagaatgaaagcggagtcgagataagcaaaggttggttcgcaatgaatcaagtttccgattccaccgcgctctgattggagagttttttatagaatattctttttttcacgcccgcctaacactaaggcggtgaaaaaaactctgctattggaggttttgcgcagtaaaatctgcgcctccgattttttgtcgttttaacgtgcgcgcaaattaaagcgcgcgcgccgcttgggtgttttctcataccctcagtgtgccccgaataaaatttggatattattttttctaaccgcacataaattaaaatctcttttgaggagattttgcgggcttatttatctttggtaaataatattttgtcccgagatttttttgcggctctccgcaaatttgtctgcttgcgcctttggagggagaaggggtttagaatttttatacgcgcaacttaaaaaaaggcggctcctatcgggaaccgccttgaatattgtaaataacttttgaagcgccgcgccgaaactgtcgaatgttgccggcgcaaaaaacgccccatttttgcaatgtacagactccccgcctgaaaccgggcattaacgaagtcgaaactctcgcgtgcgggattgccgcgggaagcggcaagcccttgcgttttttatgcgcgcggctaatcgacgtcgacggagcggtaggctgctatcattttttcgtcgcccgcctttgtgcggtcgctctgcccgtgctccattcctattattccgcggtagcccttgttccagatgtgcttgaatacatttttatagtttatctcgccggtagtgggctcgttgcgtccgggaacgtcgcctacttggaagtatgctatttcgtcccacgcttcgtctatattgggaatgaggcagccttccgttatctgctggtggtagaggtcgtcgagaattttgcagtgcttgctgccaacagccttgcaaagcgcgtaggcctgcggaatcctcttcaaccaaaggcttgggtggttctttatgttgagcggctcgagtacgatagtcgggccgttgtttttctccaagacttcgcaaatgcgctttaaatggtcggcgacattggcaaattggtattcgggctcgaggctcgggtcttcaagcccggggactaccgtgcaccacttcgcatttaccctcttggcgagctcgcagacgtttttcattttgttcgcccagtattcgcggcaagcttgcgggtcgcgcgagcgctttttcatgtcaattcggttgcctgtcatagaggcgttgccccattcggcgtgggcgacaaatacgcccatttccattccgagcttttccatcgtctttgcaatggcgttttgaacttccacggggcggccgggcattccgttgtcttccagcgccctaaaccccctgtcgtagatgtagcgtattttgtcttcgggcgacatccccttgcaggtggcgttaaaatggttcagattcggcgcaaatttgcttttgaatgcggggtccttgccgccttgctgttgggcggacgccattgcgggcgcgacggcggctccgcatagagccgtaattgctgtttttgtaaaatctcttctattcatatatataatgtattgcgttgatagttgaagacaaaagtatctccgatttttggagcaaatgcaattttttttttgaggcgggagaggctaatgggcttgaaatatgcttgcataaatcggcaattatgaaaatataagtttttatgaaacgtctaattttatctgttgtggcgctcttctttctcgcggggtgcgccctcacggacggcggctcggccgcgcgcccagaacatagaaaaatcgccgtccagacttggtccatgcacaaaatgacactcgtgcagactctcgaacgcataaagacgctcgacatcgacggcgttgagctcttcccgggccagaagctcggcggaaaatatcccgacgccaaagtcggcccgtcgctcaacccggagcagattgcgtaccttaaaaaaatcctcaaagacgcgggcgtaaagcccgtaagctttggcgtcaccggcggcggaagcgaaaagaatatcgaggcgatttgcaagttcgccaaagaaatgggaattacgcgcgttcttaccgaggacccagtcgcctcttggcagatttgggatagaatcggcaaaaagtacggagtgacaatgtgcgttcaccaccacacaaagacgagcgccaaccaatactacgacgccgaactcgtaaaaaaatacgcttcaaaatacgacaacgtcaaagccaaccccgatgtggggcacctggctctcagcggaatcgaccctgtcgaaaatctgaaaattttaaaaggcgagattggctcggtccacttcaaggatttgggcgcgaaaagcaggcgatgcgtaccgtatggcgaggggaatctcggtgttgacaagatgcttgcggaactcgacagccaggggtatgacggcttcctcgttatcgaatacgaggccgattgggacaacaatctcccgcaaataaagaagtgtgtagagtatctgcgctcccactaatctgcctcaaccgaaacattaaattgcaagaaatttgaatatgaaaaaattatcagcaatactcgccctgacggcggctctcatagcggccccgctcgcatcatttgcggcggaccaccaccgcaagattgcggtccagacctacacttttaggaatttcaccctcgaaaagacgcttgaaatgctaaaaactctccccatagacggggtcgagtgctacccggggcagacgctcagcgacaaattcccgaacgttaaagtcgggcctaaaatgccgaaggaagcgcgcgaatacatgaaaaagctctttaaggattcagggcttaaaatggtcgcgttcggcgtagtcagcaggtacgacaccgagaccgaaaaagacatagaggccgtctgcaaattcgccaaagaaatgggcgccgacagggttctcagcgaaaatcccgtagcgcgcttcccgatttgggacaaggtcggcaaaaagtacggagtgacaatgtgcgttcaccaccattctatgacgagtcccaaccagtattgggagccgcttgtgcttgccaagtacacgtcgggctacgacaatgtaaaggccaatccggatatcgggcattggtcgctttgcgcgattgaccctgtcgaggggcttaaaactctgagaggaaaatatgtttcactgcattttaaagaccagaaggagtttggcgtgccgaagaaccagtgcgtcgtcctcggaaagggtgctttcgatatgaaggcgattttgtcggagctcgacagccagggcttcgacggcttcctgactcttgaaaacgagaatatcgcgtctaatccgatgcctgtcataaaggagtgcgtcgaatatttgcgcaaaaactgacgattttcatgttgtttaagcgggctccgcatggagtccgcttttttttgcgccattcaaaaaattagtgcggcaaatttttttcgcatattttttaccgaatttaccgaataaaaagtttagcgggattttttttggggatttttttattttctttcctcctttcgctgcaagaaggcggcttaaatgcaaaatttttactgtttcacgcgcgcgggtggtgaaaaaattcaatgggcgcaaattttatgaaaacaaatttttttcgggcgcaaattgggaggttttagcgtcgctaaaatgccgaaaatatttttttagcgacatgcagtgtgtctttttcttggtagggcgggggttctccgtttcctcaagcgcgcaggggggtatccgtttccgcaggcgcgcagggcgcttttttagggtctcttttcagccttctttcagaaaaaaattgcactcttaaaaatattttccgacaccaaaaaaaataagggcgcattaaaaaatgcgcccttgcgtcaggttgctgagcctacattgccgacagctcaaagaatacgctcggaatcgggagctttgaagtgtcgatttccgcctctatgcgcccgtccgacttctttaagggaagctcttgcaatctcgagccgtccatattgagcgcccaaagcctcatctgtttccagtgcggcgtggagagcgctaccttatatttaccagtctcgacgagcaacggaggcttgcctatgtttattaagcttaccatgtcttcgtccgtaaatgacatctcggagttcagcgaattcggggagattacaagcgcgaacctgcgcgcctcttttattggctttaagccgtccaccgccgcgagggtgacgtttgaattgcgctgggtatagattacttcaaagtcggaaagcttggcggtttctccggcgggggcgctcatgccttgcaggcgcggagtgtttactgtcatgtatttgcgcggagtatctatgtatatttcgtccgtggagctctcaaatatgcctttcaatacgtccgtcctattgttctttgagagcattccgcgcttgcgcatttcctcgacagccgacgacaagtcgaagtccgaatgctgggtatctgcaatgttcccgtatgccttgtggagtatcagcgatgagccgccgagcctgtcgaaggcaatttcgttttcggccggtttgtatctcggggaggattccaccgacatcttcgtgagcaggcttagccttgattggcgcgcgtccaagccgtattcgtaggaatcggacttgtaaatgtccttctcgttgatttttatgacggcctcgtacgccgactcggcaacgtcgccgcgcaaatacataagcgctgttagaaattcctgcgaccttattgtgacgtcgggggcgttgttgaacgggtaaaccgcgggcggggtatccttcgcggtgacgggatttgcgaagcatgttatgccgtcaaagccttggagtgccgagtgcgcgccagtggcgaatccctgttcgtacctgtacttattccagaagacatgcccgtgttctgttataacgtagggaactccgtgctcttttgtggcggcaaaagcgcgcgatatgtttatgccctcgccgacggagcttttttgcgatatgcgcgagcccatatctatgaagtttgacgggtgggcgtggtagttgttcatcgcgacatagtcggcgtttttgcgggaaaggatattgcgcatggacttccccatattgaagtttgtcacggggccttcaaagcccattgcgcggaactgccgcttaaaccactttaacatgtcgcgctccaattttgttataaattcgtttatgtcgcgggcgcgctggtcgagcttgttgatgccttcgtcgcggttgaatgcggggagcgcgtcaaaatcttcaactccctcgggaagcttgtctttccaggcttcggagagctttttaaagttgttgcggtatttgcgctttaagaaatttatccattcgccgcgcagctcggtgtaagttccgggctttgagagcccgaattcaagctcgttgtagcctatgacaagggctaattgcggatcttccgcaagctttgtgccggtatagggatttactgtggtgagaatctttttggtcccgattagccaattcttttttactttgtcgtcgctgtatattgaatatttaaaattgcgtttttcgcgcgggttccacgagtctccgatactgtatccgatgccgcttgccatggcgtcgaactctatgtatatgccgttctttttcagctcgtagaaatagtaaaagaggaggtcgagccttttttcgttaaattccccgtcggcttttgctccgtacatcaaatcgcggtctggggagattcttagcatgttgtatccgttttggcgcagttttgcggcgaaagcggccgcttcttcatggttcgacacttccctgaaatccccgccgatgtgtattaaaaattttgcggggacatcgggcgtcttttcaaatgccaggcgtcctttcttattgactattacgcgccccctgtcgcccgctgtttccttggggtttagggaagtcaggtcgaggacgcttccgggcgccgcgggtggggcgtatttttcgggcatgggcttccatacgtcgtcagcgcgggtggtgtagttccacgtcttcggaaatgcgacgtcgcgctcggatatatttgccccgagaagcacccatgtggcgaccccgttttcaggggtaaataccagctttgcgatgttcccaaatccgtcgggaatcttgaatttagagacgcacgcagtgtaggtctgccccaatttttgccacgggcccacggatatgcagtcggcatttgcgccggcgcgagcgtagtcgaaaacattttttccggcttctatcgggaatgtttcctttttgccgccgttgccttcgatttccaatgttcctattttgtcgccgtctttggagtttgaaacgaaatgcaggacgtacaaaaatttacccgaagcctcaatgcccgcaaattccgtttccgccctttcaaggccagagggaaatgtggtggattttaatgctaccgcaaatttgtctttgttgcgatggaagttgcgtaggctgaacggaacatttgcgaattccgtctttgaggtgtcgaattccgaggcgttgtacccgacccccgccggagtgaacgccttaaaagcctttatttcgtagtctttctgcgcgtagccgatgttcgctatttttgcgaactcagcgagaatgtcctgcgaggatatttttaggtttttaaataaaatcttgcccgacgacgattccacgccgaggtgcattcttaagtttttagattcgagcggaacgtccgtaaaaaacgaggtctccgcccagtcggatttccccggggctatatagttgccggcatagacatagaaattgtcgctgccgccctctatgaggaatatcttgccaccccaccttgaaaccgaaggcgtaaggtcttgcgcgagctctacgctcacgtatattcttcttccggcaactttttttataggtagattttttacaatctcggcccgggatttttccgcgcgcacggggtttgtaatctgcaaaacgcctccggatattatcgcgcagtttgacggcgatatctgccagccgtttaagtcggcttctccgtcaaattttaccgattctatttccatcgcgcgcgcagtggcgcatgcggtgattgcaagggcgagtgtgacaatgtatttcttcatacaggtgtaacttaagcaaattctgccgcgcaaatcgcgggtgggcaacaaaattttccgttgcccgcgaatttagatgctaattgcaaatgtattgaatcccgaagatggatagataaaattcattgtaaacccgctctaatcgcgaagcgctctttaagcaaaacgcgcaagtccgccgaggtctatggcgaaaatagtcttgaagaagcgcgccgttgtgattgaatccaatcttaaatgaaggcctcaatgaaaaccacccttttggggatagggcttgccgtcacggttattccggtggcgggaatgtttgcttttataaagctcatgggggccgatgtcgtacgcacagctacttcggaatttaggggaatggccgtggaaaacgccaagcggactacaatcgatatccgccaaatgtgcgaaatcgttagaattaacgaaaccaacgcttccgacgccgcgagagcctcaataatatcagcttttgaaaagctcgggacgccgtcgcttgccgaatcgccgtccaatatcccgacccgcattctcggagaccccgactccgattcgatgcgccagataaggctacttaaatttggcaagtatcccgtggatccaaatatgccctcagacgaccccgcgaacgccgtatcgcgcgttatggagcgcctaaaagacgggttgcgctgcgaaatagccatatatgccaagaccgacgacggcttgctcgccctcgcgggaacaggccccgccgcagacggaaaaagggctgcgggagtgctcttgccgtactctgacgattcttccgagagaatttcagtgttcaaatccggtacggaggccggcgcgaggagcacggattcaaactacataccgctggcttcatcggacggcgagataatcggcggcatatatttcgggcttaggcgctcctccacagcggaaatagaggaatatttaaaaacaataaaaattggcggaagcggaatcgtttggattgtggatgactccgaccccaaaaaccccgtcatacgcgtttcgggcgacaccactgccgtcggaatatccgttgccgacgacaacataaaagtgcgctcggaatttatattgaatgcgctgtccaaagctaagaatcttcgcggctcggaagttgcggtggactcgctcgtattgccgatggggcagtccggcgacgccgcaaggcttgtcacctatacttattaccgcccgtggcactggcttatcggaacgatgatagacgagcgcgagttccagtccgggcgcgccgacctcatcgaacagaccgacactttgacgcgcaaaatactttttgcgggcgcgattttcgcggcaatggccataggcatcgcatggataatggcaacgcgcatgtcgcgcacaatccgcgcgcttgtgagggtcgcgaactcgcagtcgcgcggggacatcgctgcggccgaaaagattctttccggcaagagcagcgtggtcgaggaattcgacgagctctttaccgccgttttgctgatggcgcgcagtctcacaaaattaataagcgtcctgaagcttatgggggttgacgtagccgagagggcgggcaggatttccgatacttccgacaccctcgacaccatcgcatctgaggaggccgcatcgacaaaaaatacggcttcgacaggcgcaaagattctcgcagcttccgaagctttaaacaaaaccgcgagaggctcggcttttgaagtctcgcggactctcgatatcgcgagggagtccggcgaatccataaagctccttaaaaacaattacgactcccttacggcggccgcggaaaacgtcgccgggaaactcgcggtcataaacggaaatgtcgaaaagataaccggcatagtcaccgccatcaacgacgtaagcaggcagacaaatttgctgtcgcttaacgcatcaatcgaggctgaaaaggcgggcgagttcggcctcggatttgcggtcgtcgcaaggcagattagaaggctcgcagacaaaacgtcgattgcctccgccaatatagaaaacattgtgcggcaaatgcaaagttcggtgaactcgggcgtcatggaaatggacaggttcggcgcaaaaatgcgccaaagctccaaaatcataatcgaaaccgccgatatgctcgcccgcacagtgtcggagatagaggcaatcggcccccagtttgaggatatcgcctctggcatcggcgagttgtccgaaaacgcccgcaaaataagcgccacaatgctcgagctgtccgactcctcagtccgcgctcgggacagaatatcggagttccgcgccgcggtgaaatcgctcgactccgtgtcggtttccgtgctcgaggctgtttcgaggttcaagatagaggagggcgaaaaatgaaaatatcgctctccaagcttctgatgattttctttgtcggattgtcggctctgcctgtaatagcgatggcggccctcattctcattatgaactccgacatccgcgccatcgccgaaaatgaattcgacaaaatcggcgagcgcaacgcaacgcagcttgccgctgatatacgcgaaatatgctcaataatacaaaactcccgcgacgcctcgatagacaatgcgcgcaagctcctgctttcaaggcttgcggaactcgggcatgcaagcttttccgacgcgtccgtggaggctgaaataacgaatcaaaacgatccctccgacaagcgcgtggtgaaaataccggagctttcgttcggcaaggaaaaagtgaaatttgtgctcgactcaaacaggcgcatagtttcttccgagggcaaagtgcgcgatatcttcgacactctcaaatccgacaccggcatgga

SEQ ID NO: 3756 - DNA, 1817 bp, Unknown
  16S sequences of unknown bacteria
cttttggtacgccgtgagggattcgaacccccggccttctggtccgtaggttgtctcaagggaaaatcggagctgtttcggctccgatttgtgctttttaccaccgttcactcggtgagttttccattgtttccgtccagccctgcccgctccaattctattctgggtcaaaaatgggtcaggtagagaaaatgggctaacaaatatgaatttgaaaactatgattttataagtggttactgccactcatagggcgttaataaaatcctccaaaagccttgaaaataaaggatttatcgcaatgtgttcgccttatccctttatatgatttcacacaagtttactctttccctgactgcttataagggcaaaatcaagggcaagaaaatttcataacaagatataacagagtgtggcaatcggagaactgtgacatatgtgcgaatatattatactggaggattttttaatggacaagtacatttatgatgaaagcaatggtctttggtatgaactgcaagaagattattatattccttgccttactttaccaaccgaaaaagaacacaagcctattggcttatggggtcagcgacacaaacgctatttgcagaaacataagagggaggtttacaccacactacttgtaaatggcaagttgaacagttatcttgccgacattgacgaacgggcaacaacgatgatgtttcgattgattgaacaaatggctgataaggagggcattaccgaacaactaaaagcagcagaccaaatggcatgggtcggggctatgaacaatattcggaaaagagcaacagagattgtaaacgctgaattgatttacttataagatgaaggcggtagcattttatttgctaccgccttttatatattcccaaaaagaaaatataaaagtctttttgcaatatataattgacattaaggagcgtatagtgtataatcaaaacacaaacgaaaggaggcaggaatatgctatgaagaacaaaaagctaaaacttgcaagagttgaaaaagatatgagtcaagaagatttggctaacattgttggtgttacaaggcagaccattggattgatagaaacaggaaattacaacccaaccttgaaactttgcattgcaatctgtaatgctcttgacaaaaccttaaacgatttattttgggaggacttacaatgagaaacaaaaaggtaaaagacgaacgcattattcaagtacaaaataagattttaggcgaagcctattttgtaacggtgcttctgcttttcatctctatcttggttaaagcatatgtgatgaaatgtgattacacaaactacattactgaactaatcattattattttgtctgcaatatatattgctgtaagaagtatgatgtgtggtaacaatttgatggatacttcaaaaaggaataaaactctttgtgtattaggtgctttcggtgcgagctttgttataactgcgattaacggagttagaaactataccaactacggcgaacgctattcagggttgcttgattggcatttccttgctacattagcggtcacttttatatcctcattcattcttatttcgattggaatactgtttgtttatatgtgtcacaaaaaaggacagcagcgaattgaaaagaaattgaatgatgatattgaggaagattaaggagctgccaggagaacaagtcaaaacgatcatttttcgctatattttatctattacaaccgcgtcagagtctatacacgcaacccacttgggctgccgcctgtgaagtaccgggagtgggtgcaggcacagc

SEQ ID NO: 3757 - DNA, 28184 bp, Unknown
  16S sequences of unknown bacteria
ctgttcatgttaaattcaaggcagctgaactcttcatgaacaattatggcatatctttgccgagcttttggtagttaagagaatgggatgtctcgcggccccggctctcgccggtgttgtaggtgtcgatggtctccttgcccagcacggcggccagctccttgagggttgtcggctctttgccgcccaggaagatggaggtatccatgttgccgatgatggtatcggcgttgtccttgtagatagctttgagctgggactgtgcttgcagcaccaggcaggcggaaatctcacggcttcggatggtggcaaccagcttttccagccgagggatctgtccaatattggcggcctcgtcaatgaggcaccgcacatggaccggcagccgcccgccgtacacatcgtccgctttttcgcagagcagattgaacagctgggtgtagcacatggagatcaggaagttaaagctatcgtccgtgtcgctcataatcaagaacaaggcggttttccggtctcccagggtatccagctccagctcgtcgtaggccgtgacctcccgcagctccgcgatgtcgaacacggcaaggcgcgcaccgcaggaaatcaggatggattttgcggttttgcccgcagccagcttgtactttttgtactgacggacggcgaagtggttgggcttctctgcctccagcgcgtcaaacatcaggtccacggggttcttgaactcctcgtcatcctcccggacctccatcgcgttgatgaactcgatgagggtggagaaattctgttcctccaccggggcctcgtagtggatatacccaatgagggcgcagtacaaaagcgtctcggccttaacccaaaaatcgtccccggccttgccctcgcccttggtgttggcgatcagcgtcgtgaccagtttcaagatgtccttttcggagtggatgtaggcaaagggattatagtgcatggacttcttgaagttgatggtattgaggactttgatccgataaggctcatagatgtccttgccgtgcttatccttcatgggcttgccgtccttgcccagcttgggtgtgccgcgctgaagcattttgccgcactccaccaggatggtgccttttgggtctgtcaccacataggagctgtgcatctgcatcaggttcggtttcagccagaagcgggtcttgccggaaccggagccaccgatcaccagcacatttttgtttctggcggtcttggggtccttggggcggctgttcatggtcaggctctcggttttagtcagaatcacattgttctggaacaccgggtcgatgtagggtgcgatgtcctcatgggtgccccagcgggcgctgccatactccataccgtgccggtacttcttggcgttcttgcttttgagatacacggccaatcgcaggccagcgccgcagcacagccccaccagcaggtccaaagggtgcaggctgggccaccagctggccagcgccaccggcagcgtggagaagaacgaaagcatttttgccgaagcgtccgcacccacggccatccgccatccttcaccgaagttggttgcgaacagccccatcaggatatagggcatattcagcaaaaggagctttttgatgtcaagttgctttttcatcttcatcgttccagctccttccgcttgttccggtccacaacggcgtgtttcaccagctctttgaactggctcagctttgccagcacggacggacgctctgttttctgcgcctttctgaccttcttgccggtgtactcggtaaaggcagcggtcagggcatccgcatcgcggcctttgaaaaagatcaggtacttgggcggggagctgctgcggtccttcttcaccgcatagtcaacgccgtatttccgggcgatcttttcaaactccttgatggaggggtcggtgatctcgatgttggaaacgccctgattctggccgatcagctgcttcaccgtctgtttgccgtggggaatcacgggggtatcccggcttttctgcttttgcagcttcttttccttgcggtgggcaaggtacttggtgatggcggccttaaacagccgcccggtaaactttgttccgctgactaccagcgtcaaagtcctgttttccacttcctcctgcataggtcatcgcctcctttccacggattttgcaggggtggcgcttgatactaaggcgggaccaccagccgccgcagcaggtatttcatcatggcaggctcctttcaacgcagctgatcggagcggtcatagtacagatgtccctggcgcaccttggcatggctgagaatcttgatgtggcccttttcctggttctccaggcttttctggtatccggcctccgtcagaaacaggcgggtccgttcgcctttccagcccaccggcgaatcgtgggtcagcacatcgaagataatcatgtgccgggtgtcctcggcaaaccgctccaaatccatgtactcatggccgtggtagttctgcgccccggccttgagccgcatttcctccatcagctggcccacggtcttacgctcaggcatggcgcgcacctcctttcccgcgtccctggcctttcacagtcaggataccgtccagggtggtagcggtgatccgcaggcgctcagcggtggcgatgtcattcttcacggtctcgtcgatgccgtggccgcagaccaccagcacatgggaccggcgcagatagtctcgcaccatatccagcccgtccttgtgttcctggggaatctcgtccttgaggaaggtggacaagaacagaaccgggcagatgggcgaatacccggcgtcgtacacctggcggcagtaggtggcagcgttctcggcgttctcatactggttgttgctccagggagccgtaatgtaggcaagaggtcgtttcatgacaaaatcctttctcccggtattgccgggcaacagaaaagcggctgtttaccagccgcctgtgttcatatcgtgattgacttgtacggtgtagtgattgctgatcgtggtgggcgcgttgaacagcactgcaagcaaatactgtttcatattgcggacctccgtggtgtttttctgcataccgtccatgacaaatcggatatgctcgctatccagcttcaagaaccgggagcgcacgacttcatggggaaagtcgctgccagcgatccgagtggttttacgtttggcacaaacggtctccaccatcagctccacaatctcgtccaggtcctcacggtaggtcgaaaactctctgcacagatagtcatactcgatgttctccagaatcaattcccgataattttctatctctgagacagacatcgcatcccttcctttccgttccggcagctgtgctgccgctgtttcccggaagggaatggaatcggtacttgctccatgagtattttgtttttgagtatttggtttctctatatttaattctgcgggcttttccgtatccggtttatccagatacgggttttccgtatctggtgaagccgtatctggtacagccgtatccggccttggcgtttctggctgcctgggctggggtttctcataaatcacatactcggtgtcgctgatccggccttgttggtcccgcagctggttccgcacgatgtaaccggcggtttccaactcccgcagcgcactgccgatggcatcaacgccctccttgcagattttcgcaagtccacgggtagtatagttccagtcatcaggcagggataacatcatggaaagaagcccctttgccttgagggatagttcgtggttccgcaggtgatgattgctcatcacggtataatctttggtccgttcaatgcgaaaaacggccattgacttcactcctttctaattttagggcatgaaaaaagccacaatccttcgtgaaaaagactgtggctttcagctgtttttgttgttctgccagggccggtaaggacgcttgtacttcggcggatgactgaacatcggctcatgctccgaaaacgggagggtctgcaaaacccggtcaatgtcggtggattccatatcatactgggactggcaactttcccggatggcatctttgatgctctggacagtacacatattcattcctttcctttcgtagtgataatgagtttacgggtggcggcggcgcttgtccggtttgaagtcgagcacatggccctcgatcacacgggcataccgcttgattttgatttcccgacgcttctggcttacgagggcggcctgatacccgtcctccgtaagaaacagccgcatatcatcgccggggcagccgtaggaacaagggcgctgaacggaaaactcgatcatccagcgggtgctgtcctgaaaacgctctacggccaagatattgtgtcctttcagctcacgggctgaaatatccctcataggcggctcctttcatcgttcctggtctctctggcgcttcttctgccacgcctccagcagtttgataatggtttcctgcatccgctggggcgtatagcttttggggaaatacttccgcagggtgtcggaggtgaaagtcactttgtcgagatcacttttcttttcctcacccatgatgacgcgcatcatatcgagggtcagatgtccctcctggctgtatttcttgagtcgctgagcctgggagagagagggggtagcctgttcgctgtccatcgcgtccagcaaatcccgctgttcttcttttttgagaaaggacagctcataagccggattgagggcgattttcttttcatcgaccatatccagcagttcgggaatcagctccgtcaggcggatatagcgctgcacctggttcctactcgaaccagcctgctgcgccaacaattcatctgcacgcaacttcgtcccaagttgggacgaagttaagtccccccgtgcgccttggtgtttcatagcctccagcttcatcttgtaagcaaaggccctttcgctggggagcaggctttcacgttgtaagttgctgtccaccatgatgatagtggcagcatcatcgtccaggtctcggacaatgacaggcatggtttctttctcggccagctcactggcccggtgccgcctgtgaccggcaaccagctcatagccgccctccgggtccgggcgggcgatcgccggaaccagaacaccatactgccgaacgctgtcggcggtctccatcatggcctcgtcatccttgactttgaagggatgccccttaaatgggtgcagctcagacagcggaatttcctgtatcttctccagcttggcatcctggcggctttcctcggtggaaaacaaatcatcgtatggagccagctctacttttttcgcgctgcttttcaagttttatcacctccttggtcagattcttatagccctcggccaccttgccattagggtcatgggcaaaaatgcttttgccctcggcgctgatctcctttgcccggacagaatggggaatctcggtgccgaacaccttgattttgctgccataggtctcccgcagcagggcggcaatctccttggcgaagttggtgcggttgtccaccatcgtcagcaatatgccgtcgatctggagcttggggttgatctgccgcttcaccttgtttacggtctggagcagctgttccaggcccttggcgggcaggtactccgcctgaacggggattatgaccctgttggcggcggccagggcgttgaccgtgagcatacccagggatggctggcagtcaatcaggatatgggaatactgtcccttgagcgtgtccagatactgccgcaggatggtctctcggctcatggcgttcaccagggagacctccatgccggagagctggatgtctgcgggcatcaggtcaacgccctccgggtggtgcaggataccctcgccggggcgcagcggctcgtccatcaggatacggcccatcgcgtcggacagggtaaagggcagcttgtccggctgggggtggcccaggctgatggtcaggctgccttgcgggtccccgtcgatcagcagcactttctttccggcctgcgccagcccaatccccaggttcgcgcaggtggttgtcttgccaacgccgcctttctggttggcgatggcgatgatttgcgtgttcaatgacttcacctcatttctgaattgttctatggcttctggaaatagaaaaagccgccacttcaaaaattgaaagtgacggccttttcttatcccggaatgaaattccccggaaacgcaaaaagcgcccagtagaaaatactgagcgcttggcgattagatttattctcttttgttcaaattaggtcaaattcagacaaaccgttttcacgaaaaaggtctcttggagatgtataaataaacatccccttggcatcccaaaatcgcgtctcggttgtcctattttttaacccataagccctctttttggggtggttgtccaccatttaacccatagaaaacgggttaaaagaggcttcgttctgtcaaattgcgtcaaaccatttgaaaaggaaaaaccccggaaaccgcgtagttccggggtttttgaccacttttgataaagtttagcgcttgctgaactgcggagcgcgacgggcagccttgaggccgtacttcttgcgctccttcatgcgcggatcgcgggtcaggaagcccgccttcttcaggctcgggcggagctcggcgtcggccttgcacagggcgcgggcgatgccgtggcggatggcgccggcctgaccggtggtgccgccgccgtagacgttgaccagcacgtcaaagcgcgcgccggtgtcggtcagaaccaggggctgacggacggtcatcttgagcgtctcgagaccaaagtagttctcgatgtcgcggttgttgatgaggatcttgccctcgcccgggacgaggcgcacgcgggcgatggacttcttgcggcggccaacggcctgatatgctaatgctgccatgcgtattctccttccctcttacttagtcagctcgagaacttcgggcttctgggcggcgtggtcgtgctcggcacccttgtagacgcgcagcttcttgatcatctggcggcccagggcgttcttggggagcatgccgcgcacggcctcgatgacggcgagatccgccttcttggccatgaggtccttgtaagaggtctccttgagtcctccgggatagccggagtgacggcgatagaacttctggttgagcttgtcgccggtgaggacgaccttgtccgcgttgagcacgatcacatggtcgccggtgtcgacatgcggggtgaaggtgggcttgttcttgccgcgcagaatcgccgcaacctgagaggccaggcggcccagcaccatgccctcggcgtccacgacgtaccactttctctgtacggtttcggccttagccatatacgttttcacagggattccctccaaattgaagttttctcgcccgcgcgcgttggtcaggcgccgctggcatgtcgttccggtaaccggggctatggtcacacttcaacgcaacgattattttaccgcaaattctcttctccgtcaagcggtttttccgttaaatccaagggttttggcggcaggagctccggcccgtcggggaggaactccgccgcgtccgcgccgccgaagagcgcgtccatcccggcgagcgcttccccctgcgcctcctggccggggtagagcacgcgcacgagcgtcaggcccttggccggcgcggtataacccagggagagccggctgcgcgtcgcatacgcctgcgcaaagcagtcctccggcagcttgccctggcccacgagcgccagcgtccccgcgcagatgcgcaccatgttatagaggaagcccgtgccgtagatcaggaaggtgacgaggttccccctgcgcgccacgcgcgcggccttcatctcgcgcacaaaggtcttggccgtgccgcccgcggcctggaaggcggtgaagtcgtgccggcccacgagggcgcgcgcggcgcggtccatggcgacctcgtccaggcgcacggggcagtgcgcgctgaacctgccgtagagcgcgctggaggcgggcgcgttggaaaagacgtaggcgtacaccttgcccgcggcggaaaagcgcgcgtggaacccttccggcacctcgcgcgaggcggtgacgcgcacgtcctggggcaggcgcgtgttgagcgccagggcgaacttctccgcgggcacgcgggacgcggtgtcaaagtgcgcggcctgggacagggcgtggaccccggcgtccgtgcgggaggcgccggtcacgcgcaggcgctcgccggtgatgccgaagatcgcgcgctcgagcacgggctgcacggccagggcgttgtcctgcgcctgccagccggcatacgccgtcccctcgtagctcaggcgcagcagaatccgccggctcacagcagcgcgcgctccagcgcgatgagcacgagggtcgcggccgtgacgcagcaggcccagccgtccgcgcggccgacgtgcagcaccttcatgcgcgtgcggtggcggccgccgtggtagcagcgcgcctccatggccatggccagctcgtccgcgcggcggaaggcgcccacgaacagcggcaccagcagcggcaccatggcctttgcccgctggagcaggttgcccgtgtcaaagtccgcgccgcgcgcggtctgcgccttcatgatcttgtccgtctcctccaggagcgtggggatgaagcgcagggcgatggtcatcatcatggccatctcgtgcacggggaagtgcacggcgttcaggggcttgagcagccgctccagcgcgtcggtcagcgccatgggcgaggtcgtgagcgtcaaaagcgacgtccccgccagcaggaacacgagccttaggctcatgaacaccgcaaaccgcacgccctcccagtagatgcgcaggatgccccactcgacgatcgggtgctccccgcgcgtaaagaggatgttcaggaggaaggtgaacaccacgatgaagagcaccggccggatcgaccgcagcaggaacttgacccggatgtgggacagcagggtcgccgcggcgaggaacgccgccaggcacacataccccaggaatccctgcaccaggaacaccatcacgatatagacgatcatcaggatcatcttgacccgggggtcgagccggtgcacgacggaatccccgggataatactggccgagggtgatgtccttcagcatccgccttccccctttccaaaggcggccagcagcgccgcctccatctcctcgatcgtgtacaggtcgcgcggcacgggcaggcccgcgtcgcttagctcgcgcgcaaggcgcgtgaccgccggcacgtccaggcccatcttcgtcaggcgctcggcgtccgcaaagacctcccgcggcgcgccctccagggccttttccccgtggtccagcacgacgatgcggtccgcaaggcgcgccacatcctccatggagtgggagaccatcacgatcgtcgtgcccgcgcggtgccactcctgcacgcgctccaggatcgagtcccggcccgcggggtccaggcccgccgtgggctcgtccaggatcaggaccttgggctccatggccagcaccccggcgatggccacgcgccgcttctgcccgccggagagctcaaagggcgacttgtcgcgcacggcctcgtagggcaggcccaccaggcggcaggcctcctcgacgcgccgctcgatctcgtcgttgtccagcccgaggttcttcgggccaaaggcgatgtccttgtggaccgtctcctcaaagagctgatactccgggtactggaacacgagccccacgcgccggcgcacctcgcgcaggttcgtgcccttgtccgcgatgtccatgccgtcgacgacgaccgtgccgcccgtgggccggatgaggccgttcaggtgctggatcagcgtggacttgccgctgcccgtgtggccgatgacagcgagaaactccccgttggcgatcgtcaggctcacgcccttgagcgccgcggcggaaaaggggctgtcctcgttgtagacgtggctcaggtcccgaacctcaaccggcatttccgctcgcccccctttccctgtagcgcgcgatcagcgcctgcgccatctcgggcacggtcatgggcgctccttgcacgtccaggccgcgcgcgcgcaggcggcttgcaagctccgccatggccgggacctccaggcccgcggccttgagcgcctccgcctcgcgggcaaagacctctcgcggcgcgccctccaggatcgccttgccgtcctgcatggcgatgacgcggtccccgcgcagcgcctcgtccatgaagtgcgtgaccagcaccaccgtcagcccgctctcgcggtggagccgctccaccgtctccatgacctcgcgccggccgccggggtcgagcatggccgtgggctcgtccatgagcagcacctccggctccatggccagggccccggcgatggccacgcgctgcttctgcccgccggagagcatgtgcggcgcgcttgcggcatattcctgcatgcccaccgcgcgcagcgcggcgtccacgcgctcgcggatctcctgcgggtttacgccgaggttctccaggccaaaggccacgtcctcctcgacgatcgtggccacgatctggttgtccgggttctgaaagatcatgccgacccgctggcgcacgtcccagatgtggtcctcgtcgcgcgtgtcgtagctgccgacggtgacgctgccgcgggtgggcaggaacaggccgttcaggagcttgatgagcgtggacttgcccgagccgtttcgcccgatgatggagagccattcgcccttgcgcacgctcaggctcacgccgcggaccgccagctccccctcatcgtccgcccgctcgtattcataccatgcgtcctgcacgcggatgatgtccgtcaaggcttcgcccctcctttgccgtccaggaaggcctccatccgcgcgatcaggcgcgtctcatccgccatgagggcgaactggccgtgcgggccgatgtcctcgacctcggcattcgggtatagaccgcgcagcagcgcccgctcccgctcgccgtagtattggtcgcccgcggactccaggatcagcacgcgcccgccccagcccgcaaggtcgcccttggcaaagggccgcttttcatagagctcgggcagggcgatgcagttgaggtggatgtactgcttcttgtagacgctgtgctcatacgtctcggagatgaaggcgcgccagaaggtcatgttgtcctgcagctcctccgggcacatctgctcgaaggtctggtagcccatggacccgcgcatggcgtcaaagggcgcgatgcggtagcgcaggaccaggcttttgcggctcgtccagcggacgcagtcctcgcgcggcaggtccttgcagggcgcgccggtcgtgcagaggatgagcccctccgtctcctcgggataggcgcggacgtagacctgcgccagcagcccgccgatggccgagcccacgacggtcacgcgccgcacgcccaggtcctcggagaggatgccgtggatctgccgggcaaaatcggccatgtgcttgcactcgggcagggacaccgcgatgcagcggcgcctgcggctcatctccagcaggtaggggaagtagatctccccgttgcccatgccgctgggcagaaagagaaccgcgtcctcgccctgccccaggtcccagacgcggtagagcatgccttccttttcgtaggtgcggcaggggtgcgtctcgcggaaggcggtcaagcgcttgaccgccgccgggggcgcgatttggtagatatcgtcaaagcttctgggcatggtttgccgcctttcttgtccgttccgctcaggcgcgcgcgttgcgctcgtagagcaggcgcaggcccttgagggtcaaaagcccgtcgatgatgtcgatggtggaggtctccgaggcgatcatgcgggacaggccgccggtggcgatgacgcggatgtgctccgtgccgccgatctcgctcttcatcttgcggacgatgtagtccacctggcccacatagccgtagacgatgcccgcctgcatgttggagatggtgttgcgggtgatgaccgtttcgggctttacgagttcgaccttgggcagctgggccgcgcgctcggtgagcgcttcggaggagagcttgagccccgggcagatcgcgccgcccaggaattcgcccttcttcgagatcacgccgaaggtcgtggccgtgccaaagtcgatgaagatgcagggcccgccgtagtagcgctgcgccgccaccgcgttgcagatgcggtccgcgcccagggcctgcgggttgtcgtagcggatgttgatgccggtcttgatgccgggcaccacctggatcggcgtctttccgatgtagtcgtcgatcatgtgctcgatggtgtagttgatcgtcggcacgaccgaggagaggatcacgccctcgacgtcccgcttgtcaaagcccgcgttcgccaggaacatgctcagcagcacgccgtattcgtcgtgggtcttgtggcggtccgtggacatgcgccaggccttcttcagctcctcgtcctcgtagagggcgcacttgatgttcgtattgccgacgtccagcgtcagtatcatgtcgggatcatcctttcctgggggattcgcgttccgggggcgtcgcgccgccggtgtgcggttcgccgctgtgcggtttgccggtgtgcggttcgccgctatgcggtttgccgctgtgcggtccggagccggtcagcttccaaacggccagcaccacggccacggtcaccaccgccgcaaggatgcactccgggatgccgttgaccgccgaggccgacagaatcgccaggcccacgccctggcggctgatgcccatcaggtccgcatactgctgcgcgtacaaaataaaaatcaagcccatcaccccgatggtgttggtcagcgtgccggcaacggccgccgcccccaccgagagcgcgcgctttctcgtaagatgcgagatgccgcgaaagacgtagtaggccacgggcccaatgaggacgcggggcaggatcgtgaccaccgggttcaggaacaggggcgcgagcaccgatccccccaccgccgcgcggtagaggctgaacagcccgaagatcagcccgatgacaaagcccacgaccggcccctccagcaccgcgccgatgatgaccggcacgtgcaggatcgtcgcgttgagggggccgatggggatgatgcccagcggggtcaggcccagcaccatggtcacggccgagagcatgcccgccacgaccagcttgcgcgtcttttcgcgtgtcttctgcatggttttcattcaatttttcctccgttcaagttccgtctcttgggatacctgacgactttccgccgcgaagcgcgcggcggggcgcgtatgggatccgcccgcatcgactccccgcagggtcgccgtggagcgcatgtatattttaacccaagaaaagcggtgttgcaacactaaagcgcgacaaatgggccgcttttgtgttatactctctttaaagaagaaggattttgaaattccaggaggtggtctctgtgtttcccctctgcgctgcaatcggccgcatctccaacgccgcgatcgcctttctgctcgtgggcgccgcgctgctggtcctggccgcgatctacgccttccaggccgtgcgcagccgcggcaagccgcccgtcgagcgccgcggcacgctgaacctgggcgaccagctcttctccgactgggccgcggggccccacgccatcgaccccacgccggggaccttctccctctacggccgcaaggaccccaacgccctggaggaccccgagcccgacccccgccgcagatagctttcccccgaccgacgcgaaaggaggtccttccatgttccgccctgtctttcttctccccctgcccgcccccggctccatgctcgaccgccctgcgacgccggtgctgatcctgctcatcgtcctggccctgctgctggtggggtcccttgtgatctacctcgtctccgccatccgcaaccgcggcaagcccaagcctgaccgcctgggcaacggcaacttcctcggcgcgaaccccggcggcgggcgcggaccggcggccggcggccccgcgggcggcgcgcccagcgtctttgccgtcccgcccaagcccccgcgcccgggtgcggaacgcgaacccgacccccgccgcaggtaacttcccccatctcgacgcgaaaggaggcgtccccatgctgttcccaatccttctgaccgcccagcgcccgagcgagctccttccccatccggactgggagatcatcgtctggatcgtcggcacggccgtgctgctggtcgtctccacgacgatctatatcgtctccgcgattcgaaaccgcggcaagcccaagccggagcgcctcggccacggcaacttgggcggcatggccgggtattccggccgcggcccgggccagggcggcccgcccggctccagccccggcgcgttcgccctctacggccgctcgtcgccttacggctcctacggctccgcgccggagaaggaggaacccgacccccgccgccgctgagccccgtttctcccttgttttttcgaagggaaaggaggtctccgcatgaacggcaacaccctgcaatggcccgttgtgctcgtgtattccggcgtgggcctgctcttcctcgccgtggtggtttggaccctcgtctcggccatccgcagccgcggcaagaaaaagccggcgcgggatgccctgggcaacggcaacttcctcggcgtcagccccggcggcgggcgcggacccgcagtcggcggcgcgccctttggcgcgccgggggcctttgccgtgcccgagcagccccatcgcccggacgaggaacgcgaacccgacccccgccgcagatagtccccccaaaaacgccaagcgcgcccctccccttttttcgggggaggggcgcgctcgtgcttctcaggacttgtccaggttcgcgcgggcaaaggcgcggggcaggagcgcgccgagcgtcgtctcctccacgccgcccccgggcgcggccaggtacacgcggaacgtctccaggtcacagaactcggccagcgcctggcggcagacgccgcagggcgggcaggacgcctccgcattgtccccgacgcgcccgccggccaccgcgatggcggtgaactcccgcgcgccctcggccaccgcgtggaacagcgccgtgcgctccgcgcagcaggccacggggtaggcggcgttctccacgttgcagccggtgtagacgcgcccgtccgcgcccagcagcgccgcgcccaccgcaaagccggaatagggcgcgtaggcgttctcccgcgcgcgccgcgccagggcgagcagctccgccccgctcacagcgcgatctccagggcgatctccatcatctcgcggaagctctcctgccgctccttagcggaaagcccctcgcccgtgaaggggttgtccgagatggtgcacagcgccagggcctgcttgcccgcgcgcgccgcgttgaggtacagggccgcggcctccatctccaccgcgagcacgccgagcttctgcagcgtcgcgttggggttgctctcgtcgtagaacgtgtccgaggagaagagcgccccgggcaccaggcgcgcgccgatgcgctcggccgcctccgccgccgcgcgcagcagggggaacgagcagcagggcgccaggctccccgcaaacccgaactgcgcgccgaagttcgaattcgtgtagcagctcatgcccgcgacgatgtcccgcaggcgcaggtccggccgcagcatgcccgccgagccgatgcggatgatcgcctccacgccgtagaagtggaacagctcatggctgtagatgccgatggacggcatgcccatgccgctggccatgacggagacgcgcttgcccttgtacaggcccgtgtagccctgcacgccgcgcacgttgttgacaaggaccgcgtccgtcaggaagttctccgcgacaaagcgcgagcgcagggggtcgccgggcatcagcaccgtgggcgcaaagtcgccggccttggcggtgatgtggggcgttgggatgttgctcatgcaagaagtcctccttttgccggtcttccgaaattttcctattctttattgtagggcgcggagcgctgtccgtcaaccccgctcagcgcttgcgcaggaccgcggcccgcaggcagacctgcgcgtccagcagccgctcgccgtcggaaaagcgcacgcgcatctggctgcgcggcccgacggcgaggacctccccctccccaaagacccggtgcacgacgcgcgcccccggccggatcccctcctcgccaaggtccgcatccgccgggcgccgggcaaggggccgcgccaggaaaggcgcgccggccgcatttccccgcgtcgccgcctgcgcgcgcccggtccgctcgtccagcaggcgcgagacgtagcgggactccgcccgctccgcgccaaaggcccgcgtcgccgtgggcacggtgaaccgctcccgcgcgcgggtcgcggccacgtacatcaggcgcgtctcctcctcgagctgcgcccgcgtctccgggacgcgcgccgcgcccgagccccgcggcggaagcacgccctccatcgcgtccacgagcacgacctcgtcgtattccaggcccttggccgcgtggatcgtggacaggaagacgcgcgccccggcggcctgcgcgccctgcgcctccacaaggcccggcagcgcctccgcgcgcaggagcagccggcgcaggtccgcctcctcccgggccagggcgcgcaggccgtcgcagcggtggtcgcccaggccgtgcgcgcggcagagcgcgtccaggacctcgggcgcgggcttgccccgcagggacgccaggcgcgcctgcgcggcgcggagccgctccgccgccttcgcgggcagggttccctgcgcaaggagcgcctggaaccggtcccccggcacgctgcgcgcgcactggatgcacgcccgcggcacggcgcccaggagcaggccccgcatgcggttgaaggcctgcgcgtccgccgggtccagcacgaggcgcgccaggtcctgcaggtcccgccccgccgagccgaagagccgctccccgccgccctcgcggctgagggcaaaggggatctgcgcgcgcagcagcgcgtcgcacaggggcgcggcgctgtcgttgttgcggtagagcacgcccagggtccgccccggggcgaggtcctgcgcgcgccggcagacataggccgcctgctcgccccagtccgccagggcggcgcgctccaccgcgccgcccgccgggcgcgccgcgcgcatgcgcaggtcgcgccgatccgcgttccagcggatgacgcggcccgcggcctcgacgatctccggccgggagcggaagttcacgggcagcgtcagcacgcgcgcgccgggaaaggtccgctcgaattcgttgaggaagtccggcgccgcgccgcggaagccgtagatgctctggtccgcgtcgccgatgcagagcaggttcccgcacccgccggccaggagcgcggcgagcttctgctgcacgggcgaggtgtcctgcgcctcgtccacctgcacgtagtccagccgcccctgccagaggctacgctgcgcctcgtcctgcgtcagcaggcgcagggcgtagacctgcatgtccgcaaagtccatcaggcgcttttcccgcttctcccgcgcgtagtcgcgcgcaaggcgggcaaggtcgaagtccgcgctctccgccgcggcgccggggtcgctcgtctccctctccagcgcgctgcaggcggcaaggagcgtctcctccgagggcgcggcgatcccctgctgccggagcagccgccgcaccgtcggcgcggggtcggccaggaccccgaagagctcgcgcccggcccgggccgcgccctcgcgcagaatgcgcaggctcatggcgtgcagcgtggagacgcgcggcgtctcccactcgggaaagagcgcggcaaagcgcgccgcgaggtcctcgcggctgcgccggccgaacgtgagggtgaggatgcgccccgggctcgtcccctcctccagcaggcgcgccgcccggcagaccgcgaccgtggtcttcccgctcccgggcgcggccgccagcagcgccatgcccttggcaaaggacacggcctggcgctgctccgcgttcaggcgcacgcccttctcccgctccaggcgcgcaaaaaatgcctcgtccacgcgcagccccccttttcttctcttcatatgagtataccggaaaacgagcggcaaaaaaagacgctttctgcgcaaaagtccgccgtttttctccgaaccacgttttgcagtgcggaattttcgcacattttcctccccggccgcggcgcgccgctttccttttccgcaaaagtccggtatactgaatccaaataaaaaaaaggggggacatttcatgaacgcaaccgaaagcgcgctgctggaccgcatctgggacatgcccatcctggacacgcacgagcacctgcccctgcgccccgcgctgcgcgagacgccctgcgacgtcctgaccgaatacctgagccactacttcgacaaggacctgatctccgccggcatgccgcggccgctgctggaccaggcgctcgacccctcgctggacatcgaggagcgctttgcccgcatcgagccctggtgggacctgtgccggctcacgggctatggccgcgcgctggacgaggcggcccgcggcctctacggcgaggcgcgcgtggaccgcgcctccatcggccgcatgaacgaggccttccagcggggcgtgcaggacggcggccacttccgcaaggtcctcaaggacaagtgccgcatctcgcgcagcgtcaacgatggctttgcgcacatgaaggggtccggctggtcggacgacgagctgttcgcgcaggtgctgcgcctggacggctacctggagggctggaacttcctctgggacctgctcggcgagtacggcacggacatgcgcacctttgagggattcctcgcggccgtgcgcgcggaccttctggcctcgcccggctacggatacgcgggctacaagctcggcgtcgcctacagccgcccgctgtactttgcccgcgtggcggagcgggacgcccgcgccgcctttgacgcgttcctgcccgtcttcctgcaggaccgccttgcgcccgttccgcgcgcgctgcaggactacattctgcgcttctgcctggggattttgcaggagatgggcgcgtttgtgcagatccacacgggcttccaggagggcaacggcaacatcgtggccaactccgacccgctgcttttgaccgagcttttgcaggacttccccggcgtgcggttcgacctgttccacatcggctacccgtatgtgcgtcagaccggggttcttgccaagctcttccccaacgcgacggtggacttcgcctgggtgaacatcatctcccccctcgccgcggaaaacgcgctctgcgaatacctggacctggttccgcagaacaagatcttcgcctttggcggggactacctctttgtggacggcgtctacggccaccaggtgcaggcccggcgcacggtcgcccgcgcgctcgcccgcaaggtggaggacggcgcgctggacctggaggccgcagagcggacggcgcgccgcctgctgcacgacaacgcgatagacaaattgggcatccggttgtaaaataggggtaagcgcagggtctgcgccagagcaaggagggctgttttcgatgaagtattccttccccgatggattccggctgggcgccacgggcgcgggctggcagatggagggcgaggcggacaagcgtccgaaccagaagcactttccgcacctgatgtgggagaacgaccgggacgcctggttcgagggcgtggggccggaggtggcctcggacttctaccgccgcttccgcacggacatcccgctcttccgccaggcgggcatccggcagtaccgcttcaacatcgactggtcgcgcttcctggacgactacgaagccgtaaccgtcaacgagcgcgccgcgcgctactactcggacgtcatcgactgcctgctggaaaacggcatcgagcccgcgctgtgcctggagcactgggagctgccggcggcgctctacgagaagtacgacggctacgccagccgccgcgtgcaggacctctacgtcgcctacgcgcaggaggccttccgccgctacggcgaccgcgtgcacacctggttcgccttcaacgagcccatggtcatcccggagctctgcttcctgaacggcgcgtggtggccgcacgaaaagaacccgcggcgcgcctacgcctggattcacggcaaggtgctctgcacggcccgcgcggcccgcgcctgccacgagatcctgccggacgcgcgctttggcgcgatcctcaactccccctacatcgtcccccgcgacgcgaacaacccggacgacgccgcggccgcgcgcatagcggacgacttcttctggcggccgttcacggacacggcggtgctgggccgctacccagagaacttcctgcggattctgacggacgagggcctgctcttcgactaccgggacgaggacgcgcgcctgatcgcggaaaacaccgtggacgtgctgggcatgaactactaccagcccatgcgcgtcaaggccaaggaaacgccctgggacgagagccgccccttccacccgtccaagttctacgacgactacgacatgccgggcaagcgcatgaacccctaccgcgggtgggagatcttccccaagagcctgtacgacatcggcatgcgcatcaagaccgaatacggcaacctgccctggatcgtgagcgagtccggcatgggcgtgcagaacgaggcgcgcttcaagggcccggacggcgtcgtgcaggacgactaccgcatcgacttcatcgccgagcacctggcctggctctccaaggccgttgccgagggcagcaactgccagggctactggctgttcgcctccctggacaactgctcgccctacaacgcgtttaagaaccgctacggcctggtggaggtggaccgcgcgcagaatctagcgcgccgcctcaagaaatccgccgcctggtaccgcgccgcttccgacgcaaactgcttcgagttcaaggagatttgagccatgcttctattggataccgtcaacaagaccaccatctgggggggaacgcgcctgcagaagttcggcgccgatcccctgaacacgcgcgtgggctccctctacaccgtcgccggcaacgaggagctgacctgcaccgtgctcaacggcgaattcatcggcatgacgctgcacgaggtttacgcggcggatcccgcgcgcttcggctgcccgcagtttccggtctttccgctgctgatcggccttgtggacgccgcgcaggatctctccatccaggtgcatcccggggacgcgtacgcgcgcgaacgcctcggcgcgccctttggcaagaccgagtcctgggtcttcctctccccgcccgcgtccgggtccatcgtctgcggctgcgcgtgcgagagccgcgaggacctcgccgcaaaggtgcgcgagggcgcggtggagtccgtgctcggccgcctgcccgtgcgcaagggcgactacgtctttgtggagaccggcacgctccacgcgctgacggccggctgcctcgtctacgagattcagcagtccacggacgtgaccttccgcttctacgactacaaccgcgtggactttaagggcaacccccgccccctgcaggtggaggaagcgctcgccgtcgtggacgtggacaagaccggctccgccgtgccctacgagtcggaccgcgactacgaggagccctactacggcacgcgccgcacgctgatctccggtccctttgtcaacgagcgggacgtctttgcgtgcgtgacgctgctgtccggcaacctcacggcggacggcatgttcctcaccccgggcatgagcgcggtcgtcttccccggggagcgggcggccttctcgggttcggccgaggtcatggtcgcctggccccgagccggggaggcgccccgccccgtggaggcgccccgccccgtggaggccgccaaatgacgaagctctacctcggcatcgacgtcggcggcacgtcgatcaaatcgggggtcgtggacgagggcgcgcgcatcctctcgcgggagcgcctgcccatcccgccggactttgacgcctttcaggacgcgctcgcgggcctgatcgcgcgcgcccaggcgcagtttcccgcgctgtgcggggtgggcatcagctcctgcgggggcatcgaccccgcctcgggcgtggtgttcgccaagctcgcgccgtcgctgaactacctcatcggccggcagtactacgagatccgccgccgcacaaacctgcccgtggccctggagaaggacggcaactgcgcggcgctgggcgagatctggtgcggcgcggcgcaggacctgcaaaactttctgacgctggtgctcggctcggggctgggcggggcgctgtgcatcgggggcaaggtcttctccggcgcgcacttcctcgccggggacatcggctacgcctaccccgcgcccgcgggcggcagctacggccagcagatcgcgccggtggaggtggaaaaccgctacttcgcccgcacgggagagcggcgcaccatccccgagatgtacgaccgccgcgcgcaggaccccgcggccgcggcctgcgtggcggagttctttgacggccttgccaacacgattttgaccatgcagtacgtcgcggacccgcaggccttcctgatcggcggcgggatcacggcgtggccgcaactgcttccggagctgcaggcgagccttgcgcgcctggtcgccgagcgcgacggccccatcctgccggaggttcgcctgtgcgtccaccgcaacgacgcgaaccttctcggcgcggtctacaactgcaaggagacgttcggcctgtaacgggcccaaatgggaggtgttttcatgccctatctgcacatcgcgatcggccggccggtctcgcccctggcgcgcaaggcgctctacgagcgctgcgcccagctcatcgagaccatccccggcaagaaccagcaaaacctcatggtccgcatcgagcaggactgcggcctctacttccgcgggggcaaggcgccgtgcgcctttgtggacctgcggctctacacggccgcgcccgcggaggccaagcgcgcctttgccgcggcgctgacgcgggagctctgcgagcggttcgagctggagccggacttcgtctacatgaacatgctggagctggatcactgggtttcgggcgggggcatctcctttgcgcccggggaaggaggcgcgcgatgaagcgaatcgagggcgaatccatcgtgctgcgcgacctcatgccgtcggacgcggcgggctatgcggccctgtgcgcggaccctgcgctgcgccgggtcctgacggagtgggaggaccccctggagggcgagtcccttcccgcgctggaggacctgatcgcgcaggcccaggcggcctcggactggcgcgtgccgcgccgcctggccatcgccctgcgcgggacggacgagatcgtgggcctggtgggcgtgggcgagcacccggacctctttgagaccgagctggtctacggcctgctggacgcctgccgcggccggggctacaccaaggaggcggtgactctcgcctccgacgcgttcctgcgctgcgagggcctgccctatctgatcctgaccgccgcggacggcgacggccccgccttccgcgtggcggagaagtgcggcttcctgctctacgagcggcgcgtgcgcgtcggccgccgcctgaccggcatgcccggcgaggcctacgcctatttccgcaaatactaacaaacaaaaaaaagaaggcttcgccagtagcgcgtgcacttgtcaagcaaaagtagacacaggaaaagcaaatttaagggaagccctgttcggtcctgtactgaagagggcttttgtaacccaaggctgcggcagggcgatggcgattgaagaaatggacatcgtcatccaagagagcaggaacgtcgttggtatgggctagatcgaagtcaagatagagttcttccttcatccagccattcaaagcctctataatgggattgtccgtgggcgttccccctcgcgacatagaacgaagtatgttatcattgtggtgggcctggcaaaagcccttgaagagtagacagctccctggccggtgtgtaagactacctgggacgtctgcaagtatggtcatgtcggagaccacgagctgaagcggtgcagcagcgttccagtgtcctcttacctgattggggaatacgatgctttcctctccagtccgtctataacgtccttttctggcccttgaatgaatacctgcagccttacaacacttgtgggccagattgtgagaaaacacccccccgtttccaaagacacatcgcgagccagacgatgatccccatgagaaggatgcttttcatgggcagcttgcagcaaccgggtcagttcctctctgtctctttcatagcggttcattttcccttgtcgttgccgccacttgtagtagccagagcgatttacacccatgactcggcatagaaaactgaccggatattttccttttttcctctttgctccatttccgatgtggtgtccctttctttcccatttccttccctcctttttctctgattttactacgaaaaaagtagacactcacacttttgtaagtgtctactttcattttacaggtgcacttcgccagtggcgaggccttctttttttattctgcgctctcctcggttgcccggtcgcgcttgatctgcacttggaggatctcgtccagctccgggcaggcgcgccgcagccgcaggggcatgccggtcttgctgtccaggaacgcgtgggtcgattcgccggccgcgcgctcctggccggtcgcggcgtcctccacgcggtaggccacggagagcttgacgccgttgtaggccgtcaggcgcacgcggatgcgcgcggtctcgccgtagcgcacgggccggcggtacgcgcaggcgacggagaggacggggcttgcgatcccctccgcctccagccgcgcgtagggcaggcccacggcctccatccactcggcgcgcgcctcctcaaaccagcggatgtagttcgagtggtgcacgacgcccatctgatccgtctcgtaatactgcaccttgtgcagggttccctcttccagcgcgctcatgcgccttccccctctccggaaaacagccgctgcgcatagcctacggaggccatcgcgtccttcccatagaagtccgcgccgatgcggcgggcgtattcctcgttgagcaccgcgccgccgaccatcacgcggcagtccggcgcctcgcgccgcaggagcgcgatggtctgctccatgctgcgcacggtcgtcgtcatcagcgcggaaaggcccaccaggcggatgccctgcgcctgcaccgccgcaagcaccgtctccggcgcgacgtccttgcccaggtccaccacgtcgaagccgtagttttccagcaggaccttgacgatgttcttgccgatgtcgtggatgtcgccctggaccgtggccaggaccaccgcgcccttcttctccggcgcgccgcccgcgcgcgacatgtgcgcctgcagcagggcaaaggccgccttggccgcctccgcgctcatcagcagctgcggcaaaaagagcgtccccgcctcgaaccgcgcgcccacgcggtccagcgcgggcatgagctgtccctcgatgacgcgcagcggcgcctcgcccgcgtccaggcaggcctgcgtgcaggcgagggccgcgtccttgagcccctgctccaccgcgcgggagaggccctccgccggggtcgtgtctgcggctgggcgcgcgggctgcgccgggctttgcgcgggcagcgagcccggcgcgggctgcgtgcccagcttgggctgctcctcggcggcaaaggcgatgtagcggccgcactgggcgtccgcgccggtcagcgccagcgacgcgcggaaggcgcgcatcatggcctcgctcatggggttgaggatggcggcgtccaggcccgcggccagcgccatggtcaggaacgcggcgttgaccgtctcccgctggggcaggccgaaggagatgttcgaaacgcccagcaccgtgcgcacgcccagctcctgcttgcagcggcgcagcgcctccagcgtcacgcgcgcgttgtcggaccccgtggagatggtcatcgtcagcgcgtccagcacgaggttccggcgcgggatgcccaggtcctccgccgcgcgcacgatgcgccgcgcgatctccacgcggccttccgccgtctccgggatgccgccctcgtccagcagcaggccgaccacgaccccgccgtatttcttggccaggggcaggaccttctccagggactcgcgcttgccggacacggagttgagcagcgggattccgttgcagcggcgcagcgccgcctccatggccgccgggctcgcggtgtcgatctgcacgggcaggtcgcaaacggcctgcacggcctgcacggcctcgggcagcagcgcctcctcgtcgatgtccggcaggccgacgttgacgtccagcacgtccgcgccgcgctcggcctgctgcacggcctcctgctgcaaaaggccgatgtcgcggctgcgcagcgcgcgcttgagccgcggcttgcccgtggggttgatccgctcgccgatgacgatgggcgcgcgcgacaggtccaccgcgcggctgccggaggtgacgaccgggccgcccgccttctccggcaggggctttggcgcgatttcccggcaggccgcggccatggccgcgatgtgcgccggggtcgtgccgcagcagccgccgaccatccacgcgcccgcgccgcagatctccgccatcgccgcggcgaattcctccgggctgacgtcgtagtgcgcgacgcccccctcctcccgcggcaggcccgcgttcggctgcacgagcaggggcaggtccgtcgccgcgcgcagcgccgccatctgccggagcatctcccgcgggcccaggccgcagttcatgcccatggccatgacccccaggccctccagcagggccgcgacgacctgcacgtccgcgccgctgagcagacgccccgtctcgtccagcgtcacggtcgcaaggaccggcaggcccgcctccttggccgcgaggaccgcggccttgagctcgtaggcgtcgctcatcgtctccacgagcgccaggtccgcgcccgccgcgcggccgccctccgccgcctgcgcgtagagggcgaccgcgtccgcaaagtccaggtcgccatacggccgcaggagccggcccgtgggcccgaggtccagcgcgaccaggccccggcccgccttgcgcaccgccgcccgcgcgatctccacgcccgcgcgcacgacggcggcggcgtcctctccatatttcagagcgttcgcgccgaacgtgttcgtcgtcacgacgtccgcgcccgccgcgaggtacgcctcgtggatcgcctgcacgtcctcgggccgggtcaggttccacgtctccggcagctcgccgggcgcaaggccccgcgcctgcagctgcgtgcccatcgcgccgtccagcaggacgatgcgcttgcccaattccttcagcatctctcttcctccgattcgtcgttgttcttctcccgccggaaggggcagtccctccgcgcgcaggtcttgcaggggggcgcggggtccggcgcgtccgcccggcccgcccccgggggccgcagcccctgcacgtagagcagggactttgcgggcacgagcatcccggcgccggttccggccacgcccaggcgccgccgcgcgtcgatcaggtccagcagcgcctgctggccgccgagggggaagcccgcgtacccgggcgcggtcgccgcgccccggcacaggcccgccgcctccgccgcgccgcggaagcagatcacatcctgctccgacgccaccgt

SEQ ID NO: 3758 - DNA, 9571 bp, Unknown
  16S sequences of unknown bacteria
ccatactcgcgacggggtcccggatatataaccgcggaatgacgctcgggggcccggtgctgagaatcacctattcatcctttgccgagaacattatcggcgtgaaaatggtacactacccggacgacggcgtgaagcgtccggagtttgagcttgagcgcgacaagggctatatcccggagataacgatcggcgacgacacggcggttcttgtctccggaaagacacgtgttgagataaagctccattctgactggcagatcgattatttctacggggacagaaagctgacctcctcgcgcggacgaacgacatcctatatcgtgaatgaccgccacggcgcggacggcggcttcaacccgcgattcttcgaggcgataccggagcacccgtcgtatctgcgcgagcagctttcgctcggcgtcggggagtgtgtctacggcttcggcgagaagttcactcatttcgtcaagaacggtcagacggtggatatgtggaactcggacggcggaacaagctcttaccagagctacaagtgcgtacctttcttcctgacgagcggcggatggggcgtgttcgtgaactcgagcgggaatgtctctttcgaggcgggctccgacgtcgtgtcgaagatcagcttcactctcccgggcgaggagatggagtattttctcatcggcggcgcggagccgaaggatgtgctgcgttcgtacacgtcgctgaccgggcgcgctccgcttgttccgagatatacgttcggtctgtggctctcgacgtccttcacgacagattacagcgaggagaccgtcaacagtttcatcgacgggatggaggagagagggataccgcttcaggtgttccatttcgactgcttctggatgcgcgagttcaggtggtgcgactttgagtgggacaggagacagttcccggatccggcggctatgctgaagcgtctgcgcgaccgcgggctctctgtctgcgtgtggataaatccgtatatctccgggctgtcaacgctctccgacgaggcggcgcgcgagggttatctgctgaaaaacaggaacggcgggatattcagaactgatttctggcagccgggaatggcgatagtcgacttcacgaacccggcggcgcgcgactggttcaggcataagataacagagcttctgaagatgggcgtgacgaacatcaagaccgacttcggcgagaggatatcgacagatgtcgtgtactatgacggctctgatccggagctcatgcacaatatgtatacctatctttataacaagacggtgtatgaggcgctgaccgatttttacggcaaagataaggcgtgcctgttcgcgcggagcgctacggcggggtcgcagagattcccggtgcattggggcggcgactgtacggcggagtattcgtcgatggcggagacgctgcgcggcgggctgtcgctcgggctttcggggttcgggtatttcagtcacgatatcggcggctttgaggctacggcgtcgccggacgtgtacaagagatgggcggcgttcgggctcatgagctcgcacagcaggctgcacggaagcacgtcctacagggtgccgtggctgtttgacgaggagtcggtcgacgtgctgaggttctttacctgccttaagggaaagctgatgccgtatatatggagtcaggcggtcgcggcggcgcgcgaggggctgccggtcatgcgggcgatgctgctcgagttcccggaggatcgggtctgccggacgcttgacacgcagtatatgttcggtgattcgctgctggcggcgccggtgttcgatgagagcggagaggttgacgtgtggctgcccgagggcaggtggcatgacgtcataaccggtaaggcgtatgacggcggacactatgagaggttcgtctgcacacacatggagataccgctcctggcgcgtgagggcagaatcatcgcgtggggcaattttgagcggaatttcgactatgattatcttgacggcacggtgttccgcgtctataatctgcctgagggaaagacagcggaggcacgcatatacgacggcgaagggcgggaatattttgtcctgaccgcgaaaaatgagggcggagtcgtgacctggacgtcgactcctacggataagcggtttggtgtggaagttattttcgactgaacagaatagaaaaggcacgctttcagataagctgtgccttttttatgtgagaaacgaactttttgaaagaattttccggatctgcacgccgcgtttgccgcacgttagtagtgtgagaagtgtctggcgatattaatcgcttatgtctgaagtttgagaagaagagagggtgcagggggagaggaaacccttttcaaagggtttcctctccccctgcaagctattactttttgctgtctaaatatctcttgagcgctgctctcatttcgactgctttgtcttcgggagcggtcgggttgcagtgggcccagacgccggtttcgctggacgccatgaactgctgtttgttggcggcgcggagcggcgggtacatttcgatgtggaagtggtagatttcgtcgaggtcggggtagcgggggttgtcgttgttgacgggggcgttgtgcatgcacatcatgtacgggaagacggggcgctcggggaagaggttgtcgtacattccagagatgtcgcggatcatctttccgaggttgtccttttcgcggtcgttgaaatcggcgatggtgggcttgtgggacttggctacgatgtagatgccgtaggcgtagtcggcgaagaaggggatgtaggcgatgaagtcttcgttttcatggacgattctgaggttgcaggtctcttcttctttgttcatgcggcagaagaggcattcgccggtttcgtcgtggtgctctttcgcggcttcgagttcgagttcgatcttcttcgggacgaccgagtagccgtagatctgaccgtgcgggtggggcatggtgactccgacttcgtctccgcggttttcgaagatgaagacgtatttgatttcggggtcctttttcattaaattgaagcgttctacccagaggtcaacgagctttctgatgtgctcgtcggagagctccttgagggtgccgtggtggtcgggggagtagaggacgacttcgcatttgccgtgggactttcttactttatagaagtcggtcgcgacgtcgtcgggttccggcgggttctgggagagagcggggaaatcgttgtcgtattcgagaacgtcgaagtggtccgggactttcttgtgcgggtccttgtttgagggatcgggacagaaggggcaccagtctttcggcatctggggacggttctgacggttggaagcgaccattacccagtctttgatcatcgggttccatctgagttcagccatgatatatctttacctctttagtattttattttttccgtctgttcacccgtcggataaagacgaagcggcggtatatgacggtgaatcgggcggcactcagtatattatatcacagaagcgcgacttaaacaatataaaaattgaaaatttctacggggcatgttgcacaaaattcagttatccacttgactttttattcgctgcgagttataatagataaagaattcaaaagagggaaggctgaatttgccatccgcggggatagtcagagatagataatataaaaaacagattaagtacggagatgttgaaatgccggaaaaaaagaacggcgccgtcagggtgctcgggagggtgctctggtacgcgctgatcgctgtaatggccgcggcgatcgcggtctatatatgcggcgtcatgagttatgacgcggcgattgaggtttttgtcgacggggaatctgtcggctgtgtttcgtccatgtcggcggtcaggggaagagtcagactgcttgagtcggagctttccgaggcggcgggagagaggtattctctggcgggacgcgtcacgttcggtgtcactaatgtccgtgagccggagtatcttacatatgacgagatcgacacggcgatcgccgtggcggtcgacagggacttcgaggacgcgtatatgctgtatgtggacaaccgtatggtcggcgcgtacgctgaccgcgaggcgcttgaggggcttataagcgatatcgaggacgatatacttgagtccgggaacgacgcttacagtgatgtacggataaataatcatataaggatcgaggagcagccgtgtctcaggacgtcgctgatgtcgcttgaggagattgacggtcttatcaacccgatcgtcgagtatgacgcggagatgacgtatgaggtcgccgcgttctccgcggcgggcgcgcctgccgctgccgtcgatgatgacacggatactgataatgttacgcgtatcaccgcgttttcggctcttgcgccggaggacgacgcggtcagcgatacggcggctgtcgctgacataatcgacccggacgtcgatttcggcatgatacgtcaggcggctcctgagaacgatttcacgctttcctacactttcctgagtaccgagaccgtgaacgagatccttcgctttgagacgagatatatagacgacgaggagagatacacgggcgacgacgaggtcgtgagcgagggttcggacggttcgcgaatcgtgacgtacgagataagctatgacgcggacggaaaagaggtctcgagacgcgagatggcggtcggctcgtatgtatcgcctgtagagcgtgtgatcatccgcggcgttaaggagagaccggagcctgtccctaccggaacgttcatctggccgtgtgacacgtcgaaggatatatcctccggctacggcggacgcgacctttacggttcgtatgatttccacctcggaatcgatatcccgaacgacgagggaacgcccatctacgcggcggacggcggagaggtcgtctgggcgggctttacgccttcctacggcaatcacgtgcgcatacagcacgacggcgaccttgtgacgctctacgcccacatgaaggagctcaaggtgtctgtcggcgacaaggtgttccagggacaacagataggcataatgggacacacgggcgcggcgtacggaaatcacctgcactttgaggtgagacacgggacggtcacgaccgacccgatgaaattcctgccggagaccgacgctgtgatctactggtgacatgaattgaatagcggcaccgattgttgatatgtgacaatcggtgccgcttgtttttgtgcattgttttgcttgtgagattatatatagaccggaccgttacaaaatttgaaattgacgaagtaaatctgacaaaactattgacaaatgatttcctgtgtggtataatgattgtggatgaaaacgacgggcggcgccatatacatatgatgtccgctccggatcataataataatttgtcaggagatatctgaaacatgaaaaagactaagataacggctttccttcttctcgcggcaatgctgacgtctgtcgcttcctgcggtgacacgtccgcgtccggaaacgagacgacaacgggcggcggagacagcgctgagacaacccctgcggagaccggacgcgactcagtgtccgatggcttgccggcaaagaatttcggcggcgcgaaattcacgatactcgacagaaccgattatgtctacgagttcgaggctgaggaagagaccggcgacctgctgaacgacgcggtctataagcggaatctcgctgtcgaggacagattcgggattgatcttgtctcatatcctctgaactgcacgtggggcgaccaggcgacggcgttcaacaatacgctgctctcgtcggtcatggcgggcgacggcgcgttcgatcttgtggcgggctacgcggcgaccattccgggaatcgtttcggaaggaatattcttcaactggagcgagcttgactatatcgaccagacgaagccgtggtggtctgagcttgtcgcggaggagttgacaatcaacggcaaggatttcatgatcaccggagacatctctcttgctctctggaagggcatgaactgcatattcttcaacaagaggctcgcggagaactatcagaccggagacctttacgcgcttgtgaaggacggaaagtggacgtttgacaagatggcggagctgacaaaggacgtctatcaggacatcgacggcgacggcaagaagtctaaggacgattcctacggaatgctgatgggctgggcgacagaaatcgacaacatgaaggaggcattcgagatccacgtcaccgagaagggcaaagacggcttcccggagataacgcttgtgaacgagcacacaatcgaggcggtcggaaagataaacgactacatacacaacaacgatggcgtgtacgcgaacggcgacggagacatccgcacgcagatctacaatatgttctcgaacggtcagggtctcatgtacacagcgacgctcggcaagtcagagcagctgcgcgcgatgaacgatgatttcggcatacttccgtatccgaagtacgatgagaaccagaagcagtatcattcgacgtcacttgacgagttctcgctctttgttctcccgattgacgtgaaggacaaggaaatgtccgcgataatcactgaggcgctgtgcgctgagagctacaagaaggtcgttccggttttctatgatacggcactcaagacaaaagcggcgcgcgacgacgcgtccagtgagatgattgacctcatccgcgacaacctgacttttgatttcggatatctgcattcgaactcggtgaacggcgtcggccatatgtttgtcaactggatacgcaacaacaacaataatattgcgtcggcttacgacaaggcgaaatccgcgaccgaggagaagctcgcgaaggttcttgaaatctacagataacaaaaaacggcaggactccgccaagcggagtcctgcgtctgctgtcataaatcaaagaggctgtcacgtgagtgacagcctctgattttcggaaattattcggtaacggtttcggtctcgacagccgctgcagcttcagcctcagcaagcgcagccgccttcgcgatctcgagttccttattgtaagcgcttatgacagcctcctcaaggacacctctgaactgcgcgttaatcgggtgaacgatgtcgcggtaagagccatcgggattcttgcggctcggcataacgatgaagaatttgtctctggcattgataaccttgatgtcatgcactgcgagctgaccgtcaaaggttacagaaacaatagccttcataggtccctcatcgaagagcttcctgactttgatatcggtaatgaccatttttgtttcctccttaggattgactgtattgtttttgaaacctgcggtgatggcactggatatcggtgctctgaacccgcgtcgccatgcgtgccacctgccgggctccgggaccagatccgtattatctgccggtggtgatctctcggaaacctgacaatattatacacccgaattattaatttcatgcagtatttttttgaaatttatgcggcatgcgcgaaagatttatttgaactattgcgggatgaattgtgaatgacacgccgcgtcttctgattttacggcgcttttacataaaaatcgaaaagatatccgcggcgccggggaatgtataattattcatacccgccgccgctcttttttgcctgaaattttttatcggaaatttcgccgcgcctattttatttttcacagaattgtggtataatagtcctgtgggaaaaaatgacatgacctttcaggagttgatataaatgtacacatcatattcgggggagcgccttggggagttattctcggtcccgcgctccgtttatttcataggtatcggcggcatcagtatgtcctcgctcgcgcatatcgcgctcgagcgcggctgtcatgtcagcggctatgaccgcgtgccgtccgcactgacagaagcgctcgaaaaatgcggcgtgaagatatattacgagctcgacccgtcgcacatcgacgatcaggacgtgatagtctacaccgccgcgataaagcccgacaaccccgagctcgcgagggcgcttgaatacgaccgcgccggtgagaaatactgcgtctaccgcgcggatttcctcggctggctgatgagcgggtgcaagaaccggatcggcgtcgccgggatgcacggaaagagcacgacgacggccatgctcgcccatatctttctgtcggcgaagctcgacccgacgatagttctcggcgcggtcatggacgagatcggcggagcgtaccgcgtcggctcgaaggacacgttcatcatggaggcgtgcgagtatcaggattcgttcctgtccttcacgccgaacatcgcggtgatactcaatattgacctcgaccacaccgattatttctccggactcgatagcataatagattccttctcgaagtacgcggcgatcgcggacgacggatacgccgtctataactccgacagcgaaaacgtcctgagcgcgatgcggaattataaaggaaagcgcgtgaccttcggacttgaatcggacgctgttttcaccgccggaaacatagtctttgaccacggacgcgcggaattcgatatactgaaaaaaggaacgctgttcgcgcatataaagctcggcgtcaccgggcggcacaatatactgaactcgctcgcggctgccgcggcagctgatatctgcggcgttccggcggaagccgtcgaaaaggggctcgcgtcatacaggggagcgaaacgccgtatggagtaccgtggcagcttcacgacggcgtccggagcttcagtgccgctctttgacgattacgcgcaccacccgacggagatccgcgcgacgctctccggcgcgaaggagatgggttataagcgcgtgtgggtcgttttccagccgcacacctactcgaggacggcttcgctgtacgatgagttcgcgaagtcctttgtcggcgtgaacgcggtgttcgcccagatctacgcggcgcgcgagacgaacgagtggggagtcacgtccgaaaagctcgcggaggacgccgggggactgtatttcccgaccctcggagaaatcgcggggtacctgagaaaggagcttcgcgacggcgatatgctgatcgtgatgggcgccggcgacgtcataaagctcgacgatatcctgcttgaaaataaatcctgacgaaaagacctccgggcgcttcggaaagccgcccggagattcttgtcttccgaaaaccccaggctaggtcgagggttcagccaaggcgatgcctataagtcttgaaaaagatatctccctttgatatattatatgcggctaccaactgcacaaaaaatatcaaagggaggtcatcacaaagtgagtgaggacatacatagtttatcacatatgaagtggaattgcaagtaccgtaaagtatttgcgccaaagtttctaaggcggtctgatagaatacgagaagcgtggaaacattatttaagatcgtccgagccggaggcagaagcag

SEQ ID NO: 3759 - DNA, 12367 bp, Unknown
  16S sequences of unknown bacteria
aaagtagccatttttcgtagaaaaatgagcggatttgaggtgttttaggattgcgggagcatgaaatgcggagcaatccgtgtatcatagtgggcaaaataagtttgtaaaggaaaggagacggttccttgagtgaaaaattcaattctgtgcacggctgtggctgtgaaaagccgcagcccgtccgtctgtgtgcactgcggcagaaggaggtcattaatatttgcacctgccgttcccttggctgtatcacggatctggagatcgactgccgcaccggctgcgtgcttgccatcatcgtcccgggtcccggtcgcctgtgctggtttctcggacgcgattttgaatacgtgatcccatggcggtgtatcgtccagatcggaagcgatatcatcctcgttgacgtcaaggaggaggactgccgaaaaaaatgcgaataagtaccacctttgcgctgtgatcagccggtcagatagctccgcatgcacttcaacgcatttttttccagccggctcacctgtgcctgcgaaatcccgatctctgatgccacctccatctgtgtccttccttcgtaaaaacgaaggcgaatgatttgcttctcgcgctcatcaagccgctgcatcgcctcatttaaggagatgctctccacccagttttcttcccggttcttcttgtcactgatctgatccatcacatacagcgcatctccgccttctgtatagaccggatcatacagacttaccggactttggatcgcatccagggcatagaccacatcctccttcgggattccgatctcccctgcgatctcctcaatagtcggctccttcagatatttttttgtatagctctccctggcgtagatcgccttatatgcggtatcccgcagcgagcggctgacccggattgaattgttgtcccgcaaatagcgccggatttcaccgataatcatcggcaccgcataggtcgaaaatttcacctgaagacttgtatcaaaattatcaatggctttcatcaggccgatacagccaatctgaaacagatcgtccacattttcactgctgcttgcaaaacgcttgattacgctgagtaccagccgcagattacctttaatgtacagctcccttgcattctcatcgccctttcggatccgttcgaacagaaattccttttcgtcctccgtcagcaccggaagccttgacgtgttcaccccgcatatctctaccttattaagcgccatgtgatcatcctcctgaaactgttcctctatctaagatgattcacatttcgcgccccggctatgcgcggctttctgaaataaaaaaacttttccgccttgacaatgctatacctcgagccgcacaatctctcttcgcagtcgcttgatgatacgtttttccagcctggaaatataggactgggaaataccgagcagatccgccacttccttttgcgtcttttcctctccgtcccgcgtattgatcccaaaccggagctgtacgatcatctgctcgcgcttggagagcttcccgatcgcatgctgaagcgcactatactctgcctctgtctccatgtcccggtaaataacatcctcatcggttcccagaatatctgagagcaacagctcatttccatcccagtcgacatttaaaggctcatcgatcgagacttccagctttgtcttgctgttgcgccgcagatacatcagaatctcattttcaatgcagcgggatgcataggtcgccagctttatcttcttgtccggattgaacgtattgatcgccttgatcagtccgatcgtgccgatcgagatcagatcctccacaccaaccccggtattatcaaattttttcgctatgtataccaccagtcgcagattatgctcgatcagacggctgcgcgccttcgcatcgttttcctgcccgagcatcgcaatgagctgctgctcctgctccggctctaaaggcggcggcaaaacgtctgtccctccaatataatgcacctcatttgtgcggcgcagcaggacatctccaaagcctgccgccatcttcagctgaaaacgctggggcatcgcaatctttactatcatactgatcactcctatctttccggccaatcctttttatctgccgccggcatgttcgggatgtaaaataatcccatacgcagcctttaagctaagtgtcgctgcactgactgcgagcaccggacgctctgtcacgacggtctttcccccgtataccgtctccatccgatccgcaatcactgctttcatccatccgctctttccgatcgagtgatatggaatcaggcacatgccccgctccgtctcccacccggctgtcagcagcttttctgcctgcccgggtgaaaggatactcactgctcttccggtaagcggctctgtcagctgatttccggtatcaacaagtcctgtcatctgtaccgtcgtcgcccctacggtgacagatacacatgcctgactgtctgccctcctgttttgcctgctgcgtcgtcgaaagccctgatacaggatgccagcggctgcagctgtcccggcaagtatcggaagcccgtaccattcattcagtgcctccagtactccgccgaagcaaaaggtgacaaatatcagggtaaagaactgcgttccccaccaccgaagcggccggtgctgtattcctgccacacaaataagtgcagacagcatacacagcggccataaatccgaccatccaatacagacacagaccgtcatcaaaaatgcgccggtcgcaccgcccagtatgatacgccgcaaatggaatgcctgatccatcaccagtgccgacagactaagaagtatacaatccgtcaggaagtgttccagaaaaaactggtcagcgtaaaattcgtaatacacaaaacaccccctgcggtgcaacttgcgataagtatactccgcagagggtgtaatttttgtcaaaaccgggtccggaattgactgttttcatttacaggattcgacatctgtgtgcgccttctccatccatccctgtagctttatattgccagatgtgctttgcgcagtgccggacgaagcgccagatatacagccgatgccacaattacggacagaaccgcgttgattgaggtcgctgtgatgttccatgccagcgtcacatccgccgctgcctttccaaggataatgcgcttgtaaaaatagccgaacagcggatcaaaaatcacattaaacaccagtccgcagaccgatgccagcacagtccagcgcgccacataggcctggtccgtcgcctgatcgatttttccgatccgatgggccaccagcccggtaatcaatccgatacagaacttcagaataaaggttttcggtgcatacacaacatagattggatcaagcaagtcgccgattgtcattccgatcgcaccgccgataccgccccagacgccgccaagcacaagtgcccccagcacacacaccgcatttccaaggtgaattgacgttgcgtctccacccggaagggtgatcttgatctgaaggaatgtgaacacgacatacgaaagtgccgcaaacattccggtcattacaattttctgcattttctgtttttccatacttcccactcctcttgatttgctatctttttataccagaagcagtatacctccgtgtggcatgaatgagaagtgccatttctatgaaatttaatcagtccagtttatccaaaaataaaagcacacatatttgaagtctccttcaaaacatgtgtgctcttttttcacgcattgatcttagcttctctttaagaaatccggaatctggatatcccgctcctgcaccttgctggtcggagtccgcatcgtagtcgatgccggacgggtctgctgtgccggtgcggatgtcgcaggcggtacacgatgaaatgtcgaagatcctgccggcttttccttgcggacaaaactgaaatcctgagaggacgacatactgcctctgcgggatggcttctccggctttgcattgacatcctcaaggccggtcgcgataaccgtgatgctcgcctcatctgcataggtgtcatcgtacatcgcgccgaaaataatattggcattgtcgcctgccatctcctgcacatagcttgccgcatcgttggcatccataagggaaatgtctccggaaatattgataataacatgggaagcaccctcgatcgtcgtctcgagcagcgggctggcaactgcctgcttgactgcttcgagcgccttgtcgtcgcccttggcctgtccgataccgatgtgtgcgatacccttgtccttcatgactgtctgtacatctgcaaagtccagattgatcagcgccgggagattgatcaggtctgtgatgccctgaactgcctgctgcagcacctcatctgccttcttcagtgcctccggcattgtcgtccggcggtctacgatctcaagcagcttgtcattcgggatgacgatcagcgtgtcaacattctccttcagacgctcgatgcctgcaagcgcattattcatgcgtgtacgggcttcgaagcggaatggcttcgtcacaacgccgacagtcagaatacccatctcctttgcgatccctgccacgaccggagctgcaccggtaccggtacctccgcccataccacaggtaacaaacaccatgtccgcaccctgaattgcctgacggatatcctccgtgctctcctcagctgcctgctgacctacctccggcttcgcgcctgcgccaagtcctttggtgaccttctctccgatctgaatcgttgtcggcgccttgcacatgagtagcgcctgcttatctgtgttgatcgcaataaactcaacaccggcaattgtatcctcaaccatgcggttcactgcattattcccggctccgccgactccgattactataatcttcgcagcagattccgtttcgtttgacataatctctaacaccgtgtttcctcctttttgcagcgaagcattttcttcaccatcccgtggcttacgctccgccctgctcttccagtaaagcggacattcataatccgcttcgctacttgctcatgaacgcagtcgcttcgcgatctgcgttcaaatacttcccgtccatgggaaaaatctgtcctcatgtgaagcaaatcttcacattccatcggtacgggatcgcaccgccgggcagcatacccgatgggagtcaatctacggtatcgcatactatccccaccgtactatctcttataatatagtcattcgcaaaattaatcaagtaaattttcaaaaaagttataagcagctttactgtaccagctcccctgtgtccggatcaaaccggttcatatacgcatccacgacatatccgtcagagtccacactgcagccggataccggatttccgtttgcatcgacgactgtcccgttctctacatgaacattgtacacaagcgttcccgaggaatcaaataccatgctgattgtcgcagacgaatctcctgcctgatcttggctgccatccacgttatcatcggaagaagccgcaccgttgtcgtccgcgttatcatcggaagaagccgcaccgctgtcgtccgcgtcatttccgactgtcgcatccccggccgtcgatgaatcagagcccgtcccggcatctccggctgcggaagtatcatctccgccggtatcgccagacgtgtccgactcggtctctgtttctgtctcaggctcatcggaaggtttataaacgatatcttttgaaggaaaactctccaaatgcagcaccccatttgcattatctatcttatttaagatagcgcgaaggtttgcaattttttcttccatatattcattttttcctaaaatcgctgtaaccttaccaatatatacggtaatatcgccattttcatcaaaccgaatttcctgtgcttccagcccttgatatttcagcaattgtgttatacttaaaattgctaataactgctcattgctagcaattgaaatcttctgatacagcaccggcgtatctacatcagctccggtcacgaccggaactccgtcatagacctcatccgtaatggcaagcaccagcccgttttcatcaaaataggcgttgctccctttatttacataggccaccggatcccgctccgatacatctacccgcacttcaaacggagatttcatctgtaccttgatggaatccagaaacggcagtgtatccggaatcgtcccgttccggtatttccactgaagatacagtgtatttttcatcagaaacccgtccagcagaccatctgaaatctcttctgccgcgtgacggctgttgccatatacattcaccgtccgtacctggaaaagcatcataaaccctgccagcaccacgatcagcagtaccagaccgcccagccggaccgccctcttttttcttttgtttcttctcatacctggtcagttcctttttttaatctcttaccttgtctcggattcgtgtctccggatattcgcccccagaaggcacagatctgctccgatatcctcatagccccgcgaaatatattccagtccggagatctcgctgatcccttccgcaaagagggccgccacaacaagcgccgcgcctccgcgcagatccggtgcacgaagtgaagcggcatgcagccgcgcttttccttttatggtggccagattcccctgcacgaaaatctccgcgcccatcttctgcagctcctgagctgtacggaaacgactctcaaacaccgtttcccatatcctgctctgcccgtcggcccgtgcacagaccgccatcaatggcgactgcagatcggtcggaaatcccggataaggggccgtccggatcccgggtagcgcttttggacgatgcttcatctgaaaatacatgccgccaagatggtctgcccgacatattccgcccatctgcaatagtactcctgcaagcgtctgatctgccgcatagttttgcaaatgcagttctcctcccgcagctgctgccgcaaacagataggtcccagccacaatccggtccgatgcgatccgaaaccgcaccggatgcagacaccgcccgccctcgatcacaatcgcatcgcccatcctttgcagctttccgccacgcaggttcagaaaacggatcagctcatcaatctccggctcctgtgccgcatgctcgatccgcgtctccccgggaaggagcaccgcagctaatatgctgttctccgtcgcacccacacttggcaggccaagacggatcgtcccgcaatgcagcctgttcccttctgccgtaattgcctccccctcacaggaaaaggcagccccaagccgctctaaagctgcaagatgcaagtcaatcggacgctttccgatcgcacatccgcccggtttgggcagcaccgcttttctcattttaccaagaagtgcgcccaaaaacaagacagaagaacggattcttgccgcttctccgccgataatttcatatccggcagccgtttcggcatcaatacgaactgtttttccgctctgattcacctggcagcccagcttgcgcaggatatgtaaagtatcctccacatccttaatctccggacagttttccagttcacacggtccttctccaagcagacaggctgccaaaatcggcagcactgcattcttggatccctgaatgctgatttctccctgaagcggcgtcccgcctgtcacaatcagtttttccacaaattccggccttcccgccaaacggcacacgccgcagcataacaggtgctcttagttatattttatgcacgtgatttcataaggtgccgcatgccagtcgttttcgtacgcttattttctccaccggctcactgacagtgcaagccccatctcggcgagcagaaaaagcatggacgtcccgccgtagctcacaaaaggaagtgtaattcccgtattcgggattgtattcgtcacgacagcaatattcaaaatcacctgaatcgcaatatgacccatgatgcccgccacaatcaatgccccaaaaagatccgccgtatgcgtggcaatcaccatgaaccgccagatcagcaccgcaaacagcagcatcagaaacagtgccccaaaaaatccaagctcctcacagatcaccgaaaagatcatatcattttgtgcctccggcacaaacccaagcttctggatgctttttcctatcccgcgtccgaacagccctccggagccgatcgcatacagtccctgcatcgtctggtaccctttctcatactgctccggatgccgccagatcgccacccgttccagccggtatgcctccagactcaaaaaaatgccgaggaaaccggagccggcaagcagcatccaaagaaacggcagatatcttggattagagataaacagcagaatacccgctataccgagaataataacggcagtgcttaagttatttgtcccgaccaggcccacgatcggcagcacaagcgcaaatactgcagcgctgcgccaccagccgactttaccctggatacggctcaccgcagaggcgagcagcaagatgactgctggctttgcgtactccgcaggctggaaggaaaacggtccgatcgacagccaacgtctcgagccattgtaggcatccccgaacagcagcaccgctccgcttaaagccagagaaatgagatacgccgggacggcgaaccgctccagcgtatgataatcgagtcttgcgatgccgtacatcagacaaaagccaaacagcatcgcaaaaagctgtttttttaaataataagcagcatcaccaaaacggacctgcccattatatgcactcatactgtagagaaccagcaggccaaagcccgccagcacaaaaacggtcagaagcagcaacccgtctgtttttccggcttcttttcgcaaacgctcactcccgtcacagattgtttaccagttccttgaacatccttccccgcacctcgtagttcggaaacatgccccagctcgcacacgccggcgaaagcagcactgcatctccctttttcgcgtgatccgcacagaactgcactgcctcggcaaggctgtccgcaaatacgatatccgtaaagccaagtgcctttgcctctgctgcgatcttctctctcgtctgtccgatcagcaccaaatattttaccttcccgtcaaacgcctggatccattcggaataagaagatcccttgtcatacccgccgccaatcagcaaggtcgggcgatccatcgcctgaatacccttgattgcggcatccggattcgttccctttgaatcattgtaataaacgacaccatttttctcagtgacaaattcgatccggtgctccactgccttaaacgcacataccaccttgcggatcacctcaagcggtaccccgtaagcaagcgccattgccgctgccgccatcacattttcatgattgtgacgtcccggcaggttcagctctgccgtccggcaaagcttctgcaccccgttctcatcgcgatagcagatctctccgtcgtccagatacattcccttttccagtttatgcagactgctgaaataaatgacctttgtatgtaatgtctttccgaattcccgcagaatctcatcctcatagttcagcacacatgtatcggactctgtctgattttttgtaatcagctctttgacccgtatgtactcctccatcgtgtgatgacgattcaaatgatccggcgtgatgttcagaattgcgctgaccttcggtgcaaatttttcgatcgtctcgagctgaaagctgctgatctccgccaccgtcacagcatcgtctgtcatcttcggagccgcctcggtatacggattgccgatattgccgacgatatagacctccggatggtatgcctgcataatcgctccgagcaggctcgtcgtcgtcgtctttccatttgtaccggtcacggcaaggacatcgccctttccacattcatacgcgagctccacttccccccagatgtgaatgcctttctccttcattgcaagcacgacgggcagatcgcacggcacacccggactcatgaccaccagatccagctgttccatttctgcttccggaagctcaccaagtacaatacggaccttacttcctgccggaaactccgccagaagtgcgtccttatccttttctgtatttccatcatagagaattacttctgcaccctttgcgagcagcagatgtgccgctccgattccactgatgccggttccgaatacgagcacgcatttctttgtcagttccattcttcttcctcttttctgttcttacatttcgcagctaattcagccctaccagaccaattacacacaaaagcgcagtgattacagtaaacaccgttacgacccgcgtctcggaccagccgcagagctcaaagtgatgatggatcggcgccatcttaaagaaacgctttccaccggtcttcttaaaatacgtaacctgaatcatgacagagaaaatctccacccagtaaatcagtccgataatcaggataaacatcggaagccgcatcgcgtaggctgcgccagcgacaaatccgccgagtgccagcgatccggtatcacccatgaacaccttcgccggataaacattaaacagtaaaaagccgatcagtgcacccgttaccgccgctgtcagcggctcaattcctgcacccaaagtcaccgatgccgctgtaaagaacacagctgccatcgtcgtcacgccggtcgcaagcccgtccagcccgtcggtaaaattgacaccattgaccgttccgatgatcgcagggaacgcaatgaccgccgatgcaatccgcacccagtctccgctcaggaccttccctccggaaaacggaatcaggatctccaggctcgacggatcctgaatccacaggtacacgacaaacaccgccgtcacaatgatctgcccgagcatcttctgcttcggatacaggccgtctgagcggcgcagcacgaccttcaggtaatcatcgagaaaaccgatgatgccaaagccaaggatcagaaacagcaccggaatcatcttagggaaacgtccgatgaaaaacagagacgtcaccacaacgctgatcaggatgatcagtccgcccatcgttggcgtcccggcctttttcaggtgagactgcactccttccttccgctctgtctgaccaaccttcagccgctgtaaaaacggaatgataaacgggctgagcgccacgctgatggcaaatgccagaaacagcggatacagaatattcttatcaatcatttctcacacctctttttctcctgcgccgattctccggcgcatatagttcttctgatatttttcagatatctctcctcattctataccgtttttcccttcttgtacagatttttttccggacagcctatttttccgtctctgtaccggtaattgttttttcgattccgagatagggcagaatgttttcaaagatccccttcacgaccggagccgcgataagtccgccgtagtacagcccctgcggattattgatgacacacagcgcgatgacctgcggatcgtccgccggtgcgaatccgataaaggatgagatgtatttattggcacttcgcggcaatgtttcagacgtcgcggtcttgccgccgatccggtaccccttaatgtacgcgttttttccggagccgccatccacgacctgttcaagcgcgtgccttaaggtcgctgacgtctgctctgagacaatcctctccccatccggacaggaaaaaatctgtgtgagcgcaccggaggcatcacgcgcctgcagcccaaagtgcggcgtcacccgcgtcccaccgttgatcagcgagctgactgtcgcaatcagctgcacaggcgtgatctgaaacgactgcccgaacgagatcgtcgccagctccacctgcccgacattttcttttttgtgcatgatggtcgccgcttctcccggaaggtcgataccggtcttttttgagagcccaaactgatgaaaataagaaaaataacgatccacaccgagccgcagacccacatcaataaaaaccggattgcaggaattccgggtcgcctgcaaaaaggtttccgctccgtgaccgccgaccttatgacagcggattcgccggtcctccacgatgcggtatcccggacaggaaaacgtatcatctagcgtaacaacgccttcctccagccccgccgatgctgtgataattttaaacgtcgatccgggttcataggtgtcgttgatgcagccattgcgccacatctgatttaaggcatcctgcatttcggtaataccggtatattccggcaacaatgtaaacggctcgttcagg

SEQ ID NO: 3760 - DNA, 4442 bp, Unknown
  16S sequences of unknown bacteria
cccgccatgccgattctggcatgacaggcttcctgcgtggcccgcgttgcggacagtaccgtgtcaataaataattctccgggctgtaatataccgcgcgttataattggaaaccggcgtgacgcatacgccagtggcactgctctgggcgtggaccatcttcccatcgccgatatagattgcgacatggcccacgcgggtaatatccccatggacggacataataataatatcccccggcagaagctgatcccgcgccacaccgatgccgtcgttgacctgcccggccgctgtccggttcagggtatagccaaattgcttatagatatagcttgtaaagccagagcagtcaaagcccgtctccgggctggcgccagcccaggtatagggatagccgacataccgcagcgccagctcaacgacggcctgggccgtgctgttggccaccagaggccctgtgatccgcgccagcgggttttccgcgtaccagggactcacatactgataagcccgccagaacatcgccaggccctcctggcgagtaatggcggccgtcggcgccatggccccgccagtcgtcccgtagacgatctgcagccggtagagcagccccacagcctcctgggcccagccgccgatggtcgcggcatctgtaaacgctgtctccagcgctgctgcgtcggacggtgcggtccagccgcaggcggtcaagacgtttttgacgatcacaaaaaactgttcccgggtcatctgcgccgcaggctggaacgtcccgtccggatagccggagatgagcgccagctcataggcggcgttcactgtcgcgtcgtccgtatcgctgaaatggacgcccgccggtttgatctccgtcagcccggtcagcttttgatagaccaaaactgccgccgtgcagatctgcctacgggtaatgggctttgtcaggtccgccgcctgcagctcctgcggaagcaggccaagcccatagagggcggccatctcctctgctgcccaggcagagcaggtgtaattttcaggctgtgcaggcgcaggctgctctgccgtcttgcccagcagcttttccaggtagcggtatgcccgcagcagcatggccagcgtctgctcgcagctgctgttctgctgcggcgcgacggtcccgtccgtgttcccggcgacgatctccagctccactgccgccgccgccgcattgcgggcccaagtactgatctggccgcgatctgtaaaacgggccaagaccggggccgctgtatcccagccgagggcagcaaagaagctggctgtcacctgacagaattcctcgcgggtgattgtggcattgggccggaacgtgccatccggatagccgctgacaatgcccagctcctgggcgatgcagatatccgcgttgtccgtatccgtgaaatggcgggtgctggcggggtacagcgtcttgcccaccagtttagaaaaggtatgtaccaccacctggcacatctcctgccgggtcagccgctgggtcaggtccgcgctctccagcgatgccgggaggatccccgcctgactggcctgctccagctccggcagcgcccaatcatccgcctgcagagccatcgcgggcagcgccagggccgccaacagcgccaggcagagggccagggcgcaaattcgatgcaatcgtgctttcatacttgccatcctttctcatccagggtgatttgtaccgggcagtgatccgagcccatgatatcctgcaaaatgtccgcccgctgcagcgccgggcgcagccggtcggagatcaggaaatagtcgatgcgccacccggcattcttctcccgggcgtggaagcgatagctccaccaggagtacgcgccggtcaggcccggattttgataccgaaaggtatcggtaaagcccgcttccagcaggcgggtaaactgggcgcgctcttcgtcggaaaatccggcgttgccacggttcgtacccgggttcttgaggtcgatctcctcgtgggcgacattgagatccccgcaggcgacgacaggcttctttgcatccagcacggaaagatgtgcccggaaggcgtcgtcccactgcatccggaaatccagccgccgcagcccatcctgggcgttgggcgtataacaggtcacgcagtaaaactgcggaaactccagcgtgatgatccgcccctccccatcgagggccgggtcgcccaggccataggtcacagccagcggcgcgcgctttgtgaagattgccgtccctgcatagccctttttctcagcataggaccagtactgccggtagcccgggagcggcaggtcgatctgcccctgctggagctttgtctcctgcaggcagaaaatatcggcatccagcgtcgcgaattggttggcaaagccctttttgactgcggcccgcagtccgttgacattccaggaaatgagtttcatcgcgtcactccttacagacttgttattattattgtaacaaattgtaaccgtcgatgcaagcaatcttagaaaaaacccgctattttcttgcattcccgtccattttgtggtatattgtttgatatgaaactacgagtagctacagccatctgtgtctgcaagctctcccggttcgccattcggctgctgggtcggggtgggacggatatgccgggccgcctggcattgaaagtttgccctgatctgctgggtcatctggccaaagacgtgacgacactgatcgtcacgggcaccaacggaaaaaccacgacctcccgtatgatcgagcaggcgtggatcgacgctggaatctcttactttgccaataaatccggcgcaaatctgctgagcggcgtcaccgccgagtttgccatgcattccaccctcggtggcaaatgcaaattcacccacgcactgattgaatcggacgaggctgcgttcaaggcaatcagcaaatatgtcgacgcgaaggtcatcgtcgtcaccaacatcttccgcgatcagctcgaccgttacggagaagtcacgcacacgcggaacaacatcaagatcggcatcgagcacagccccaacgcgcagctgtgtctgaatgcggacgactccctgacggcatccttggccgaggaagtgcccaaccccgtcctctactacggtgtcaatacgccgatctaccgcgaccgggtgcaggagctgtccgacgcgccctactgcctgcattgcaagcacgcctatacctatgattatgtgacctacggccacctgggcggctatcgctgccccgcctgcggctactgccgtccgtcgccccgggtctatgtgcaggatgttctcacctcggatgcagagcactccgaagtcgatctggtcgccgggggcgagacgtatcgcaccaatatcaatctgccgggcggctacaatatttataacgcatgcgcctgcatggcagcagggcaggccatggagctggatgcggcgttgatctccaaatctctctcggaatttgcctgcggcttcggccggatggagaaattcgagatcggcggcaccagcctgcggatgatcctcatcaaaaaccccgccggctgcaaccaggtcctgaatttcctgacccagacgacagagcccttcctcttcgtctgctgcctgaacgaccgggcgcaggacggcaaggacgtcagctggatttgggacgtggactttgagcgcatcgccgccctgggcgaccggctcagcagtctgctcgtctccggcgtgcgcgcggaggatatggcggtccgctttaaatacgccggcgtccccgtggagaagattcaagtcatcaaggactaccccgcgctggtccaggcctgcgtccggcaggacaagcccgtttttatcatgccgacgtacaccgccatgctggagctgcggacagttatcagtaaaaactacggcttcaaagccttctgggaataaggagggggcaagatggaattaaagatttgtcacctctaccccgatattctgaatctctatggcgaccgcgggaatatcctctgcatggagcgccgcctgcgctggcgggacatcgccgtcacgacgacaaacatctccgtcggtatgccgctgaaggctgcggattacgacctgtttttcatcggcggcggccaggattttgagcaggaagtgcttttagaagacctgcacggtgccaaaactgcagagatcaaagccgccgtgaacgacggcaaggcctttctcgccatctgcggcggctatcagatgctggggaactattataagacctgggacggcgagcagtgcgacttcaccggcgcactggacctctacaccatcggctgcaccaagcggctaatcggcaattacatgttcacctgtgacgatctgcccgggcagacggtcgtcggctttgaaaaccacgccgggaagacctatcttggcagcggcgtgcgc

SEQ ID NO: 3761 - DNA, 9048 bp, Unknown
  16S sequences of unknown bacteria
gtgacccggaaggggtcacggctcgccggtctgatgtgattttctgcaagttggctgaaacaggccgccggggcacgacaggtgccacggcttgcgcaaggggcagtgccttttaaacacggtcagttgatacaggcggaacagcttgcaaattggaattacgacttttttccttttcccctaatggtttgagaacccgacgcaacgtctctgctttgaaccgtcttgacccaaagaggtcagagcggaggggcagaggcgctgtttctatttagagcagagcattctgaaacagtcgtttcgctgcacgaaaggagccttttatgcacagaaggacgcttccccgctggctgataccgctgtttttcgggctggtgctggttttggggctggtgacggtcccccaatatggccgcccgtgggacgaacggctggaaatggacatcctgcggatggatctatgggagtatgtccgggccgcgggagcggacgaaagcgcctttgcatactggcgggagcagggcaacggcaccacgtcggagctgctgcccatcagtgaaagcatcgagcgggatcacggcgcggcggcgttctatccgctggcgggcgtagtgatggacgagaacctgaccgagcacagccggatgattctatggcacggttggtgctgggtcttattcacgctgggtgcgctggcgctgtacggctgctgccgggagctggagctgtcccggggtatcagtctggcggcggtctgctttctgctgttaagcccccgcttttttgcggaggggcactataacaacaaagataccgtgctgatggccctgaccctctgcgtcctctggacggcccttcgattgatgaagcgtccgggcgtcctgcgagggctgctgtttgcgttggcgggagccttctgcgctaacatgaaggtgatcggcttcgccctttgggggctatgcgccctgtttgtgctgctgcggcagctgctccgccgtcagggcgggggcagggtttgggcggccgggctggcggcgtttttcggattcatcggattttacaccctgctgaccccggcgctgtggcgggaaccgctggcgtttttccgctatcttgtggaaaacgcgctggatttcagccggtggaagaattacgtccgcttccggggcacgaccttcctgttggggaaggaacggcttccatggtactatctgccctacatgatcgcggccaccacgccgctatggacgctgtttttgtgcgccgttggccaactgggcgcgctgaaaagctggaaaaagggctttcatggcagcgaccgggcactgggattgctgctctgctcgctgctgtggctgctgccgctgggagcggcggtgctggcccatgccacggtttacaacggctggcggcatttctatttcctctacgggcccatgctggtgctggcggcttacgggctgcacggtctgtaccggctgatggaaggcaagcgtctggcaagccgccttttgaccgttctgttgagcctgtgcatggctctgacgggcgtaggtatcgccactcagcatccgtaccagtacgcctatgagcagcccgtcgtccgcctgctgaccgggcaggacgatctggagcgggactactggaacgtcagcctcctgaacgcgctggaaacgctggccgggcaggcggaaggcgagattgtcatcgcccctgccgacctgtgggcgcaggccgggctggaaaacgccctctatgtgatggagccccggctgcggcagcgctttatcccgacggagggcgcggcggaatatgtgctgtccaatcccacctacgccttgttcagcggatgggagccgtcggaggagcaggaggaagccgtgacgatccgcgcctatggacgcacactgatgcgcattgaccgtgatcgggcatggacaaaggagcaaggcgaatgagtgaagcaatcagccgcaaactgcggcccgagacccggcagcggcttgccaaagcggcgatcgcgcttctgtttgcgctgatcttcctgctggggctgtgcacagtagacgattacggccgtaactgggatgaaaagggcgagatcaacatttaccgcatggccctgatggaatacggtgagatcctgccctttgagacgggctttcatcaggcgctcaaggccatgggggtcattcctctgtcccagagtatcgagatggatcacaacagctcggcttactatccccttgcgccgctggcctgcgacccgaacgtgaccgaccagcagttcacccactggtggcgcgtctggacgtgggcgctctttacgctgggcctgtacgccctgtacgccgtctgccgccggatgggcctctcccgcccgctggccgcggcggcggcgctgctggccctgtgctgcccccgtctgttcgcgcaggggcattacaacaacaaggacgcggctctgatggatctgacggctgtggtgctgtggcagaccctgcgcctgcgggaaaagcccacggcgggccgggcgctgtgcttcgcgctggcggcgggtttctgcaccaatacccgcatcatcggcggggcggtcagccttctttgcggcggtatggcccttctgtcgctgttgctggaaaagcacttcacccgccgcacatggcgggcggtactcgtggcggtactggggtctcttggctgctatgttctgctgaccccggctctgcttcgggacccggcggcatacctgacctacgtgctgcgcaactcctacagcttttcccgctggaacaacacggtgctgttctgtggccgggtgatcgacctttcgtgggagcgcccgccgttctattacctgccggtgatgatcgccctgaccatgcctctggtccaactggggttgatcctgctgggcggaggactcgtcctgcgccggtgtgcccgtcagaaagcctcggccctgtgcgggcaggagagctttgcggcggttctgtgcctttcctgctggctgctgcctctgctgggcatgatggtcatgcgggtgcgggtctacaacggctggcggcacgcctattttctgttcttccccatgatggccatggcgggctgggcgctggggcgcattcgaacgcatctgacacggcggacggttccccggcggctggccgcgggcgggctttgcgccctgctggccgtgcaggggacgggccttgcgctgaatcatcccttccagttcgcttactatcagccgctggtcagccgaaacgggctggagcagcggcacgagctggactactggaacgtgggcattgacgcggctcttcgctggctggaggaaaacgccccgtccgatcagcccatccgggtcacgtggacggacaaccgcacccgcagcggcgttttgagcaatctggatcactggcccgaggagcgccgcgcccggttcgaagccgtttacccggacagtgaggaaagcggctctgcctatcggatcgtgaacaccagctatgcggtgctggcgggcgaagtccttccagcggcagaggaaattctgtgccggttcgatagctacggagccatgatctgctgcgtctgcgtgccaaaggaggccgttcagccgtgagaaagaaaaaaatatccgcttcggtggttggccttgcgttgatttttacattgatttttacatggggcctttgcaccgccgccgattacggcgtatactttgacgagccgtccgagcaggagattctgcggcaaaacctgaaggagtacgccgttcgcttcggagacgggcaggcagcggcctactacgaccggctgggcgttcagcgcatttccgaaagtgtggaaaaagaccacggccagagcgcctattacctgctggccccggcgctgcggcttgccgagaccgattccgccctgctccattggctgtggcacgcctacagttgggggctgttcacgctggggctgctggggctgtacctgctcctgcgggaaatgggccttggcgtaggcccggcactggccggggtagccatgatgctgctgtcgccccgtctgtttgcggaggggcattacaacaacaaggacatggccctgctgacgctggtgctgtggtgcttctatctggccctgcggctgtggaaaagcccaacgcccctgcgggcgctgctcttctcgctggcgggcgcgctggcggccaataccaagatcgtcgggctggcgatctggggaatgctgtccgtggcggcgctggtctctgtgacggcccggaagcagtggagccgctctgcggtgctggccgcgctgacggcgatggtctccttcggcgggttcttcctgctgctgacccccgccgcatgggatgggccgctggaatattttcagtacgtcctgaaaaatgcctcgcagttcagccggtggacgggcgtggtgctgttccggggccagcggtacgatcaggcgatcgcccccctgccccgaagctatctgccccggatgatgctctacaccctgcctctgtatttcttccccctgtgcgccgtaggccagctggctgcggcacgggaatggttccgccatccgggcaagtgcctgcgggagccggagaagctactgctgctgtgcgccacgctgctgtgggcgctgtttatggggtacgtgattttgcggcagccggtgatctacaacggctggcggcatttctacttcctgtacgccgggttcatcgtgctggccgcatgggggctggagaccctgctgcggcgggcgaaagggctcaacggcgcggccatcgcgggcattctggccctgtgcatggcggcggacggcgtgggcgtcctgcagaaccacccttatcagtacgcctactacaacttcctggcccctgcggacgcggaggagaccatggagctggactactgggacgtgagcgcagtcaacgccctgcggcttctgctggactccgagcggaacgaagccctgcccctgaccgtgtccggcacggacgctttgagccatctggggctggaacaggccctttccgccctgacggaggaggaaaacgcccttctgaccgtcacggagcagccggaggacgcgtcctatctttggatgaacaccacctatggccgtatctacggtgcgaccgtcccccggaactggcgcgtcctgctggaaatccgaagctacggccataccatctgtaccgtttacgaaagaatggagaaaggaacgtggagggattgacacgatgattcgaaagctgctcaaaagcgtgcgggaatataagcccgcgtccatcaaagcgcccgtgtacgtctcgctggaagtggtcatggaatgcatcattccgctgatcatggccagcctgatcgacaagggcatcgctcagggcagtatgccctatatctggaaggcggggctggtgctgctgctgtcggcctttgcgtcgctgctgttcggcattttgtccggccactatgcggcggtggcctcggcgggcttcgccaagaacctgcggcgggatatgtacagccatattcaggaattttccttcgccaacatcgaccgcttctccaccggcggtctggtcacccgtctgaccaccgacgtgagcaacgtgcagaacgcctatcagatgatcatccgcacggcggtgcgttcgcccttcatgctgatcttctcgctggtggcggccatcggtatcgacgcgaagctgtccggcattttcgctattttcatccccgtgctgggcgtggggctgtatctggtggcctcccacgcgcatcccatctttgagcgggtcttcaagcgctacgatcgtctgaacaacgtggtgcaggaaaatctgaacggcatccgcgtggtcaagtccttcgtgcgggaggatcatgaaattcagaagttcgatgaaatttcagaagagatttatcaggacttcagcaaggcggaaaagctgctggcctttaatatgcccctgatgcagttctgcatctacggctgtatgctgctgctctcgtggctgggcgccaaggcggtggtggcctgcggcggagacgcggcgctgggcctgtccaccggcgaactgaccagcctgttcacctacaccatgcagattttgtccagtctgatgatgctgagcatggtctttgtcatgatcgtgatctcccgggcttctgccgagcgcatcgctcaggtgctggacgagcagagcgacatcgtcagcccggaaaacgccgtcaccgatgtgaaggacggctccgtggacttcaacgacgtggtcttccgctacaacagccgctcggagaacccggtgctggatcatgtgaacctgcacttccgcagcggccagaccatcggcattttgggcggcaccggctccagcaaatccagtctggtgcagatgatcccccggctgtacgacgtcagcgagggcagcgtggaggtcggcggcgtggacgtgcgccgttacgatctggacagcctgcgcaacgccgtggccttcgtcctgcagaagaacgagcttttctccggtaccattgcggagaacctgcgctggggcaatgaaaacgccaccgacgaggaaatccgccatgcctgccagctggcgcaggcggacggctttattcagggcttcccggataagtacgagacccacatcgagcagggcggcaccaacgtgtccggcggccagaagcagcgcctctgcatcgcccgggctttgctgaaaaagcccaaggtgctggtgctggacgactccaccagcgccgtggacacggccacggacgcgctgatccgcaaggcgctgaaggatgagctgggcgacatgaccaagatcatcattgcccagcgcgtgggcagcgtgatggaagccgaccagatcgtggtgctggatcagggccgggtagcggcgctgggcacccatgacgagctgctcaagaccagcgatatttaccgcgaggtatacgaatcccagatgaaaggaagcgatgcagaatgatgcgaggaccccgcggacccaggggcggcgcgaagccgcagaacctgaaagccactgtggcccggctgatgggctatgtgggccgctaccgcctgcggctggttttggtgctgttctgcattctgggcaacaccattgccagcgtgacggcttccaccttcatcaagactttgatcgacgactacatcacccccatgatcggccagatcaacccggatttttccggcctgctgacccagctggtatatatggcctgcatttatggggtcggtatggtctgcggctacctgtacaaccggctgatggtggtggtggcgcagggcgttttgaaaaacgtgcgggacgatatgttcgcccatatgcagaccctgcccatccgctactttgacacccacagccacggcgagatcatgagccactacaccaacgacaccgacaccctgcgtcagatgatcgcgcaggcgctgccgcaggtgttctcctccattatttccatcgtggcggtattcgtggccatgctcagccagagcctgtggctcaccttgacggtggtgctgttcaccgcgctcatcatgtgggtcacgggccgtgtctccggcaagagcggcaagttcttcgtcaagcagcagcagtcgctggcctccgtcaacggctacattgaggaaatgatgaacggccagaaggtggtcaaggtcttctgccacgagggcaaggccgtggaggaattcgaccgccgcaatgaggagctctgcctcaacgccaccgaagccaaccgtttcgccaatattctgggccccatcaacaacaacatgggccacattctctacgtcattctggcggtcatcggcgcgggcctgagcctgagcggcgtgaccaacgtcagcctgtccggcgcgggcggggccgttacgctgggcatgatcgcttcgttcctgaccctgtcccgcagcttcgtcatgcccatctcgcaggtgagccagcagctttcctccgttattatggcgctggcgggcgcggagcgcatcttccgcctgatggacgaacccagcgaaaccgacgagggctacgtcacgctggtgaacgccaagcgggatgagaacggccagctttgcgaaagcgaccatcgcaccggcctgtgggcgtggaagcatcctcacagcgacggtaccaccacctacaccgagctgaaaggcgacatcgtgctggacgacgtggacttcggctacacgccggagaagatcgtgctgcacgacatcagcatttacgccaagccgggccagaagatcgcctttgtcggcgccaccggcgctggcaagaccaccattaccaacctgctgacccggttctacgacattgccgacggcaaaattcgctacgacggcatcaacatcaacaagatcaagaaggacgatttgcgccactcgctgggcatggttttacaggacgtgaacctcttcaccggcacggtgatggagaacctgcgtttcggcaacccggacgccacggacgaggaatgcatcgaggcggcgaagctggtcaacgcggacggcttcattcggatgctgcctcagggctacgacacggtgctgaccggcgacggcagcggcctttctcagggccagcggcagctgatctccattgcccgggccgccgtggaagatccgcctgtgatgattctggacgaggctacgtcctccatcgacacccgcaccgagagcatcgtgcagaagggcatggacgcgttgatgaagggccgcacggttttcgtcatcgcgcaccgtctttccaccgtccgcaactcggatgcgatcatggttctggatcacggccgcatcatcgagcggggcagtcacgccgacctgatcgcccagcggggcacctactaccgcctctacaccggcgccttcgaactcgaataaggcagtgccttaagccggactgcgcgcctacggcgcgcagggtgctcgtgggacatgcggcttggccggggttttaccgccgctcggcgacaggcctcgcggctcgcgggtctggcaggcttc

SEQ ID NO: 3762 - DNA, 13386 bp, Unknown
  16S sequences of unknown bacteria
agcgttccggtatccgcaaagacgggagagggaatcgattcactgctggagatgattcttcttcaggcagagatgctggagctcaaagcgaatccgaacagactcgccctgggtacggtaatcgaagcccgtctcgacaagcagaagggcgcggtagcgacactgctggtactcaacggcacacttcacgcgggcatgtctgtcgtcgcgggcaattgcagcggccgcatcaaagcgatgacgaattaccggggcgataagctcaaaaaagctggtccagccactgcggtggaaattctcggcctgaccgaagtcccggaggccggcgacgagtttaacgctgtcagctccgataaggtagcccgtgagatcgcggaaaacagaaaactcaagcagagagaacaggtgatgcagaagaacgccggcgttacgctggaacagttattcagccagatcgaacagggcgatgtaaaggaactcaatctgatcatcaaggccgacgtccagggttcggtgggcgcgctggtgtcttctctcgaaaagctcaagaaagaaaacgtggcggtgcggattctccataccggcgtaggtacgatcaatgaatcggatatcatgctggccagcaccacaaacgctatcgtcatcggcttcaatgtgagaccgagtgtggcagtctccagcatggcgcagcgagacggcgtggaaatcagaacctacagtgtcatttacgaggccatcgaagaagtggaagcggcgctcaagggtatgctggatcctgaatttaaggaagaggttctgggcaatatagaagtcagaaacacctttaaggtgccgaatgtcggtatcatcgccggcgcttacgtgcttaccggaaaggtggagagaaatgccagcatccgcctcatccgcgacggcatcgtagtgcacgaaggcaagatctcctctctgaagagatttaaggacgatgcaaaggaagtcagccacggattcgagtgcggtatcggcatcgaaaattataacgacatcaaggaaggcgatatcatcgaagctttcaagatggtagaagtggaaagaaagtaaaatggcaaagaattacagatcgggcaggctgggcgaagaaatccgtaagaccgtgggcatgatgctgctcaccgagctgaaagatcgcaggcttcagggcaggatgatcagcgtatctgatgtagaagtcagttctgacggcagttacgccaccgtatatctcagcgtgatgggcaggaacatcgaaagcggcgcacaggaagaagaaaaaaaggaaatcctgacggcgatgaagagtgcggcaggcctcatccgcagagagatcggaagagccgtcaaagtgagacatgtgccggaactgacgtttaagatcgacagctcgctggaatatggaagacatatgtccaaggtgatcgacagcctgaacatttcgaaagagaacgaagagacagatacggcggaggagcccggagacgaatagtttccggcttttccgcgaaggcgtaaaacataaaaagggctcgggaacagtatcggccggagcaaatgaatttgccgccggcggctgtttgtgcgccgcgttaaccggcgcggccggtttgcagaaagggagactctgttatgtggaaagtcagtgacgacatcagaaaaggcatgaagaatgcggcagagacgattatggcggcggaatccgtctatattttctctcatatcgtagcggacggagacgcgctgggatcctgcgcggctctgtgccacgccctgagaatgcagggcaaagaggcggatattctctttgaggacgaagtgccggaccatctgcggtttctcgatcagggatacatcatttttgccgatgaaaacacagagcttccggtaagggatctctgtatcgctttggactgcagcagtccgtcgagatttccgaagagagaaaagctcttttatcacgcgggaaaaaagacggtctgtatcgatcaccatatttcccggggcgaaatggcggaggtcagctacatcgattctgccgcttccgctacggcggagatcgtctatgagctgctgctgtgcatgggaattcaaccggacaaagagatcggggaagctgtctatacgggaatcgctaccgatacgggaaatttccagtacactaacacgacgaagaagacccatctcatcgcggcggagctgtatgatctgggcattgatacgaagaagatcaacgtgattctctatcagagcgaccggctgcagaaactgagactgcgcaatctcatcatgaatgagatggatcttttctgcgacggtctggcgtccatcgcttatgtgactctggatatgtacagggaggctgacgccagggtggaggagagtgacggcatcaatgcggtcctcagagatatccgcggcgtggaaatcggggtatttctgcgggaaaagcacccggaagaggtgaaagtaggacttcggagcaagaagtatatcgatgtttcagaaatctgcgcgaagttcggcggcggtggccacaagcatgcagccggctgcacgatacataaaacgatggaagagacgattccgctgatccgggaggcggtggagggagctatacggcagttcgctgccgagaatccgggtcttttggagacgccggaatattagcaggacgatttgagccgccggctgcggtccgggtcgcaaacgtcggaggaatacagaaaggacaggcttttgctggacggatttatcaatctgctgaaaccggcggggatgacgtcccacgatgcggtttccgctttgagacgtatattgagaacaaaaaagacgggacatacggggacgctggatccgatggcggccggcgtcctgccggtctgcgccggcagggccacgagagccgcagagtatctcgaggcagatcggaagagataccgctgcgagctcttgctgggcgccgcttccgataccggagatatctggggagaggtgtcatacgacggcagcggcgccgccggccgcctcactcatgaacaggtccgggaggcaattctctccgtggaaggagaacagtttcagtatcccccgatgtattccgcgataaaaaaagacggaaaaaagctctacgagtacgcgagagaggggattgcggtggaggtggagccccgggcgattaccgtctatgaggcgctccccctgcggatctttcacgaacccggaagggctctttttgagatcgaatgttccaagggaacgtacataagatcgatctgtgaacaaatcggaaaaaagctgggctgcggcgcggtgatgacctttctggtgagaacgcgaagcggcggcttcgatatcgggcagtcggtcactctcgaggaaatcatcgcggagattcaggagaaggaacatctgacgtatgaagaagtcgtaaatccggggaaaaagccttcgcagctcagttttgttccggattttctcatgcccgtaggcgacatgctcacggattttgggaagattcttctgaacggggatgagatgaaaaagtacgtcaacggcggaaagctttctctgcggaatgtagagatccgcagggaaaacagccggagttccggcgacagattccggcggatttaccgcgtgtacggcgaggacggttcctttgccggaacggcgcagtttgacgaaaaaaggaaaatatttacggtagggaaggtgtttttcagatgaggatttttaacagtttagacgaaatcggagagatcggagagactgccgcggcgctgggaaattttgacggaattcataaaggccatcaggcgctgatcgatgaagcggtaaagacagcggcggcagacggtcttaagagcgcggtcttcactttttccaatcatccgagaaacgtgctggcaggagattatgtggtaaaaaatgtgatctatgccgatgaaaaggtcagacttctcgaagaggctggcatcgactatcttttttccatcgatttcaacgaatccatcatgtgtcggacgccggaggaatttgtagatgatattctcatccggaaattcagaatgaaagcggcggtctgcggatttaatttcacttacggttttaaggctgcggggacttctgaaagtctggcggagtatgctggcagcaaaggcgtggacgttcacgttatcgatccggtaaaggtggacggagaagtggtcagcagcacgctgatccgcaggctgatctgtgatggccggatggaaaaggtctgcgatatgatgggcagaccgtatatgatccggggcgagattattcacggaaataagctggggggccctgtcctgggatttcccacctgcaataccactttggataaaaatatggtagcgccgcgaaagggtgcttatgtgacgaaatgtgtgatcggcggcgccgagtatgcgagcatgacgaatgtgggtacgaagcctacgataggcgattatcagacgaacgtagagacgcatatcttcgattttgacaaggacgtctacgggaagcgaattgaagtgtatttcctgagcatgatccggccggagcagaagttctcaggtctggacgaactgatcgcgcagttggtaagagataaggcatatgccagaaagcagctgggaatctgagctgacggaggatcgtcgcgcgatccgcagtcccgaagcgaagggctgtggagaaggcgtgaataccgccggcgttttttccggtcgccgcatctgtgaaacgggaaaggagcgccgtcgggggacgctgatagaaagggacggatcgggggcgttcaaatcgcggcgggaaaacggcagaaatgtaccgtggtccgggttttctattgacatggtggaagaaaacagatatactgtataagcaatttgcctatgtgcaggaaatatttacctaagctgcgtttatcgcatctccggcgtttacccggcttaaggaaaaagaagaaaaggagaaaacaaaaatgattacacaggctcagaagacagaaatcatcaaagagtacgcaactcacgaaggcgacacgggatccccggaagttcaggttgcgattctcacttacagaatcaacgatctgaacgaacacctcaagattcacaagaaggatcatcactccagaagaggccttctcaagatggtaggtcagagaagaaatctgctcgcttacctcaaggctaaggatatcgagagatacagaactctcatcgctcgtctcggattaagaaaataaattctgacaaaaagcggggttgtattcagtgcaccccgctttcggtatatttattgtcatagtgtgcagctgtttgggcgcgagacttgagaatccattccaccgtacggaggaaggtccggcggaatgaattgtcaagtctggccgaaggagccgcagatcaatggaggaacatctatgagatttgaagattacaaaacattcagaacggccgtcggcggacgtctgcttcaggtagaggtgggcaaagtcgcaggtatggccaacggtgcggctacggtcagatacggagataccgtagtcaacgtcaccgctacctgctctgcggagccgagggaagatatcgacttctttcctttaagctgcgattacgaagagaggatgtacgctgccggaaagattccgggaggttttatcaagagagaaggccgtccgacggagaaagcgattctctcctcccgtctgatcgaccgccccatccgtcctctcttcccgaagggattttataacgacgtcgtcgtcgtggctacggtgatgtgtgtggatcacgactgtccgtccgacattacggcgatggtgggctcttcggtcgctctttctatttccgacattccgtgggacggtccgacgggttccgtttcggtaggccgtgtggacggtgaattcgtcatcaacccgacgcaggaacagagagcggccagtgatatcgatctgaaagtgtcaggtacgaaggacgcgattatgatggtagaggccggcgcggaagaagttcctgaagatgtgatcttagacggtatcatgttcgcccacgaggaaatcaaaaagatcgtggccttcatcgaacagatcacagaagaagtgggcaagccgaagagggatcttcctgttcatgaaattccggaggaattggaacaggcggtcagagattacgagacggcggcgatgagagaagccattcagatccacgataagacagaacgtcaggaaaagatggacgctctggaagcagagacaaaagagaagttcctggaaatctatccggaatcaggaaaagatatcgacgatattctgtataaagtaagaaaagagcagatgagggatctcatcatcagcgaaaatatacgtcccgacggcagaaagactacggacatccggccgatctggtgcgagacgagcttccttccgaggacacacggctccggcctctttacgagaggacagactcaggttctgacggtggcgacactgggaacggtcagcgaaggacagacgctggacggaatttccgaagagacggaaaagagatacattcatcactataactttccggcttacagcgtaggcgaggcgagaacctccagaagtccgggcagaagagaaatcggccacggcgctttggcggaaagagctctccttccggtattgccatcggtagaggagtttccttatgcgatccgtctggtatccgaagtgctctcctccaacggcagcacatctcaggcttccgtatgcggaagcacgctggcgcttatggatgcgggcgttccgatcaaggcgccggtatccggtatcgcgatgggtctgatcaaagaaggcgataagatcgcgattctcagcgatatccagggtatggaagacttcttgggcgatatggactttaaggtggcgggtacggaaaagggcgtaaccgcgattcagatggatatcaagattcacggactttccagagaaatcctggaagctgcgctgaagcaggctcacgacggcagaactcatatcagagagaagatgctggaggaaattcctgcaccgagagaggaactgtctccgtacgctccgagaatcatcacgattcagattccgacggacaagatcagaacagtcatcggaccgggaggaaaaacgatcaataagatcatcgaagagaccggagttaagatcgatatcaacgacgacggccaggtctttgtggcttctccggatatggattcggcaaaagccgctctcaagcagatcgagcttctgacggcggaagtggaagtaggtaagacttacacaggtgaagtcaagagaattatgaacttcggagctttcatcgaggttcttccgggcaaggaaggtctgctgcatatttccaagatggcaaagcgccgcgtggagaaggtggaagacgtcatgaatatcggagatgtggtcgaagtcgtcgtgtacgaaatcgacaatcagggaagaatcaatctgaagagaccaaatctctaaagaccgtgattgactgtaataaaaagcgtttttgaaagatatatcggattacgaatacgcagactgacctgcttgaagccctgagctgatttgcaaagcaaatcgtcggcaggtctcacgtgagaatttctcaaatctccgatttgatgaaattttctgtttcgcttatgccatgcggtagagacgcgtattttacgcggattcagccgcattgtaaaatacgacagcgaagctcacgaggcgatcggaggaagacggctttagccgtctgttgcgtgcaatgatctgtctgctgtattcgtttcagccgataacaataaagcttcatttttctataaacaatattacatatttcatctgtaagaaatcaaaatatataacagacgcagagcgcgggagaatgattctcccgcgctttgtcattcatttcagcggccggcggacttttcaggcaggtcatgtccggcgaaggtatagctgtttatcggtgaaatctttccaaatataaattttttccgtcataatccggctccgaataaggcgcaaaaaacgttcacatctgaaaataaagggataaacgcagaatactcagcatatttgctcttggaaaaggaaatgttataaaaaggagcgtcccttcatataaatggataggaagaaattccgccgcggaggaaagaacggctgcggcgcagatatttttcagatcagaaggatatggagagcggcgatggagagaaaatatggagagaagaaaatctctgcgatagtttgtattgttatatttttcggtgtaatagctttttctgcgggtatagatattctggaagatcatgccgtttccggcgccaggaaagatctgtcctttgtaaccgagtgcggcgacaatgctgtgatgacgtcgtatgtactgactgattatgaggacgacggcactgtggtgcgaaacggtcccgagggttctcataaaatgacgtttacctgcaacgtggactggggagaggaagtgatccccgatattctggatattttggaagaaaaagatgtgaagatcacatttttcgtgacgggaagctgggcttctaaaaatccgtctcttctgcgcagaatgtatctggcgggacacgaaatcggaagtcacggctatggtcataagatgtgttcccagatttccgaggatgaactgcgttcggagatcgaaaagacggaggcggcgatcagcgatgcaatcggcgtaaaaccggtatattttgcgccgccgtcgggagatttcagcgacaagacggtagatttctgcagaaacgagggatatcggatgatcctgtggtcggcggataccatcgactggaaggagggttcgacggcatcggtgatctatgaccggatcatgaaaaaggagacggacggagcgatcgtactgatgcatccgaagccggagacagtaaaggctctgccggatctcatcgatagtatccgggaacaggggactgagccggtaagtctctccgaactgttgagttcggcggcgtcagatgcggagacagaaacggaggagacgggggagcggtaactcctctcctccggtgtctgctgtccgaagcggtgttctgaggcacggcacggcgggtctgtccggttgtaggatctcataaaagatgatataatgtctgcaccccgcgactggcaagcggcagcgcagccagagaggcggtgcaacagatgctctaagcgcacagcgattgacaagcgaaagcgcagtcagagcaaagcggtgacagcgaaatgtctgcaccccgcgactggcaagcggaaatagacacagtacgtccggctgagacttcctggagaaaaacgcggatttcccgaaccggttttttcagcggaccgggggacagtgtctgtgggttttgttcggtaaaggtctttggagcgttatgatggaattcggggatgaaaaatacagaagaacctcttaagagaaagaaggaagaaaagataattatgagtgaaatcagaaaactgaactgcggccttcgggtcgttttggagcagattccttatctgcagtctgtcaccgcaggcgtatgggtaaaggcgggatgcgtcgatgaaaacgacggagagacggggatttcccactttatcgaacacatgatgttcaagggcacggcgaagagaactgccagacagatcgcttcggatgcggacgctctgggcgctcagatgaacgcctttacttcaaaggagagcacctgttactatataaagtctctcacttccaatgtggacaaggcctgcgagatcatcatcgacatgctgaccggttcgctgttcgatcctgcggaaatggcaaaagaaaagcaggttgtaaaggaagaaatcaaaatggtggaggacgctccggaagacgacgtgcaggacatgctctatgaggaactctttaagggcggtccgctgtcaaaatctattctcgggacgccggaaagtctcgatgcgatcacccacgacgatataaagaactatatcgccagagaatataccctcgacaatatcgtagtttccgttgcgggtaatttcgatgcggatcagatctgtcagcagtttgagcacagtctttcctgcatgacagcttctaaagaagataaaaaccatgagtcggcgatctatattccgtctttccgcacgaagataaaagatatcgagcagtctcatatctgtctgggtacgagagcgctgaaattcggcgatgaagatgtttatgctctgacgattctgaacaatatcatgggcggaagcatgagttccagacttttccagaatatccgtgaagaaaagggcatggcttatacggtctactcttacaccgcttcctattcacaggagggactttatgccatcagcgcgggagtagctcacgataaaatcgaggatacggtatacgctatcagagaagaattggaaaagttaactgcaggcggcgtcaccgacgacgagctgcggatttcaaaggagcagaccaaaggcagctatattttcagcctggaaaatacaggaagccgcatggtttctaacggaaaatacgcgatcaactgcaatatcgtcagaaatccggaagatgtgatccggcagatcgatgcggtcgaccatgacgatatccgcagaatggcagggttgattaccgatgtcggaacgtattccggaaccctggtcagcaagagtgacgtagatttagcgtctctgatgaaatagaaatgtcaggcttttttccggcatggtcagtttatttttatgggtttgcgttaataaatgagaattcaccatttcaacagctgtagaatcggaggtaatgttacaatggactttcttacactggcaaaaaaacgtttttccgtccgcaagtttgaggacagaccggtagaaaaagaagcgtacgacgcgattatcgaggcgggcagatgggctccgacggccaaaaatatccagccttttaaggtttatgcgcttcgcagtgaggcggcgctggaaaagatcagagctatcacgccggcgacctttcacgctcccgtcgttctgattttgtgtgaggatacgccgaacgcctgggtcaatcctttcgacgattttaattcctcttctctggatatgggtatctttgtgtctcatctgatgatggaagcggaggaactgggactcggaacaacctgtgtctgctggtttgatacagcgaaggtcaagaaggaattcgcgattcctggcggacttcagccgcggattctgctgccggtcggctatccggcggcggacgttcagcctggcccgatgcacccgcacagaaaagaagcgtccgaactcgtagaagaactctgataccgttcggattccgttttctgaattcctgacggggatgggggattttgtgctgcagaacctcggcgctgttagccggttgcaggttgtttcagcttttcagattttgcggtgacggcagccggagcttttttcggcagccgtccgccgggcggaatcgaaaggacgctgtccccagcgaaggagcgggaaaggacagacagcggacggaaacatacggcggaggagtttgagaacggcgaggggcgccgggacgcagggaacatttcaggtgaaagacaaggggttgctgaattatggatggaatacagaaagaaataataacgaagtccagcattccggaagatacggaggaattgctgggagcggcggaagcgctgcagacgatgctgatgatgtacagctgtgcgatcagagaatttaagacaaaggtggaggtgctcaacgatgagctttcgatccgggggcagagaaatcctatcgaattcatcaagacgagagtgaagacaccccacagtatctataaaaaattaaaaagaaaaggttttgatatttcccttgattccgtgaaagacaatcttttcgatgtggcgggcgtgaggatcatctgttcttttgtcgacgatatctataagatcgccgatatgattgtgaaacaggatgacattcaagtgctcgaagtcaaggattacataaaaaatccgaaacccaacggatatcggagtcttcatatgatctgccagattccggtgtttttttcggactgcaaggagctgctcaatgtagaagtgcagatacggaccatcgctatggacttctgggcatctctggagcacgatcttcgttataaaaaggagcttttggtgacggaagatctgcaggaagagcttcgcgtctgtgcggagacgatcgcttttacggataataaaatgatggagatcagggatcagatcgaagttctgaagcagcaggaagaggcgcggtagatggcagcgggaaaaaaggcgggaaagacaaacgcgctccgtatgctggatgtcaggggaatctcttaccgcagtacggaatacgaactttccgacggttttaccagtggctctgatatcgccaggatgcagggactggaccccgacgccgtcttcaagacactggtgacggaatccggcgccggagaacatttcgtctgtgttattcctgtggactgcggcctggatttaaagaaagcggcgaagcatttcggcgtaaaaaagatggaaatgcttccgatgaaaaaacttttgccgctgacaggctatgttcacggcggctgttctcccgtaggcatgaaaaaacagtttcccacggtcatcgatgagacggcgtctctcttcgatgaaatctatgtcagcggcggcagaatcggtcttcagctgtgcatctgtcccggggatttggcgcaggccgcggaagcggatttcgcagatctgaccgaatagacaaatacggaggaaaaggattatgccatatgttttgttaggaacagcgatcgttctggagattatcgcgacgactcttctgaagtcgtccgagggatttacaaaattacttcccgctgttttctgtatcttattttatattctctgttttttcatcttttcaaaagcgctgaacagtatcaatttgggagttgcttatgcgacttggtgcgcgggaggcatcgtagctacggctgtgatctccgcggctgtattcggtgagaagctgaattggatcggaattacgggaatcgttctgatcgtaaccggctgtattttgctgaatctctttggaagtttaaatcattagtgtggatgtgaagtattgaaagcattgtctccttctggtaaaatcaggttatacttattgttttatttcagagaggagcttgacggatgacagtgataggaaatatgcttttagcaagcaagcaagcaagcaagcaagcaagcaagcaagcaagcaagcaagcaagc

SEQ ID NO: 3763 - DNA, 4216 bp, Unknown
  16S sequences of unknown bacteria
gggtggcggcgccgggattttccgttcttccggactgttcaacgccaagacctgccagtcgaagggggtctcttacggactgctggagacggcgttcatcgacgataaggacgatatggaatattataataagaataaagaggcaatggcaaaggcagtggcgaacgcactggtgagctatttcaagtaatgaaggagaggagtgtctgatggacgctcctttttttacctttacactttattacgttaatttaacggcggggattgacaaagcgtggatgacttgctaaaataggaagaaagttttcacagagaacagaggtatatacatatgaatagaagagtgttatcattgctggtggacaatacctccggcgtgctgagccgtgtggcaggccttttctcccgccgcggctataatattgacagcctcacagtaggtgagaccgctgatccgcgctactcccgcatgacagttgtggcacgcggcgatgagcagattctggatcagatcgtaaagcagctggcaaagctgattgatgtcgttgatattaaggtgctcgaggatgagaacagtgtcaatcgtgagctggtactggtaaaggtacgtgcggatgcacatgaccgccagtcggtgatcacgattgcaaatattttcagaggaaatattattgatgtcggcaaggattctctcatcatagagctgaccggtcagcagtcaaagctggatgcattcctgaagctgctggacggatatgagattctggagctggcccgcacgggaatcaccggactttccagaggcgcagatgacatccgttatctgtgatgtctgcaagccaaaagctttgctgcacaggacagagattcgcttgggtggcaggctgcagaaacagattgctgtttctgcattcataacagtgtaacttacgaccgaatgagtttttgtaccggtgaatcggtgcatggttttgtcaagattcagatttcctgcgtgacggcttattcggatgcaagctaataaatatcaatacaaaaagaggagacgaaaaaatggcagcaagaattttttatcagaaagattgcaacctttcccttctggaaggaaagaaaatcgcaataattggttatggaagtcagggacatgcacatgctctgaacttaaaagagtctggttgcgatgtagtcatcggtctgtacgagggaagtaaatcctgggcaaaggctgaggcacagggttttcaggtatatacagcagcagaagctgcaaagcaggcagatatcatcatgattctgatcaacgatgagaagcaggcagcactttacaagaatgatattgagccgaaccttgaggaaggcaatatgctgatgttcgcacacggcttcaatattcatttcggctgcatcgttccgccgaagaatgtagatgttacgatgatcgctccgaagggaccgggtcataccgtaagaagtgagtatcaggcaggaaagggtgttccgtgtctggtagcagtagagcaggattatacaggaaaggctctggatctggcactggcttattcactggctattggtggagcaagagcaggcgttctggagacgactttccgtactgagacagagactgacctgtttggtgagcaggctgtcctttgcggtggtgtatgcgcactgatgcaggcaggttttgagactctggttgaggctggttacgatccgagaaatgcatacttcgagtgcattcatgagatgaagctgatcgttgacctgatctatcagtctggttttgcaggcatgagatactccatctcaaacacagcagagtacggcgattatgtcaccggaccgaagctgatcacagatgagaccaagaagaccatgaagaagatcctgaaggatatccaggatggtacgtttgcaaaggaattcctgctggatatgtcttccgcaggatctcaggtacacttcaaggctatgcgtaagctggccgcagagcatccgtcagagaaggttggcgaggagatccgtaagctgtacagctggaacggtgaagataagctgatcaacaactaagatacccgtaaatgcaataatccccgggaacgaaatatttccggggatttttttagaggaggaaatacgttcatgggaatgacaatgacgcagaagattctggcagcagccgctggcctggatcatgtagaagctggtcagctcattgaggcgaatctggatctggtgctgggaaatgatatcacatcaccggtggcaatccacgagattgagaagctgaaggatgattctgtatttgataaggataagatcgcactggtaatggatcactttattccgaataaggatatcaagtctgcggagcactgcaaatgtgtccgcgagtttgcatgtcgccatgagattaccaattattttgatgtcggagagatgggaattgagcatgcactgcttccggaaaaaggactgacggtggcaggagatgtcatcatcggcgcagattcccacacctgtacttacggagcgcttggcgcattttccaccggagtcggcagtacggatatggcagccggcatggcgaccggtaaggcatggttcaaggtaccgtctgcgattcggtttaacctgatcggcaagccttctaagtgggtgagcggtaaggatgtgatcctgcacattatcggtatgattggcgtagacggagcattatataagtctatggaatttgtcggcgagggcgtgtcaaatctttcgatggatgaccgttttacgatcgcgaatatggcgatcgaagcaggcggcaagaacggcattttcccggtagacgaaaaagcgattgcttatatgaaggagcattccaagagagagtataagattttcgaggcagacgaggatgcagtttatgatgaggaatacacgattgatctgagcacgcttcgccctacgatcgcattcccgcatcttccggagaatacgaagacgatcgatgagatcaccgagccggtcacgattgaccaggctgtgatcggttcctgcacaaatggccgtattgatgacctgcgtgtggcagcatcgatcctgaagggccgcaaggtaaagaagggcatccgctgcatcgtgattccggcaacgcaggcaatctaccttcaggcaatggaggagggacttctgaaaatctttatcgaggcaggcgctgttgtgagcacaccgacctgcggaccatgtcttggcggatatatgggtattctggcagacaaggagcgctgcatttccacgacaaaccgaaattttgtcggtcgtatgggacacgttggatcagaggtatatctggcaagcccggcagttgcggcatctgcagtgaccggagagatctctgcgccggaggcgctggggctctgaccaagtgcgcaataagaaagcgaatcctgcacctgtaatgagtgtaggataaaacaggaggaaagaatatgaaggcatcaggaaccgtatttaaatatggtgataatgtagataccgatgtaatcattccggcacgttatctgaattcctcagatccggcagagctggcgatgcactgtatggaagatattgatccggattttatccatcgggtacataagggcgacatcattgtggcagagaagaactttggctgcggctcatcccgtgagcatgctccgattgcgatcaaggctgctggagtcagctgcgtcatcgcagagacctttgcccgcattttctaccgcaatgcaatcaacatcggactgccaatcatcgaatgcccggaagcatccaagggaatcgaagctggcgatgaggtagagattgatttcgacagtggtatgatctacaaccgcacaaaagacaccagcttccagggtcaggcattccctgagtttatgcagaagctgatacaggctggcggactgatcaattatattaacgaaaagtaatataaatccgacaatcacggctaaaagagagactcttagaactttggagtaaatctgaggttctgagggtcttttttcgtgttttcgagcaataaaatttttgcccgtaaaaaggataaaagaagttgccctgtgacattattgacatgcggggaacttcatggtattttatttttttaaccgaatcaagcaagtcccctgcttcaaattgcgcaaagcaataagcagtgggttgggacttgcttggatca

SEQ ID NO: 3764 - DNA, 2170 bp, Unknown
  16S sequences of unknown bacteria
aagccgttgaccgcgctcgtgtagacggtctggaagtcgagctgctcgtcggttgcgccgagctccatcatgagctcgaagacctcgtcgagcacctcgtcagggcgtgcaccggggcggtcgatcttgttgatgacgacgatgggcttcaggttgatggccaaggcgtgcttcaggacgaagcgggtctggggcatggggccctcgtaggcatcgaccagaagcaagacgccgtccgccatcttcaagacgcgctcgacctcgccgccgaagtcggcatggcccggggtgtcgatgacgttgatcttgacgcccttgtagcggatggacacgtttttggaaagaatcgtaatgccgcgctcgcgctcctggtcgttggagtccaagacgcgctcttcgacctgctggttttcgcggaacacgcccgcagtctgcaagaggcggtcgacaagggtcgtcttgccatggtcgacatgggcgatgatggcgatattgcgaatgttttcctgaagcatgcttgtattttcctcgttacctctatgtgccctccgcatgagagcaaattgacaaccccatagaataccactcacggcaagtcgcgtggagcattcgtatatggagttgttgcgaagcgaaagggcaggaggctcgaggtcagccgaacagcagcgtctcctcgcccgcggggagcgggtcggtcacctcgatggtgccgtcttgcgcgcgctggtagagcatgtagccgctccaggcgtttttcatgccgcgctcgccgaactcgaacagcagcgccgggctgccggggtcgttctcggattcctggacgacgccgtcgtagagcagggcgtagcgcgtgcagcgctcgccgagctcgcccacctgggcgcgcgccgcgcggtagcagccgtcgggcgtgtcgtcctcgaaggtcatgagctcgtcttcgcagtcgaccgccagcatgaccggcacggcatcgccgctgtccatcaggtcgatcgcggtcccgatgagggccaccgaaagctggtcgagctctttggaaatctctgccatggacatgccttcctacgtgcgggcgatgcgcgcgatcgcatcggcgagctggtctaccgtgagcggatctgcctgcaggtcgagtccgccttctgccaattctattgcaaagctgagcggacggggcaggtcgagccccattttgacgagacgcgcgcggtttgccggcgcaaacacctcgtgcacgccgccggccaacgcgactttgccctgctcgagcgccaccacgtgcgtgcacagctcggtcacctcgtccatgtcgtgcgagaccatgacgatggtggtgccctcgtcgttgaggtgctcgagcagcgcgcgcagctcgagcgccgccgacgggtccatgcccgccgagggctcgtcgagcacgaggtagctcggctccatggcgagcacgccggcgatggcgacacggcgctgctggccgccggaaagcgcgaaggggcttctctcggagacgtcatcgtagtcgaaccccaccagctcgagggcgcggcgcacgctctcctccacatcgggtgcgtcgagcccgagcgcgcgcggcccgtaggcgacgtcgtctgccaccgtcgaggcgaagagctgccgctcgggatactgaaagacaagccccacgcggcggtgcagctcgcggcgctgcctcttgtcgcgcgtgttcatgccgtccacgacgacgttacccgacgagggcagcagcagggcatccgcaagctggacgagcgtggacttgcccgagccgttggcgccgataatgcccgtaaacgagccatcgtccaccgtgaagtcgatgccatccaagacgcgcggggcggcgtcgccgtaggagaagctcacctgctcgaacgtgatggacacagcccctccttccacgcgcgggggtcgagggggtcgggcacgtggaggccgcgcatggcgagcgcctcggcaagacgtacctcgaacggcggctcgaggccgatggcgcgcacggcgtcggcctgcgaaagaagctccttgggcgcgccatcgtaggcgagccggccccggtcgagcgcgagcacacggtcggcgagcagcgcgtcttgcatgaagtgcgtgacgaggacgaccgtgcgcccctccccatgcaggcggc

SEQ ID NO: 3765 - DNA, 13080 bp, Unknown
  16S sequences of unknown bacteria
ccgccgtgaatttaaaaattttcaagtccgcctgtcggaaaaaatattgccgactgcgcgcaggcaaacgccgcatcccgttcccgcgcctttttaacggcgcgtcttttcgcccgcccttaaacgtttctccgtcgcaggcagatgtttttttaagccgcgacgccgattgaaacgctttgcagacttcggggcactgcgggaaaacggcgttgaagcggattttccgcgtccgaaagcgcttcctgcgcgtaaaagagcgcgctataccgatacaggcaggggaaggttctttacgatttttctgaaaaatccgaccgctttcccctctttctcctcccgataccgtctttattatatcacaccccgtataaaaaagcaaggcggcggagaagctctttccgttccgccgcgccgctttatgcaagattttgtcggatttgactcaactgtacaaattcttccttctctttccgcgattcttttttgccgatttcggcagagcctccgaaaaaacttttgcagcgcgcataaacgcaggcaaggacgaaaaacaaaaatcgaaagccaaacgtttaaaaaggaaagccccgcggcacaaagcgcgccgcaggactacccgccattctattttatgattcgttcagccgtcatggagaaagaatccgccttactctgtccctcgcagagaaaggggcttatcttactcaatttgcctaacagaaagagtttgcttatcttaacttggtacccgcccaagagaaagtttgtcttaccttaggttactatctgccacataggaaaatttttcttaatccgatggattttcgcgcgtcttttcccccgaaatttttttatatttcgggaacgcgattcttttccgttttggtcaggcggatttttgcttatacaccacgcggggtttggcgccgtccgtcagacattccttggtgacgatgacttcctccacgtcgtcctcggaagggatttggtacatgacatccgtcatcacgccctctatgatggtgcgaagtcccctcgcgcccgtctttaagcggatcgccgtctgcgcaatctcccgcaccgcgtcctcttccaccgtcagcttgacgccgtcgaagccgatgagcttctgatactgcttgatgatcgcgtttttcggttcggtgagaattttcaccaaagcgtcctcgcctaacggatcgagattgacgacgatgggaagcctgccgacgaattcgggaatgagtccgaatttcgtgagatcctgcggcttgacgtcgtcgagcgccgcatagtccacctcgtccgctccgagcttcaccttcccgccgaagccgagcgtcgtatcgtcctttctcgacgccacgatcttatccaagccgacgaacgcgccgccgcagatgaagagaatgttcgtcgtgtcgattctcagacattcctgctgcgggtgctttctgccgccctgaggaggcacggacgccaccgtgctttcgatgatcttcaaaagcgcctgctgtaccccttctcccgacacgtcgcgggtgatggaaacgttttcgctctttctcgcgattttgtctatctcgtcgatatagatgatgccgcgctgcgcgcggtcgatgtcgtaatcggcgttctgaatgagtttgagaaggatattttccacgtcctcgccgacgtatcccgcctcggtgagcgtcgtggcgtcgctggtggcaaacggaacgttgagcaccttggcgagcgtccgcgcaagcagcgttttgccgcatccggtgggccccaggagcaaaatattgctcttctcgatctccaccccgtcgtccgtctttttcgccttcacgagcgaattaatgcgtttataatgattgtatacggcgacggacaaaacctttttcgccttgtcctgtccgacgatgtatttatcgagttcctctttgatctccgcgggctttttcaagggcacttccgccgtcttgtccttttcgttggtttcgtccaccatcgccttgcagatatccacgcagtcgtcgcagataaacaccccgtcgggccccgcgatcagccgccttacctcgtccttcgattttccgcagaaggaacaatgctgttcatatttttccatgtgttataccccgtttgaattttgaccgaaaaaatttttttcgcgcaaaatccctgttacaagactttgcgcgagaatatttttgtgtgtccgtatcgttgtccgccgtagtaaaatttcccgcgcctttttatccctcgaaaaaacagtcccgctttcttgcggctttgcctttacgggaaagagcgaagcgggaaaagaaacccgacgaatcggctttccttcgaaaagcgcgcctgcggccgcccgcaaagactgtttttctacggcgtttctccgcttttttaaaagcgctcagcgccttacgaataccttatcgataaggccgtaaacccgcgcttcctccgccgacatataattgtccctgtcggtgtcgcgctcgatcgcggcgagatccttgcccgtgttctcggacaaaatgcggttcatcttcgccttggtgcggagaatatgctccgcctggatcttgatgtcgctcgcctgcccctgcgcgccgcccaggggctgatgaatcatgatttccgaattgggaagagcgaagcgcttgccccgcgcgccgctcgacaacaggaacgcgcccatcgacgccgccaggccgatacagatggtggaaacgtcgcatttgacgtaattcatcgtatcgtatatcgccattcccgccgtcaccgacccgcccggcgaattgatatacagattgatatcctttcccggctccttgccttcgagataaatgagctgcgcgacgacggtgttcgccaccgcgtcgtcgatttcgccgctcaaaaaaatgattctgtcctctaaaagccgggaatagaggtcgtaagagcgctcgcccgtactcgtccgttccacgacatagggaatcaaaacatttttttccttcattctttattctcctctacatacatttcgttgtttgctttgaggaagttaaaaagtttcgtgatgatgatgtcgctcttgatatagtcgtactgacgaggatccatgtccttcttgtactcctccgcgctcttatccacggacgccgcctgctccgccaccttttcttccacttcttcgtccgtagcttctatcttttcttctttgatgatctgagagatgacgagctgattcaatacgttcttcttcgcctgctcctcgtagtttttcctgaactccgcaaggggcaccttgataaaatcgaggtagtcctgcaatttgagtccctggtacatcagctgatactcgaatttctgcacgaggttgtcgatttcccgctcgatcatcgcgtcgggaatctccgcttccgcagtggcggaaacggcgtccagaatgctgttctccgtcgcgtccagcgagtttttgtccgcttgcttttgcaggcgctccttggtcttttccttgtattcctctatcgtttcgctgcccgtcgcgtccttgatgaacgcgtcggtgagctcgggaagctccttgccctgaatggaattgagggtgacggcaaaaacggcgtccttgcctttaagctcctccgcctgatagttttccgggaacttgacggaaacgtctttcttttcgcccgcgttcatgcccaccacctgctcttcaaagccgggaatgaactgtccgctgcccagcgtcagatcgaacttctccgcctcgccgccgtcgaatttgacgccgtccacggtgcctacgaagtcgatattcacgacgtcgccgttttgagcgggacgatccgtgacgggcactttgcgggagtttctgtcgagaaggcgctccatctccttatcgacgtcggcatcctttacagtatacgcaaattctttgattttcatacctttgtaggagccgattttcacctcgggtttcacgggtgtcgtcgccacgagaacgaccttttcatcgctgaggtcgtccaccgcaagctcgggatcccccaccgccgtaaattctttttctttctcttcgagaacttttccgtaattttcggaaaagagtacgttcaaggcgtcctcgaaaaacactccctttccgtaggcgtgctcgatgacgttgcggggcgctttgcccttgcggaagccgttgacggcaaatctccccttcgtcttcaaatacgctttgttgagggcgtctttccattcggttccgtcaaattccatcgtaatttttaccgtgcttttttcggcagcttttgttgtgtacttcataatatgctttctcctaaataatgcttctcaaaattgtttttcccggcttccgctccctttacgaaacgcaaaaaaggctttgcccgtccgtccttttataaagaaaagggataaaaaagtcgcggcggcggacgaaggccgcgaaagagaacgcgccgctcgaaagtcgcgggaaacgcgctccgtttttgggggaagccccgttttgctccctacattttatcatattctttgaagaaaagaaagcgttttcgtttacaatttgcgaaatttacgctataatttataaaaaccccgacggtcggagaaatcttttcgacccgattcgcggattttcgggcggcaagggagcattttcccaaaaaaacgccgctttcaaggaggacgtcatgccccaggacgcttttcatatccgccgctcggcagcggaactcgacagccttttaaagggaggcaaaatcaaccgcatttcccaagcggacaaagacgaggttacctttattatatacacgggaaagacgaccgttaaactcgttctgaacacaaacgcgtccaatgcccgcgtctgcctcacgcgcgaagagaaggaacccgcgcccgtcgcgcccaatttttgtatgcttttaaggaagcaccttctcggcgcggaaatcttatccgtttcgcaggtggacttcgagcggatcgtggaactccgcctgcactgcaccaccgacttttccgagtgcgagcgggtgctcgtgtgcgagctgatgggcaaatactccaatttgattctgacggaaaagggaatcattttgggcgccttgaagacttcgtctttggaagcgggcgccaaaagagtgctgctttcgggcgcgaaatacctctatcccgagccgcaggagaaactctcccctttcgacgcggcgggtctgaaagagcggacggaaaattttttggcggcgcacacggaaggaagcggggacgtcgcggaggaatacgcgaaatttctgttcgaaaacgtggcgggactggcgctttccacggcgagagaaatggtaaagaggtatccccacggcacgcctatctgggaatttgtcggagagttctgcgcccgtgagccgtgcctgccctgtcttttaacagaaaacggcgccgcaaacggaaaaccgctcgactttttcgcctttcccgtggagggcggaatccccatgccctctttaaacaaggcagaagacgaatattattaccgcaaagaaaccaagcggaccttcgaggacaaaaaacgcaagctggaatccgccgtccgcgccctgaaaaagaaacagcaaaagaccttgcaggacatgctcgaaagactcaaagactgcgagggcatggatctgctccgcatcaggggagagcttctgacggcaaacctttaccgcctcgaaaagggaatgaaggaagcggagctggaaaactggtatgctcccgaaggaggacgggtaaagatcgctttggacacgcagctttccccgtcgcagaacgcgcaaaaatatttcaaggcgtacgccaagcagaaacggacgcgcgaggccctgacgccccgaaagcagaaggaagaggaagaaatggagtatacggaaagtctggcggcttccctttccgtggcggaaagcgcggaggatttgaaagagatagaaacggagctaatctccttaggactcgtcaagccgcaaaaagaaaaggtgggcgggaagaaaaaggaaacggcggcgcccttccgcgaatacgaatgcgggggctttaaaattctttcgggaagaaacaatttccaaaacgacagactgctgaaaagctgtgcgccttcggatctttggctgcacgcgcaaaaataccattccacgcacgtcgtcatcgtcacggaaggcaggcaggtaagcgacgaggcgcttctgttcgcggcggaagtatgcgcctactactcggacgggcgggcgggaggaaaagtgcccgtcgattactgcgagcgcaaattcgtaaaaaagccgcccaaatcaaaggcgggattcgtgacgtataccgattataaaacgctgctggcggagccgaacaaacacgcggaaaaagccgaggcgagcgaataaaaaaccttcatttaggcaagaatcatgcattttatcgatgaagccgattcaaagaataatccaaaaaaatttatttcgcatattgacaataaaaagactctatgatataatttgaaaaaaggaagaagtatgataacggcgatatttactttataaacgataaatagggtcttgattatacgttattacagcgattctcttcccctcgttctttgcgacgactgcccgaacggatacttgcgaagaacataccgttaagcgtaaattaggcaaaaatttctgcacgggatgttatgcggaatttgacgacgacggtcatggctctatcattattacaagcgacgaacaaccaatttcttactctttaaggagggaaaggcaatgaaaaatacgtctaaattttatgcgtttgcggcaatgattgtggcggcggccgcctgcctctgttctttcgcgtcctgtaacaaagcgggagagatcgtggaaacggacagggaagaaggcacgacggcaatgtattacagtataggactgagcgcttgggtcggcgcgggaatgggcgtcgattacgaaggctgtgcgataacggtgagcaaccgttcggaggagggtacgctttttatagaaaaactcgaaggggaaaaatattgcacggattgggaacgtttatcttcttacccttccgccgagtctttcgacaagagagcgcttcacggcgaaacgcccttgacctttgaaaacagagcgttttttcagtggatgccgttaaacgattggagcggcttgacttccgacgaacgggtggaagactatgtcgcctttacggcggaaaaagacggacagatcgcgggctataccgtcatgtacgtttcgggcgatcatttcgaggcgcaatcctccgtcgtggcaaacagggaatttcccaaggtgaaaggaaactaccaaaacgtgagcagggaatggctgaaccaacgcatagaaacggtgataaaagagcatcgggaaagcctttgaaaaatcgcgcgctttccgttgatagcagcgattactttgcgcaaagcacccccgcgcccgaaatcgggcgtaggggtgctttttaagcgaccttttataatatcggcgactatttccgctttacaatcaaagccgaaaaagcgggcgttttatgttcacgaactctttttcggacagaaagcttccctttatatcgaaaaacgggctaagcgcgctttcgaaaagactgttttctctcaccaaaaacgaatcgaccaataatcggggaaatgcccgtaaacgacggcggaaccgatcataacgcaccaatcggcggcgatcaggattcccaaaatcaaggcgatataaaagctcactttctgcgggatgctttcgaaaaagcgcagcgcgggacgaaaaatgaaatgcatcaaaagcgtgatccccgtcgtaaagccgaacgtagtgatgaggctcgtatagcgcgtgacgtgggtggggatattttcgtaattccacgcgcggatgccgaacaccttttcaaagagaagcccgcagcccatttctccgaaaaaaatcaggacgtaaacgcttacgtaatagatcaaaaggcgcagagcgtgacaccatttgctgggcttgggaagaatgcgctttttgaaaatgcgcatttccgtcggcgtaccgaagacgaaaaaaagcacgaaaatcccgaatccatacgcggctaaaaacggaagcagctgatggcgggaatcgaaaataccgttggaaataagacggaaaaggttttccaccagccagccgcaaaacgccgcgatgtaacagatgatgagaagagagcttactctcgtcccgaaaatccgtttggcttccttcggctccgatgttgcctctttttttctttcggccttgcccctcccttttatccccggcggcgcttcctccaaaggcggagccgcgtctataacggcaagttccgcctccctttctccgctcttgttcccgacggcttcgataataagagcggaatcttctgtttcggaaaaagtttcttttttcatctctctctccaattttttttcatattgcggacctttgcgccgcctctcacctatacattatacgggaaatccgttaaaaagtcgtttgtattttgttgaattttttttaattcgacggatttttcgcccggaaaattcaattcactatatttacatctttttcattatatcacacttgccccgaaaacacaaagaaaaaacggtgaatatttcgtgataacaaaaagcgcaccttattcctgcctgatttttcaaaaacgtccgtttttccctgcttttcccgcgctcgaaaaaacagttttatgcgctctgcgcgggaggagaaatttccccgcgaaggcgtttgtatcttctctcttcctcaaaacggaaaaaacgcgcgcggatttaaaactccgcgaacctccgcgaaaaaaaattgcgcttttccgccgcaggcggcacgcgacgctctcttttcctcgctccgcagtccttagttttatacgcactactattataacgcattttcccttaactttcaagagattgagaaaaataaacgcggcttttataaaaaagacctgcaaaacgcctaaggcgttaagatagggaagggacggcgctcctcattaaaatccgcggcgccccattgactttccaaggataaaaatctgactttttaaagaccgggaacaaaatgtcggctctttaagggcggaaaataaaatccccgctttttgtgcgttttcaaggcgataagaacagggaaaaacggcgttgtgaagggcgaaaaacgccgcttcggggccataaaataaggattcggaaatctccgtcgtcccgacagggcattcccgaatccttctatcccttctcctcccgaaattataggcccgaagcccttatctttttgaaaccttctttctcaaagacgacgttcacagctttgttacggcgcctaaaaagagcggataatcattttccgtatcgacgatcgcatagacgaaaggacgttccaaagaaacaaacagccccgccgattcacacctcatgccgccgatggtgaccgccgcggctttcgtccccgacttatccacctcgatgcgcgttttttgaaggataaaaccgagataggaatcgggcatgagatcggaaaaatccgcgttttgcgccgaaaatgcggtaggcatacccatctgtttcaaaatgtcgctcgcctccacttcatattcgtaagagaacgcgggcattcgacagcttacgctcgttcccattttcccctcctcgaacaatccacgccatttttccgcgttcaaagagttcacgtattccgcgatcggcgtatcctcgtcgggcataagcgccgcaaaagcgagttttccgcccttatacggcttaataaaacccgtcgtattctcgtccgaaagatagacgttttcctccgagctcatcatctgcaccgtcgaaacgctgccgtccgcattgaaaaacgacccgtcgcggactttatcccgctcgtacttttcttcccactccccttcgaaatacaaagcgttgatgagatacataaaatccatagggtttatttcttcgaggattttatctatcatgcccttcgttttgtttttcgtccaaagattgacgtcgctgagcgtcgtttcgtcgaaaggcgaggcataaacttccgcgtcgtagtaatccttattgatttgcaggaaattttcttttatttcggaggcgcacgcgtccctgatccatatcgaatcggcgagcgacagcgatactttttccgtatcgagtccgtcgagatattgcatatatgccgacaaattcttattcatcgcttccctgggcgcgcccaataccgtttccatctccgaaagggtgtcccccccggctccgttttgaatcatcgccaggactgccgccgccgagagaggcgacaccagcgtattgccgcgctcctgaaaagagcgcttgaaaaattccgtggaaaacccgagatttgccgccgtaaaatccgcgctcttccccatacgttttcccgcgtctgccgccagcgtcccggcaagattgcgcgtcttgtcggacaaaggctcgggcttgtaagtttttccgcaggccgctccgctgaacaatattcccagcgccatcgcgcccgccaaaatccgcccgcctttttctttcttcatctcatttcctcctgcttttatttattttttgttttactgccttttaaagcgccgcggcgcgccgcgattccgacgccccttgtcaaaagcgcaacaagagcggcgcaaaaggctgctccttttgtcctcatcgatctttcgcaaacttccgcataagacgcccgtaccatgtcaaggacgggaatcgcggacaattttagagagaaaaggacgacttttcagaaatcaacggcgaaacgggaataaaggcaaggaaaattcggctataaaatcggcgcctcgccgcacgcgattgcgagggaaaagcctcagacgagaagcttgccccttctcccctcttttgaaggaatgatagggaagttaagccgttttcattattatagacgaaaaacgggcggatccggttgcacatctgacaaaaaaatttttcctgtttctatattcttctcccaaatctttccaaaaaattcccgcggagaaaaaattttcataaaatttcttttaaaagcaaaaaaaccgacctcttaaacgcttgctttttatgtcgtttgcgctataataataacgaaataggcgagcgcggattccttacgggatttcacgccttctccaaatatcgctttttatcggacaacggccttgttcgaacgcgcgcgggaaaccgcgtcttattttttcagctccgcttttgcgcacagagctgtttcgtcgcttccctgcccccgtcttatttttttcggcgagccgacaaagtcaagcggctcttaaaaatttttcaaacgatatgaaatccaaacaaaaaaacacggaaaacttcctcggtacggacgcccctttcaaagtggttttaaagctggcgatcccctccatgctggcacagttcgtcaacgtcttatacagcatcgtcgaccgcatctatatcgggcatatgcccgaagtgggaacgctcgcgctggcgggcgtgggcgtgtgcggccccatcgtcacgctcttgtcctcgttcggcacctgggtgggcttgggcggcgcgcccgccatgtccatcaaaatgggcgaaaaggacttgaagggcgcgcggcggattttaagcaacggcgcaatgatgctcgccgtgctttcggtgtcgctcaccgccgccctcttcgcctttaaagagcctctcttacgcctgttcggcgcgggaggcaacagcgctccctacgcgtcggaatatctcacctggtacgcggcgggcaccgttttcgccgtcctcacgacgggattgaacgcctatatcgtcggtcagggacacggcaaggcgggaatgctcaccgtctgcatcggcgccgtcgccaatatcgcgctggacccgcttttcatctacggctttcatatgggcgtcgcgggcgcggcgatcgccaccgtcatttcccaagcgctttccgccctcttcaccgtactctttctcgtcggaaaatccgccgaggtgcgactgagtttcggcggctacgacaaaaaaatcgtcggcaggatcctgttgctcggcctttccccttttctgattatcgccaccgattccgccatgattctcgcgctcaacggcgtactgcgctcgtacgggggcgaacgcgcggacgatcttatctcctccgccaccatcatgctctccttcatgcagatcgtcaccctgcccctcggcggcatttcgggaggcacgcaacccgcgctgtcgtacaattacggagcgaaccgcgccgaccgagtcaaaaagtgcgaaacgtggattttgggattgtgtatcgtctacaccgtcgtcatgttcctcatcgcccgcttcgcggcgggcgcggtggtaaacgtctttacctcggacgccgtattgaaggcagacagcgtaaaatttatcaagatctatacgctgatgatcatcccgctcgcctttcagtacgccctggtggacggattgacggggctgggcatcgcgcccgtcgccgtatccttgtccatgttccgaaaaatcgtgctcatgctgacgttcactttgaccctgccccgcttcttcggcgcggaagccgtgttctgggcggagccgatctccgaccttgtcggcagcgtcgtttccacggcagtattctttgcgctcatcaacaaaattctcaaaaagcgggatatggcggtgcggggactcggcggccacggatcgggggatgcgccgcaggcatccccgccgcaaaccacgtgatcttgtcttcttaccttaaaaccgcggctttgcagtttcaaaaaaacgtttgcgcggcgaagcaaaagacgaatttcgaaagagggtacaatttctcaaaaatacaaaaacgcatttttacccgccgcgctttatcgtccgcggaaaaagcagaccgctatggtttggacaaaaaagacgctcccctgcatggctgc

SEQ ID NO: 3766 - DNA, 22410 bp, Unknown
  16S sequences of unknown bacteria
agcagaccatgtggcagagacaacaatttctgttgtacagcttccgaatgacgaaatgaaaggaagaatcattggacgagagggacgtaatatccgtactctggagacgatgaccggtgtggatctgatcattgatgatacaccggaagcagttattctctcaggttttgacccgatccgccgggaagtagccagaatcgctcttgagaagctgatcgttgatggacgtatccatccggccagaatcgaagagatggttgagaaagctcagaaagaagtcgagacaatgattcgtgaagagggagaagcagcaactctcgaggttggtgtacacggtattcatccggaactggtacgtctgcttggacgtatgaaattccgtagcagctatggtcagaatgctttgaagcattctattgaggttgcacatttgtcaggacttctggcaggcgagatcggtgttgatgttcgcctggctaagagagccggacttttacatgatatcggtaagtccatcgaccatgagatggaaggatcccatattcagattggcgtagatttatgtaagaagtataaggaatctcagattgttatcaatgcggtagaagcacatcatggtgatgtggagccgacatctctgattgcatgtatcgttcaggcagcagatacaatttctgcagcaagaccgggtgcaagaagagagacactggagacttataccaacagattaaaacaactggaagatattgcaaactcctttaagggagtagataagtcttttgctattcaggcaggcagagaggttcgtgtaatggtagttccggatcaggtagacgatgcatcaatggtattgcttgcgcgtgatatttctaagcagattgaagcagagctggagtatcctggtcagatcaaagtaaacgtgatccgcgaaagcagggtaacggaatacgcgaaataactaagataaaagataacaaagaggatgtcgtaacatacggcatccttttctgtttacaaagaaagaaggcaggtacatagtatggcgaagattggatttattggaatgggcaatatgggacatgcaatcctgaaaggagccttaaaagagtatccagcagaagagatgatcttctgcgcaaagacttctgaaacaaagacaaaagttcatgcagagacaggggtgaaatatacagacaacaatgcagaatgtgcaaatcgttgtaagtatctggtgctggcagtaaaaccgcagttctatgaggaggttttaaaagagatccgttatatggtgacaccggagcatgtattgatctcgctggcacctggtaagaccattgatcagttaaagcagaaccttggcaatgataagagaatcgtccgtgtcatgccaaatacaccggctatgatcggagagggaatgacaggtgtcagtgtgaagcagggcgaattgtcaggcgaagagatggatgagatcaagaagctcttcgatgcctgcggaaagaccgaatttatcgaagaacggttgatggatgcggtagtctgcgccagtggaagctctccggcatttgtctatcagtttattgaagcattggcagacagtgcggtcagatatggtatgccaagaaagcaagcttatgtatttgcggcacaggcagtgaaaggtgcggctgccatggtgttggagactggagaacatcccgcagtcttaaaagaccaggtatgctctccggcaggaacgaccattgaaggtgtggcagcactggaagaatatggccttcgcaatgcagtgctcaaagcatcggaagcagtgtacaacagatgtacaaaaatctgagatagagtcatacagacacctccccgtccataagatggatggggaggtgtttttgtgttagggaggatatggaggcagtatacgaatagtggcatcaggtggaaaccagggccgatgatcttctttgcagggatcattgcaggtgttctgatcgcacagacaaaagcaacgacagcagatacaggattattcagtgaatattttctgaatcaatatgcttccctgtctgttaatatagaaaaattgttcttgtacataggtggttatcggataagtcagtatctggcagttgtgtgcgcgggatttcttccgctggcaccggctatactgactggactgatatttctgacaggaatgctctggggaaccatggcgggaatctcagtgatccagctgggtggaaaggggctgatgatctgtgtagccggactgtttccgcagatccttttctatgtaccggcctttgggtgggtgattctgtggatctcctgtggaggatcgaaccgaaaaaaatatgtttttctggcggctttgggattgctttttctgttctttggagttgcatgtgaggcggccttgaatccgggacttgtcaggcagattttacgtaaaatatagtgaaaaaaagattgaaattcacaacatacttggctatactgaatctaatattgatatctgatttgaagggagatatcaatgcagttttcagaggtcgaggagttgttatggaagaagaactgcgatattttgtcgcatatttggaaaatataagaaaggcatcacataatacggtcatgtcctatcacagtgatttgaccaagatgattgcgtatctgcatggacagggaatggattctgtgtctgcggtgcggaccacgcatctgaattcctatgtgctgcttctggaaaaggatggaatggcagcagctaccatttccagatatattgcctcgatgaaagggttctttgagtatctgtttcgggagcatatgatcgaggaagatcctgcatttacgttaaaaccgccaaaggtggagaagaagcagccaggaatactgaccattcaggaaatggagcatctgcttgctcagaccaccgaggatacgccaaaaggatgcagggataaggctatgctggagcttttgtatgccacaggtatgagagtcagtgaactgatcagccttcggatggaggatgtgaatctgcgttttggatggattctgtgcagggatgaaggtcgggaacgtatgattccatttggcgaaaaagcgggaaaagctttgctggtctatctggaacggggaagagatgcatttctgaagaaagatacagagactctgtttctgaactgctctggtgcacccatgagccgccagggattctggaaagtattaaaaggttatgcggcgagagctggtatcgaaaaagatattacaccgcggatgttccgtcattcctgtgcagcgcacatggctgcaggcggagcaagaatgcatatgatacaggaattgttggggtattcagatcttacggcggcacagatctatgcaggatttcagccagaagtaaagaatgaatacagcaaagtacatccaagagggtgagaagtatggaacacagaaaattgatttccacaaaggcagacacattgtttgccttaagaagtctgatccatgagtctgtgattgaggaaatgtatattttgcaggtgggagattaccacagagataagatcggcgtctgccatgagatcatggatcagttcaggggaaggcggattgtggtaagaagctcttccaccgcagaagattctttccagcgttctaatgcgggacattataaaagtattctggatgtggattcttccagtgagcaggagatcattgatgcggtggatgcagtcattgcgtcctatcggcgggatattcacaatctggaagaagaacaagtgctgattcagtgtcaggccagaaatgtcatgctcgggggtgtggtcttcacccgcgatatccaaagtaacaaaccatattatctgatcaattatgatgagaccgggtctacagacagtgtgaccagcggctctgccggaaggatgatgaagatcgtccggaatattaaggcggaggggctgccttcgccatggaaagaattgcttttggcagtacgggagctggagcatattatggatggactggctcttgatattgagtttgccattgacagggactaccaggtgatcctgtttcagatgcggccgctggtggccagctataagcaggcaggaagttatgatgaccacgcattttttgaacttctggaagatgcgggaagtatgtatgaacgacataaaaatgtgattaccaaagagcctatgatgatgtcagatatggcattctggaatccttctgagatcatcggaagtaatccgagacctcttgattattctctttaccgggcaatcattacccatcgggcctggaatcagggaattgcgcggatcggattccggaagcttgaggaagatctgatgcaccgggtgggaaataagccgtacatctgtctggaatatgctttttattctttgattccgcaggcggtggacgaggagctggcactccggttggtgcggtattatcaggatgctctaagacacaatctgacggctcatgacaagatcgagtttgaaatcgtgtttaccagttatgattttggaacagaaaatcgaaccagatgtctgctggagcatggatttacggaagatgaccgtcaggatctaacggaaaaattaaaagaagtgacaatggcagcaatccttcagtttgatgagattctggcagaagacatgacaagtcttcagaaactggaagaacttcgaaaaaaagaggagaggcttcttagaaaccaacaggcagatatttatcagattctcagagcagttcagaatctacgggcaggattacagcattatggaacaccacagtttgccagacaggcacgaatggcatttatggcacgtgcatttttgcggagtcttacagaaaacggaccagcagacgatgaaggaaagacctggttttcacaggaggatacagatgcatttatgcaatcaatatctactgtatccacggaatttgaaaaagattttcgggcattttccatggatgagatcagccgtgcggaatttaatgaaaaatatggccatctgcgagtgggaacctatgatatccgtaccgagcggtatgaccagatgaatttccgaccggggccgtcaaagagtaaaggcaaggcggaagctagagaagatgcattaaatccggggcgtctggcagaggctttgaaggaagctggattacaggtaagtgtcgagcagttgctgcattttatccgctatgccatcgaacaacgggaatattttaaatttgaatttacaaaatcattaagtctcattctggaacttctggtacgtgcaggaaatgagatggagatcgccagaaatgatctgtcctggctggagattgaagatttcagactgcctcagtatatggcgatggaagagctgagagatcagctggaggtgaagatcagacggagacataaacggtatcagcaatatcgggagctttcgttgccggaggtaatcctgaaccgtgaaagtcttgatgtggtggaagtttacgaggcgagacctaattttattacgaccaaacggatcgagggagaagtggtgcttctggaggaagagccgggggtggatattcatgataagatcgtagtagttcccaaggcggatcctggctatgagtgggtatttgccaaaggaatcaaaggatttattacctgctatggtggtgcggcttcccatatggcgatccgatgtgcggaatttgaaataccagctgctattggttgcggagagaagatatataattatgtttcttctctgagctatctgacactggactgccgggctggaaagatcgaggaaggaattcagtatcggaatttaagtgcgttgatcacccaaagagagggggtcaatcagtacggagatccggtagatattctggaatctggctatgtacggttctatgaattacttggatttattccaaagaccatttccaactttaccaaaaatgtggagatgatctttaataagaagagagatcttctgatcgtggtgggaggcggttctcttccgccgcagttgtatgacagacctcatgaagatgagctgcaacccaaccgtgaccggatggaagagcaggtgatccattattgtgtggctcacgggattcccatcattgctacctgtcgcggcatgcagtatatcaatgtgatgtttggcggaaagctctggtatcatccgaaacttccggtgaaccggaccagaggcgtggatcatcaggtgtggctggtgaaggaacagcgaaatatctgggtcaacaattatcattctgactgtatctatgaggaaggtctggcttcttgctttgaacctcttgctattgacagggaaaaccatgtggttgaggcctatggttcggatgaaatgaagattctggcgctgcagtggcacccggagcggagatttgagacagccaatgcttatgaggaaacgagaaagattatactggattttattcagaaatatgtgaaataaaaaatgactttgcatctgttgttttggcgtgccgggaggtgtgtcgtctgattacacatcacagtttctgccggcggtaaagaatgccacactgctggccataggagagagtgccataccggagatatccgtagattatggtctgttgggaaataatgtgaaagttacagtcacacattccatccctttgcctggtgttatgaaatatctgggatttgagaatgatttctcgctctatgccacatcgtatacatattcggcaaatccaacagaatttgtcagaaatgtagatctggcatttgatatgacggcgtacatcttcgacaagctgggcatgtcggataagtacaacggaatggtagagagaatcaacaaggcacttgatgaaatattataagagggagtaagttgtgttcggattttgtgaaaaaaacaagggagccatatctgtatttctgaccttgattctgctgccgacactgttgcttggcgggctgacaacagatgcagccaggatctatatgtccaaagtcgtgatctctgatgctggagagatggcgatgaatgcaggacttgctcagtatgagacagaacttcatgatgaatatgggctgttctccatggagaagacactggaagacatggaagatgatctggctgacttttttaataaatcattaaatggaaaaggtctggatggcacagaggactatgataagatcctggatctgatcacagagaattttaatgcttataatgtggaaggatcacagatctacaaaggtgaagtggagaagcagcagatcgtagagtatatgaaataccgggcaccggtgtgcctgacagaagaactgctgggaaagcttgatgatctgaaaaaagcacaattgatgaagaaagccatggtagctcagatggacttcggagatgccatggaggattgtcaggactccatggaaaatgcactgaaacagttggatgatctgaatgcgcagatcaatgcattcccggataagacaaccatcgcgtaagcgctggagcggatgaagcaggactaccagacgaccatgtccaaatgtattctgatgcgcgcggccatcgcaaaatacgatggaaaggcagacggggatgatgtggagtcactggcctggagctttattggagctgcagcaggggtggatgtgtcagtcccttatgaccagggaagcgctgcagggtggaaaatggacattgatccagctggacatttttaaatagaattgcagaacaggagagaatgaatcatggaatggaattttacgtatgagaaccaggaagccagttcgtttcttgtctatcaactggagaagtccgagcagcttgacacggttggcatgggaatgctgagcaacaatcagattccgcatattcttccgttgttgtatacgcagatcgatgaggaacggtatctgaggtatgcgattccgggcaggattccgctgggggattatctggagggaatggtcagcaaggagagactgctgaaagtgcttctggagatctgtgatgcagtggaagaaggtcaggcgtatatgcttgacagtagcaagctggtgttggaaaagcggtatattttcaccaatgtttccacaggagaagtgtcgttggtctatcttccggtattcgggcgggaaacggctgtggaactttgcaactttttccggaagatcatctttggaacacagtttgattccagagaagactgcagctacatagcgacaatcatcaattacctgaacggagatgtgcattttattgtgacggacttcaagaagcttgtgcagactctgctgggacagagaagtcagccagctgcaagaccggtggaaactccagtccagaagccggcggcaccgacaccggtgccagtgcccaaaccggcgtccgtaccgaagccagcaccggcaccgagaccagtagccgcaccaggaccggcaacaccgaagccaatatccgtaccgaagccgtcaccggcatcggtatcgatacccacaccggaaccgccgaagaagaaaggattttccctgaaattcccgtcgaagaagaatgagaaaccaaagaaggaaaaaccgaagaaggaaaagccgaagaaagaaaaagcagggacagcgattccatcgatcccgattccgggcagagagaaccgaaagccggaaccacagggctttacagaagtgaaggcacaacctgcagagtgggggaatgcgacccgcccggcgaattttggacagaccagtgtgttgagccaggagatcggacagaccaccgtgttaagtggcggaccgcaggcatcaggtgcagagctgatcagaaagaaaaatggccagagtattccgctggacaagtctcttatccgtattggaacggagcgttctttcgtggactactgggtgtctgataacacagcggtctcccgttctcatgcagatgtgatcagccatgagggagtatattacatacgggataatcattccaccaatcatacatacgtgaacggagcgcagatcccgtcggaacaggaacagatgctgaaggatggggatcagatccttctgggaaatgaaccatttgaattcagacaaagataagagaagagagggaaatacagatgtcacgatcagagatgaaaacattagcaaagagacagatgaaaggacggtggggaagtgcgatcctgatcatattgctgtccggaatcatcggaggcgcagcaggactgattgggagtatcttaggaccgctggaaatcctggtggttatggtggtcaatgcaccgatgacgttgggtgctgcgatgttttatttgcatgtgatccgcggcgaagaggccggagtcggagacctgtttcagggattcagtgattttaagagatcctttgcgctgatgttcctcagaagcgtctacttattcctgtggacactgcttcttgtgattcccggaattataaaatcttattcatatgctatgtcattttatgttcttcaggacaatccggagatgtcggcaagtgaagctatgaacaggagtagagagctgatgaaaggtcacaggatggaactgtttgtccttcagttctctttctttggctggttcttgttaggcacgattacactgggacttgccaatttctattcgattccttatatgcaggctgctatcgctgtattttatgagaacctggcaggaaacaacagagattatggtgcgacagagtacaacacagagtatagagcagagtacacttcagctgcagtggctgataacacacaggcagagcttccgtatcagcagttcagtggagcaaccgaggtactgggaagcggatctgctccgacaactgtgctgaatcagaaccagattccgaatcagatggaaggctcctttaccggcgtgcaggggagcctgacaggggttgcctataccttggatgaccgtgtggaatacgctgtaggccgcgatgaggaactatgtggaatcctggcagaccgggacaatacatccatcagccgcatgcactgtaccattcagttcgtatccgcccagaacggctattatgtgacagaccagtccttcaatggcacgtttgctgacggtgtaagactgccaaaaggcgagccgcagttcgttcacagaggaactgtgattacactgggggaccagagagaaggattcagactggattaaaagaagaaaaaaaggattccgatcttatatacttgtgaactataattgcatttggtataatataaaaatgaagaaattctggtaaatgtggacatggcaggtgagaaagattggatattgcaaaacagattattgaccaaagagtgaataaaatactggaagaaaatccggaattattttcggattcagatgcagagcggaagaaatcgaaagcttttctcctgctaggggtagcggcatatctggatatagatattgcagaagcagtgcagtatattacagatggtggctcagatggaggctttgacgcggcttatattgaagatgcgcaggattcgcagctgaatgttgtcctgttccagtcaaaatattcacggaaactggacagcgacagtaattttccggctaatgcagtggaaaaagcggtcaatacggtgaaatgtgtgtttgatccgtcggctaaaattcagttaaatgataaaagtcgtgaaaaggtggatgagattcggtcatttattttagatgggcatattccgtatgtcacatttgtgatgctgaataatgggctgtcatggaaccgggatggacagaatcatattgcaaatgcatttggcgggcaggagcaggtttcatttgttcattattcacatcatgatattttgaattatattaatcgaagtaaaccgattgatacgcagttgaattttgcaggcaaagcaatccaggaagatttcaattataaaagggtgatgctggggcgtgtttccgtaaatgcagtgtatcagctgatggatgagtatggagatcgtctgctggaaaagaatatcaggcgatatcttggaaaaaatgtgattaacgaacagatcggcaatacattattgagtgaagataagaggcagaattttttcttctttaataatggaattacgatgatctgtgaaaaattcaattataatggtttacaggaaaagaactggaatgtgaagattaatggactccagattatcaacggtggacagacatgcagaacgatttatcagactttaaaagaccatggggagattgatttttcacaggtatatattctggttcggctgtatgaagtaagtggagatgaagacatcgtacatgatatcacatacgcaaccaacagtcagaatcctgtagatttcagagatctgaaatcaaatgatgaaattcagattctgttagagcagagcgcgaaagatctgggatatatttacaagcgaaagagagataatcttggcaatgccaatgtgattccggcaaccgttgcagcggaggctgtatttgcggtctggagaggaaagccgcatctggcaaaatataagagaaatgatttctttgataaatactatgctgaaatatttgaaaatctgaatgcagcacagatgattgtagcagtgcagatattccgctattgtgacaatatgcgtaaacgttcagctgaagatgaacagattcgtgctcaacggccattcagtcagtattttctggcttatatgcttggaaaaaggctgttgaacgaatgcgggatttctctggatcaattgactcatataaattttgaaaaagtaaaagattattttgaagctaaaaaagaaagtctttatgcagaggaagaacatcgactggttgacattctgaaaaattattttaatcaaagggatcttgaagaaattgatggacggacgatggcagcggtattccgaagatttgatgttttagttcgttatttatcctaacaaaaaagtggctttgtattccgtaaaagaacacaaagccacttttttgtatattatattagcactcctccgcgatctcgtagagaagtctttcggttttttcccatccaagacaagggtcggtgatggattttccatagatgtgatcatggatcttctggctgccatcttcgatgtagctctcgatcatcagtcctttcaccagcttatggatgtcgttgttataacggcggctgtgaaggacttccttggcaatacgaatctgttccagatactgcttgttggagttagaatggttggtatctaccacacaagctggattctggaggtttttctgagcatacagctcgcataagagacgcagatcttcgtagtgataattcggaagaacctgcccacgcttattgacagcaccgcgaagaaccgtgtgagcaagcgggttgccggtggtgtccacgtcccagcctcgatagataaaggagtgagcatgctgagcagcgacaacggagttcagcataactgtcatgtcgccgctggtcggattcttcataccggccgggacatcaaagccactgacagtcattcgatgctgctggtcttctacggaacgggcaccaactgccacataagagagcagatctgccagataccaccagttctccgggtaaagcatctcatccgctgcggtaaggccggtctcttcaatatttctgatatgaagcttacgaattgcaatcagaccttccagaagatctggtgctgcttccggatccggctgatgaaccattcccttgtatccttcaccggtagtacgtggcttgttggtataaatacgtggaatgatgatgcatttatctttaatctgctcctggatcggaaccagacggtgcaggtaatccatgacagcaggctcattatctgcggaacacggtccgatgattacgagaaatcggtcgtctgcgccagtgatcacgtcgcggatctctttatctctctgtgcttttttagctgcattttccggggaaagcggatacatggctttgatctccttggggataggcagctttttgttgaatgtgaatcccatggtaatctcctttgttactagtttctatgtttgcgaaatgatattcgaaaacattatagtatacttcactgagattgtaaataaaagaacttccgggcggaagtgaaaagtttccagatcccgaaggacaggagcagaagtatatacaggatcgcgcacagacagaggtttccagccagaataaggattgctgacaaggaacggaaaatcatacagtgagacaagggtttcaacagataaatacctccggttgataagagcatggcagcagcgggtttcagaatataggcatcaagcccgatggttgggtgaatgtgccgggagactgccagaagcccggacatgcacagcagcaactgactgatcagaatgctccagagaacaccttcgatgccgaagcggggtacgaagagcagaagagccaggatccgcaccagcactgccgccagctgattgatgaatgtgataccggtcttgccaagaccgtggagaatgctgttgatatttccggtaagatacagaaatgggcagatccatgccaatgtacatagaaagcttccggctaatggttcgtggaagacaacggttcccaattcgtttccgaaaaataaaaaaattcccatacagaatattcccatgaggagtccgaaaagaatcgtatattcaatagaaagagaaattcgttgttcatttccgcgggactgttcttctgagatggtcgggagcagcatggcagacagagaaaaggtcactgcgttgggaaacatcaggaaggacagggacatgccggtcaggatgccatagagactcaaagattctgatacggacagaccggatgtctggaggcttacaggaatcagcactgcctccgcactttgaaggagtgtcagacttaaacggctgccggtgagaggcaacgccatggaaagaatcttccggcattgaatacgcagtgcagatagtggcagagtagaacgcttttcggaaacggtaaagtggagcatgaacagggcggaagcagcctctccgaagagaagccccagtactgccagtgagggggtgattgcccggctctcctggataaaaatgcggtaaagcaagattacagaactgattcttgctgcctgctccagaatctgggagatggccgggagggatgctttcttctgtcccagataatatccctggagacagccgtggatcgcacttagagggatgaccggagccagaatacgtaaaggtgtgacacagcggctttcgcagagcagtttgtctgctatgaattctgcctgattccagagaaggacgcagaccagcacagaggcggacaaggacaggaacagtccggctttcaaagcgtaggatcgttctttttctacagctccggcggtgaaacgggagatggcagattcaataccggaggcggtacatgcatgacatacggcgaatacaggaaaaataagctgatagatgccgattccttccgcacccagggcatgtgccaggaatatcttatagaagaaaccggaaaaacggcacagaagacctgcacaggtcagcaggagcgtgcctttgatgaaatgaggaaatgatcgcatagaatttcgctgttcttttttcctataatatattagagaagagtgcttgacagaactgcgtaccagtgttattcttttacatgaaatccgagtaaaaagctcggaattgaaacggggtgaaagagatgaagctgtctacaaaaggacgttatgggctcagagcgatgatcgatctggcattatatgcggagaatactccggtgtcgattgcaagtattgcagccagacagcacatatccgagagctatctggaacaactgatcgcgaagctccgtaaagcaaatctggtaacaagcgtgcgtggagccggaggcggatatgtaccgggacggccggtggaagagatctcagtaggagatgtgctgagagccctggaaggaaatctggatccagtggagtgtccggggatcgaacatcagggcggctgtgatggttccgatgtatgcgtgactaaatatgtatggaaacggatcaatgacagtattaaccagactgtagatgaaatgatgctcagtgatctgctggcagaaagccgggaagtacagaaaaaacgtcagattccagtatcatgttgtgagaaaaaggagtgataaaacatgggtgaagagaagaaattaatttacctggataatgcggctacaaccaagactgcgccggaagttgtggaggcaatgcttccgtattttacagaactgtatggaaatccgtccagtgtctacagcttttcacagaaaagcaaagaagctatcactgcaggaagagagaagattgcaaagactcttggagcaaatccggaggaaatctattttacagcaggtggaagtgagtctgataactgggcattaaaagcaactgcagaagcttatgcttccaaaggaaatcacattattacatctaagatcgagcatcatgcaatcctgcatacttgtgactggctggagaaacatggatttgagatcacttatgtggatgtagatgagtttggtaagatcaagcttgatgaactgaaaaaagctatccgtccgactaccattctgatcagtgtgatgtttgcaaacaatgagattggtaccattcagccgatcaaagagatcggtgagattgctcatgagcatggtatcctgttccacaccgacgcagtacaggcatatggacagcttcctattaatgtagatgagctgcatatcgatatgttaagttccagcggacataagctgaacggaccgaaaggaattggcttcctgtatattcgtaaaggggtaaagatcagaagctttattcatggtggtgctcaggagagaaaacgtcgtgcaggtacagagaatgttccgggtattgtaggatacggtgtggcagcagaacgtgcagcaaataccatggaagagcgtactgcaaaagagcgtaagattcgtgaccatctgatcgaccgtgtacttgcagaagttccgtacaccagactgaatggacacagaactgaccgtctgccgaacaatgcaaacttcagtttccagttcgtagagggtgagtccctgctgattatgcttgatatggatggcatctgtggctccagtggatcagcctgtacatcgggatctcttgatccgtctcacgtactgctggctattggactgcctcatgagatcgcacatggttccttacgtctgactctgagcgaggagaccaccatggaagatgtggactatgtagtagattgtattaagaaaatcgttgagagacttagaagtatgtctccgctgtatgaggatttccttcggaatcattaattacagccattaataagaaaagaggatttagaatatgtatagcgataaagtaatggatcatttccagcatccgagaaacgtaggagagattgagaatgccagcggtgtaggtacagtcggtaatgcaaaatgcggtgatatcatgagaatttactttgatatcgatgacaaccagatcatccgtgatgtaaaattcaagacctttggctgcggtgcagcagttgcaaccagcagtatggcaacggagctggtaaaaggaaaaagcatctatgaagctctggaagttaccaataaagcagttatggaagcactggatggacttccacctgtaaaagtacactgttctctgctggctgaggaagcaattcatgcagcactgtgggattatgcagagaaacatcatattaagattgaaggactgaagaaaccgaagtcagatattcacgaaggcgaagaagaggaagaatactaggatgaagaaaaaggtcgttgtcggaatgtccggcggagtcgattcatccgtggcggcctggcttcttcttcagaagggctacgacgtgatgggtgtgaccatgcagatctggcaggatgaagtgccggagcaggtggaggaaaacggcggatgctgtggactttctgctgtggatgatgccagaagagtggcatcccgtctggagattccttactatgtcatgaattttaaacaggatttcaaggaaaatgtcattgattattttatggatgaatatttaaagggacatacacctaatccctgtattgcctgtaaccgttatgtgaagtgggagtctctgctgaagagaagcatggatattggcgcagattacattgcaaccggtcactatgcccggatcgagaaattgcccaatggacgttatgcgctgcgtaaatcagcgacttcggccaaggatcagacttatgcactgtataatctgacacaggaacagctgtcaaaaacactgatgccagtgggagagtacaccaaggatcagatccgcacatttgcagaagagctgggtcttccagtggctcataagccggacagccaggagatctgttttgttccggatggagattatgcaaagttcattgaggagaactctggaaagaagattccagaaggaaattttgtctggacagacggaactgtgatcggaaagcataagggaatcacgcattataccattggtcagcggaaagggcttggacttgccatgggaagacctgtcgttgtgacagagattcgtccggagaccggtgaagtggttatcggtgaagcagatgccgtctttcgtacaacgcttcgtgcggatcgtctgaactggatgagcgtgccggacattgaaggggaagcacgttttctggcaaagatccgttataaccacagcggatccatgtgtactgtgcggaagatcgaggaagatctggtggaatgcacctttgatgagccggttcgtgccgtgacacctggtcaggccgttgtattttacgatggagactacgtggcaggcggcggaacaattctgtaaataaataacagcccgaagcggcagcacaatttattgctgtcattccgggctgttgtggtttttatagaagtttttatgctgccattccagactgtcatagttggctacagcggcagttccatcggggcacgtttcttgaatatataataggaagaaaatccgcaggagatcagcaactctcgtaatcttgagaattcataggccagatacgcaggatcatgggcatctgagccgatggtcagcaatttcccgccaagttctttataacgtttcagaatatctgtgcaaggattaggttcgccgagggcatatttatatccacccgtgttgacttctaacgcaatttcatttttgatcaaaatatgaaggatcgcatccagaatttcccgatattgtgtccatgcataatttttgttttttgtgggaccatatcgaacaacatagtcaagatgtccaagactgtcaaagttcgtatatgatttcagattctgaaggacacattcaaagtattcccggtaagcggtctgctcttctcgcccttcaaaaaaagaagggtagtaagggtcacggctgttgacgagatggatggagccaatcacataatcaaagggatgagaaaacaccagattgtgatgccggctggacagatagggctgcagcccgagttccacaccgatcatcagatcgatccgatcctgatatcgttccttcagtggagtcatatagtcaaaatattttttcgggtcaaattcaaagcagacaccgccgtctgtgtaatcatagtccatgtggtcggtcagacacagatgggaaagtccgagtgaaattgctttttcaatcataatttccggtgaaaatgaaccatcaccggagaacaaagtatgtacatgtgtatcagcaataattgccaaaatctgttcctcctgtgtaaaaatagtcctgtcctgacccatgatagaagaaaaaagcaggaaagtaaagtaaaaaaatgtggaatcttgatttttggtattgatattttctggcaaagcagttaaaataagtaacggttgatgttcttttaacaatcatggcaagagttaaaagatcagaaatatatcattattcaacttttaggaggaattgaaacatggcagtaaaagtagcgatcaatggattcggacgtattggccgtcttgcattcagacagatgtttggcgcagagggatatgaggtagtagcaatcaacgaccttacttctccgaaaatgcttgcacatctgctgaaatatgattcttctcagggtaaatatgctctggctgacactgtatctgcaactgatgattctatcatcgttgacggaaaagagattaagatttatgcaaaagctaacgcagctgagcttccgtggggagagatcggcgtagatgtagttctggagtgtaccggattctacacctctaaagagaaagcttctgcacacatcactgcaggcgctaagaaagtagttatttccgctccggctggaaatgatctgccgactatcgtatacaacgtaaaccacaaaactctgaccaaagaggatactgttatttctgcagcttcctgtaccaccaactgcctggcaccgatggcaaaagctctgaacgacctggctccgatcgagtctggtatcatgtgcaccatccatgcttacactggtgatcagatgatccttgacggaccgcagagaaaaggcgatctgagaagaagccgtgcaggcgctgttaacatcgttccgaacagcactggtgctgcaaaagcaatcggtctggttattccggaactgaacggcaaactgatcggtgctgcacagcgtgtaccgaccccgaccggatctaccactcttctgttcgcagttgtagacaaagctgtaaccaaagaagagatcaacgcagctatgaaagcagctactaccgagtccttcggatacaacgaggatgagatcgtatccagcgatatcgttggtatgagatttggttctctgttcgatgctacccagactatggtttccccgcttccggatggaaagacccaggttgaggttgtatcttggtatgacaatgagaactcctacgtttctcagatggttcgtactatcaaatacttcgctgagcttgcgtaagcattaagccatgcaaaaggcgtaaaatgcaggcgctatgtgcttgcacatgagcggctggagtttgcgacttttatagggcgatagcccgttcaccgagatgaaacgaagtggaatcgaggggcatggcgggctgattgtttaagacctcaaaaggtccggtcttcaggaccggacctttttttcgtctttgtgaaagatcctgaaagaaaggaagttatttatcatggcattaaataaaaaaacagttgatgatatcaatgcaaaaggaaaacgtgtccttgtaagatgcgatttcaacgtaccgctgaaagacggcgtgatcactgatgagacccgtatcgttgcagcacttccgactatcaaaaagctgataggtgatggtgcaaaagtgatcctttgctcccatcttggaaaagtaaagaatggtccgaacgagggagaatccctggcaccggttgcaaagcgtctgtctgagaagcttggcaaagaggtagtattcgtatctgattatcatgtaaccggagaggcagctaccaaagcagtttctgagatgaaagatggagatgtagttcttcttcagaatacacgtttccgtggtgctgaggagaccaagaatggtgaagagttcagcaaagagctggctgacctggctgatatctatgtatgcgatgcatttggttcttctcacagagcacatgcttctgttgcaggtgttaccaaattcatcagcgcaaaaggcggacagaatgtagttggatatctgatggagaaagagatcaacttccttggaaatgcagtagagaatccggttcgtccgttcgttgcaatccttggtggtgcaaaagtagcagacaagctgaacgttatctccaacctgctggagaaatgtgatactctgatcattggtggtggaatggcttataccttcctgaaagcacagggcgcagaagttggtacttctctggtagatgatacaaaacttgattactgcaaagagatgcttgagaaagctgaaaagcttggaaagaaactgctccttccggtagatactaccattgcagcagcattcccgaatccgatcgatgctgaaattgctgtagaagttgtagacagcaaagcaattccggctgatatgatgggactggatatcggaccgaagactgcagagctttacgctgatgctgtaaaatctgctaagaccgttgtatggaacggaccgatgggtgtatttgagaacccgatccttgcaaaaggaaccatcgcagttgcaaaagcacttgctgagaccgatgcaatcactatcatcggcggcggcgattctgcagcagcagttaatactcttggatttggcgataagatgactcatatctccaccggtggcggagcttcccttgagttcctggagggcaaagagcttccgggtgttatggctgctgatgacaaataagttttcgtaaaataccgcggcagtttcagctgcagacggatattttataaagtatatcaggaggatataagaaatggctagaaagaaaattattgccggaaactggaagatgaacatgactccgagtgaggcagtagagctggttaacacactgaaaccgctggtagcaacagaagatgcagatgtagttttctgcgtaccggcaatcgacatcattccggtaatggaagctgctaaaggttccaatatccaggttggtgcagagaacatgtactttgaggagaaaggtgcttacaccggagagatctccccgaacatgctgactgacgtaggagtaaaatatgtaatccttggtcattctgagagaagagagtacttcgcagagaccagcgagactgtaaataagaagatgctgaaagcatttgagcatggtctgactccgatcatgtgctgtggtgagactctgactcagagagagcagggcgtaactatggatttcatccgtcagcaggtaaaagttggtttccttggagtaactgctgagcaggctaagaccgctgttatcgcttacgagccgatctgggcaatcggtaccggcaagaccgctactaccgagcaggcacaggaagtttgcaaaggcattcgtgagtgcatcgctgagatctatgatgaggcaactgcagaagcaatccgtatccagtacggcggatctgtaaatgctgctaccgctccggagctgttcgtacagccggatatcgatggcggactggttggaggagctgctctgaaaccagatttcggaaagatcgtaaac

SEQ ID NO: 3767 - DNA, 4398 bp, Unknown
  16S sequences of unknown bacteria
ccgcccttggcggcgtctttcttcctctattctttcttcgctggagaagaaagaatggagcccccggagggcgctagcaagcttgtctggtagatattaagaagtagggatttttaaggctagtttttgaacatggagcagtaacgctctgcctgcgtagtcgctcttgtagtggagaaatccctctacgctgtataggttcgactacgctgtataagctcgagtgacaaaatcagcacgctgtataagctcgaggagcaaaatcagagattttgactctcgcttaagattttgactctcgcttattcgccaaacgctgcgcgtttggagtctcacccaagtcagcgcgttcgcgccgtgccaggtgttacgcagccccgggggcttgccccgtgtacatccccggaaccggcgggtttcggggatgtgcggcatctgccaggggcacccgttaatcattcaccgttctaatggaaagaaaacatgtctatatttaaaaggaaaccaaagccgcagcctgcggctgtgagcgatgcgccggtgccggtgcatatcgccattatcatggatggcaatggccgctgggctaagcgccgggggatgccccggtacgccgggcacgcctatggggcggagacattccgccgcatcgccaaccactgccgggatatcggcgtccgctatctgacggtctacgccttctcgacggagaattggaagcgctcggaagaggagatcagcgccatcatgcgcctgctgggcgattacctgaaggaagccctggcggatatggataaaaaccgggtccgcttcgtcttcttcggcgatctgacccgcctttcgccggagctgcagaccctgtgccagcaggcggcggaccgctcccggcagtatgacggggtgcaggtcaatttctgcctgaattacggcgggcgggatgaaattctgcgggccgcccggcgccttgcccaggcatgcttggacggcaaggcaaagccggaggacctgacggcggcgcagttttcgagtctcctctattccgccggtgtgccggacccggagctggtcattcgccccagtggggagctgcgcacgtccaacttcctgctgtggcagacggcgtattccgaatacgtatttctcgataaactctggcccgactttacggcagaggatctcgacgcggccatcgacgcctaccggcatcgctcgcgccgttttggaggtgccaaaccatgaaaactagaatcctctctgctgccatcgcgctgccgttatttctggcggtgctgctggtgccggtgacttggccgacggccctgctgctggcggcgatgtgtgccatcggcgcccgggagctgctgtgggcgacgggcctggtgccccataagcggctggtggcctatgccatgatctgtggggcgctggtgtgcctgtggagctatctgggctgtccccgctggctgggccttgcgggcgtgacggcctttttcctggcccaggccggggagctgctggcggcccacgccaagctcagcttttccgagatcgccgcgatggcctttgccgggctgctggtcccactgctgctgtcatccctggtgcgcatccgctgcatggaccatggcgcggcgctgatcttcatgcccctggtcctggccttcacgtcggactccggcgcgtatttcgcgggccgggccttcggcaagcataagctggccccggtcatcagcccgaagaagacggtcgagggcgccatcggcggcgttgccagcacggtgctgttcgtcctgctctatggcctggtgctgcagctggcctgcggctttcaggtgcactactgggcggggcttgtctatggcatcgccggcgccgtatgcggcatggtgggggatttgatgttctccgtcgtcaagcgccaggcggggatcaaggactatggcaatgtcctgcccggccacggcggtgtgctggaccggttcgacagcatggtcgccgtcgcccccgtggcggagctgctgctgttggtgctgccctttgccgtaaaataacccgggatctccccttgaaaggaggaacgcacgatgatgcaagccatttccgtcctcggctccaccggctccatcggccgccagaccctggacgtcgccgcaaagctggggacccgcgtggtctgcctggccgccgggcagaatcttgaccggatggaggcccagtgccgccagtttcacccgcgccttgccgtgatggcgacgcgggaggctgccgcggccctgaagctgcgcctgggcgactgcgcgattgaaatcatgtacgggatgcagggtctgcttgccgccgcgacgctgccggaggccgacgccgtcgtcaccgctgtcgtcgggatgctgggcctgcggcccacccttgcggccattgatgcaggcaagcgcatctgccttgccaataaagagacgctggtttgcgccggggagctggtcatggcccgggcccgggagaagggcgcggagatcatccccgtggactcggagcactcggccatcttccagtgcctgatgggtcagccgaaaaaccgggtgcgccgtttgcttgtcacctgctccggcggcccgttctacggcatgacgccggacgagctgaaaaacgtcacaaagcacgatgccctgtgccaccccaactggaccatgggccccaagatcaccgtcgactgcgcgacgctgatgaacaagggcctagagctcatcgaggctatgcgcctgtacggtctgcccctttcgcaggtggaggccgtcattcaccggcagagcatcgtccactccctggtggaattctgtgacggcgccgtcctggcgcagctgggcacgccggatatgcgcctgcccatccagctggccctgacctaccccgaccgcctgcccagcccggccccggacctggacctgctcacctgcaggcccttgacgttcgacgcgccggacgaagcggccttcccgtgccttcggcttgccaaacaggcggcggcgcagggtggctgcgcttgcgctgcgttgaacggggccaatgaagcggcggtcgcgctgtttttggaggaaaaaatcggcttttatgatatcccgcgcctggtcgaggcggccctggcccaagcgccgggcacgaaggacccggatctggaggcgatcctggcggttgacgcggcagcgcggcagtcggttgcggtcgcggcgcgcgggatcgtgaggtaattgctttgtatattctgtttgcgattttgattttcggctttttgatcttcatccacgagctagggcattttatgacagccaagctcctgggggtgcaggtcaatgagttttctatctgcatgggcccggccctgctgcagcgcacccggggggagacgacctactctctgcgcctgatccccatcggcggctattgcgccatggaaggggaggacgaggacagcgacaatccccgggccttcacccgggccaagacctggcggcggctcattattctcgccgccggtgcgtttatgaatttcctggcgggctttctcgtcgtgctcatcctgctcagctcggccgacggcttttcgacgccggtcatcgccgatttttacgacggctgcgccctggaatcccaggacggtctgcaggccggggatgaattctataagatcgacggcgagcgcgtctatatctactccgacgtcgccatgctccttgcccggaacacgacgggcaaatttgacctggagctccgccgggacgggcagaccgtcaagctctcccaattcccgatggagaagcagaccttcaccgtggacggccaggaggtcgagctctacgggatgcagtttgccacggagaaaaagacggccgggagccttttgaaaatggcctggaacaacagcctgtattttgtccagctggtgaagctgggcctgcacgatctggtgaccggcgcggtgggcctgaaggatatgagcggccctgtcggcatcgtcaagatcatctctgacacgggcaacgccgcaaaatccgtctccgacggggtcagcaatgtgctgtacctgggggcgttcatcgccatcaacctggcggtcatgaatctgctgccccttccggcgctggacggcggccgcatcgtctgtctgctgctgacggctattattgaaggcatcagccggaagaagctgaaccccaagtacgagggctatgtccacacggcgggcatggtgctgctgctggcgctgatgctgtttatcacgttccatgacgtatttgtactcttcacaggaggctccacatgacaaagagaatccacgtgggcggcgtcgccattggcggcggcgccccggtctccattcaatccatgctcaacacgaagacgacg

SEQ ID NO: 3768 - DNA, 2396 bp, Unknown
  16S sequences of unknown bacteria
ttgataaataattcttgaaaataggtggcggcttgctgctctaaattatcgtttacctttgcattacatctaattttttcgctgatgctacttgcgaatccaacgatactttttctttctcgctcactcggaatcggaatcattagcttttgtaaaaaatctaaatcaaattttcccgctccaattcctgtaactccaacctttgccatcaaataatctttttgcgacaacaaccaataaaatataaactcgttttccacttctccatatgaatccagacactttatatcttgattgaaagccacatctttttcaactctagcaattggtattccattaaaaagaccgcttcctcgtgtaagaagtaagatgcttcccttcggcgcaatcttgcttccagcttttagcccttcttctgttataaacaaatcagatgtgtcgatattctccgttttcaatgtctttgcactaatccaaggaatagttccatcccaataatcatctctttttttactcggtgttcctcctgatgcaaaagatacaagctcaccaagtgggcgatatgtccattcagatttcatacccaatcgcccccagcttctccttgatttctgcttccagcttgtgcgactgcttgaacaaatctgaaagttctgaggtcagccgaaccattttttcttcaaaaggttcaccatcatcttcctgttcctcaacgccaacataacggcccggcgttaaaatataatcctgctccgcaattttctctgtatcaacaactgcacaaaaaccttttacatcttccagtgtgccattaacatgggcattataggtatcggcaatttttttaatatcctcatcggtcagttcacgcagcttgcggctcaccatatcgcccatcttccgggcatcaataaacagcgttttaccggcttgtttcttgcgtttggtgataaaccagagcgaaaccggaatctgggtcgtatagaaaagctgtgtcggcatagcgatgatacaatccacaaggtcagcattcacaatatttttgcggatgtcaccttcaccgccagactgagaggaaagagaaccatttgcaagcaccatacccatgcggccacccggagcaagatgataaatcatgtgctgaagccatgcaaagttcgcgttgcttgcaggcggcataccatactgccagcgtacatcatctttgagctgctctgcaccccagttcgacaggttgaaaggaggattcgccatgatatagtctgcccgcatggtcgggtgctggtcgtcaaggaatgtatccgccgcatactttccaaggtcgggttcaatgccacgaatggcaaggttcatctgcgccagtttccatgtggtcgggttggaatcctgtccataaatcgagatatcgttgatatttccactatggttctctacaaattttgcagactgaacaaacataccaccactgccgcagcaagggtcatacactcgtcccttaaacggttgcagcacttccaccagtgtccgcacaacacaggacggtgtaaagaactcgccgccacgcttgccttcctgctctgcaaacatcgacaggcagtattcataagtgcgccccagaatgtccttttcgctgccgtgttcaatcattttgatgttcgtaaacaggtcaacaacttcgcccaaccgacgtttatctagttccggacgcgcaaaatttttcggcagaatatcttttaggcgcgcgttttctttttcgatagcacgcattgcatcatcgattacctgaccgatttccgggtcatgtgcctttgcagaaacatcgctccaacgcgcaccagcaggcacaaagaaaatgccttccgaggtgtactcatcacgatcttcctcaaagccatcaccatccgcaaccaactgattgtacttatcttcaaaacgatccgaaatatatttcaagaaaatcagaccaagaacaacgcccttatactccgaagcatccatgttgccccgaagcacgcaggcagcattccaaatctgcttttcaaatccaatgtcggcggtgtttttctctgccatggttcaatacctccgttttagctcaacaaattctgctctgagtatagcacagatgtgccgattttccaatttgtgcgcattaattctttgctagatgcttcaatttccagtagataagtcctactatcactgctttagcacaataaattttacaaaaccatcttgacgtatcctacataccgtggtatttttcttgtaaatcccaccgctcttgtggattggtttgaaaccatccacaagatgtggtcgtgttcattttgaacacagccacagaaagtggttggttatcaccgtgagacccaccacttccgtgaggaaaagtc

SEQ ID NO: 3769 - DNA, 9008 bp, Unknown
  16S sequences of unknown bacteria
ctccgttggcctttgcttcgtaacgatgggcggtgcagagcttttcaccggcaataatctggtcatgacgatcggaggcctgaagaagaccgtgacctggggacaggtcgcaaagctgtggatcgtatgctggcttggcaatctggtcggatctgtcatcgcggcagtgattttcacgatgaccggcattccgggaagtggcgatatcggagcattttttgcgaatacagcagctgcgaagatgggaggatcggcggcgaacctgttttccaaagcgattctctgtaatatctgcgtctgtgtcgcgatctggtgtggcacaaagctgaaatctgagggtgcgaaaattgcgatgaatttctgctgcgtgacgacgttcgttacctgcggatttgagcatagcatcgcgaatatgaccttcctctccatcggactgatgaatcagaatggggtggctggcatcacgatgggcggatttttctataatcttctgattgtaacgctcggaaatatggtcggcggaattttattcgtagcgattccgtattatctgattgcaaaggcgaaggaaagttaaaataaaagtaaaaacaggctgtgaagaatttgcattccgttcgtgggtgcagatacttcacagcctgttttagtttcggtactttatactgccgccgtcgcaagcgcttcggagattgccgagagcagcagctgtgcggtgtagcggttctctgcgggacaggagatgccatcaagagattgtgtttccagaatctgagccgcaatcttttccagagagggcgacacgagcggataggaggctgtgatggcttcgcttaagttcacgaggcggatcgctcggatctcgctggcatccacggtcacttccatattcatcgtatctttgccgagcgtgaccggcgccgtgtagatgcccggaatataggtggcagcagaggtcacggactgtggttgcccgctgtccgcctttttcggggcaaacatcagaaacaggcatacgatcagcagaatcacgaggaagagcaggatgagtgtgtagaggatttcacgtgttttcagtacaacgatttttgggctgctactcataaaggatcactccgcaaaaaagattattatagtgtatgatcgactggacaggattatgctgcaattcggaaattgccaatggcagaaaatgatgctatgataaacgcaacgaaagcggattgcgaatatccgctttacaaccgatatgccggtatctgtgtgagaaaagaggatgaagatgaaaaaaagatggatttcggcagtaatggccctggtactggtcatatcgtccggcgcggtgctgcagaccggaaggagcgcggcagaggagattctggatatggagactgacgaagaggactgctggcagacggaacaggatggggaagagagcgcattggaaggcacacaggaggagacggaaacagtttccgatggaggtggcctgcagatagaagcgatcgaggaggagacggagagtgactatccggcagaaaccgaagcggcgtgcacggagacgctggcaggcggaagcggagagctctgcgcgtgcggacgggcatcggatgccgctggcagtgaaagatgcctctatgcaggaactgtgtttggaatgtcctacggggaacagctggaggaaaatgcggctgagatttaccggcagatggaggagtccctgaaaaagaacggctgcgtggcatttacctgtaccctggcatctccgctggtctttgctgtatatccttcgtctgcttcatccggccgtatggactggaggatcgagagcaatgaggaatatcaaaatgagattatcaatgaaataaacggagcggcacagtccgcttatgacgcatttgtctatgaccatccggaggtattctggctgggaaaaatgtcttatgagtggaaaatcacgtttcgacgggaggcaggggcagataatgctaccggaacgataaaggagatcacatttacaccgcatgaggaatatccgggcgctgcagccgacacggcagactttttggcggcagtacaaaatgcggtggcgaatatccggtcggctgacggcacgacaagcgtggaatggcttcgtgcgatccacaattatgtctgtacacagctgacatatgaggagaaacaggaagcaaatgcacgggcatggtcagccggcggcgcctttttatatgaccacagggtcgtctgcgagggctatgcaaagatgtttcagattctctgcagccagtttgagattccgtgtgtgctggtgtcgggtctggccatgacagcggatggcagctgggaaagtcatatgtggaatgaggtaaagctggaaaacgggctctggtatctggtggatacgacctgggatgaccaggaggaagcaggggagctttatttcctgtgtggaagcagggattatggcatgattgcatcggtaacggtcggtgaggaacggatgaccagcgcgaatttttccgcttcttttatggcacagagctttgtacttccggagcttgcagggagcaggtatgaggagagtgctgccatacaccgacacagctggcaggaggtgagccgtacggagccgggctgtacgacagatggccgctgcgaagagcagtgtacgttctgtcttgcgatccgtcaggaggtgctgcctgcgccgggacaccggtttaccgtttatcattcgaataaggatgcgacctgtctgacagatggcacaaagacagccgtctgtgatcgctgcgggactgagacggatacgcttccggatcagggctcccgcctgtccccttccttgaagtggaattttccggctgtgctgcatatgaaaaagggccagactaccggaaaaggaaaagtgtgggggctggccagaggcgatgaaataaaaatatggaagtcggaccgtccgcagatcgtttcagtacagaaaaagaccgggagactgtccgcaaagaaaatcggaaaggcacgcatcagtgtgacgctgaaaagcggttattccagaagctttgcggtgcaggtgcagaaaaagccggtaaagacgaagaagctggaggcttcagagaaaaggctgaccttaaaggcaggaagcagaacaaagctttttgtatctgtccggccatttaccagtcaggaaaaactgaagtatcgctcctctgactgcagaattgtgacagtatcggccttgggggttgtgacggcgcgcaaaaagggaaaagcaacgattctgatccggtcaggatcacagaaaaggcgtgtcgcagtgacggtaactgcagcagggaagatacagaaaagataggagaacggtatgaaaaagacaggcatagcgatccttctggcggcactgctctttggacagacggctgcggcggcagtatatgaagggcaggtgcaggagacagagacacagacagaagcgtatgaggaagtacaggctccggcagaagacagggaaacagagctgatcctgcccggcgatacggatgaggaacaggaaatcagagaagaaggaagcaggggaacagagacgacggagtcagaaacggatccggcatcagcggctgaaccggctgacgattttattctgagtattgaggtatccaacccggaaacagagcagaacgagcaaaatactgaggtgatcgaagccggaccggaggagatatcggagagcggagatgtggatcaggcatctgccgggagctcttcttctcggatgcgccgggcacggagtcgggtcgcttatcaggatggctacggggagcagctctcggatgatatggcagtgctttaccggaatatgaagaccgcctgggtggacgcgggaagtatgcaggaggtctggttccgggtgccggatacgcaggaggaaaaggaagcgcacagcttctggatttatccggagcaaaaggaagacgggacatggagcaatcatcttgcagaaaatgaggaatatcagagactgacccgggcggttgtgcagcaggcctatgatgcgtttatctatgactatccggaagcattctggcttggctcctgcagctataccgtgagctatcagccatccagtaatgcatataaaaacggtgagccggttgtgtgttatctgcgctcgattaaagtgaagccgaatgaacgctatgccggagcaggggatccggtagaaattgcagcatttcaacaggcggtggagcagacggctgcggaaattaaagagacgctttctgatcagccggatcgctatgaacaggtgcttgccatccatgattacctgtgtactcatgtatcttataaagaaaatagctatgcgcatactgcggcaggcattttcctgaagaaccgggaagtcgtatgtgagggatatgcgaaagcgtttaagattttatgtggccgttttggaataccggcggtgctgataccgggaggggcgttgaaaagcaatggcacccgggaagggcatatgtggaattatgtgcagatggaggatggcttctggtacatgctggatacgacctgggatgaccagaagacgtatatcagccggaagtatttcctgagcggcggggaagagaaaggttttaccggcaatacgattgcagtagagcgtcaggagctgtatacaaatttttccaagtccgagtattcagtaaattttgcgctgcccgtgctctctgatcagggctacagtgcgcgccacagcagtgcaaatccgcacgcacacagctggcaggaatggcagcgtacggcgggtacctgtatagaagaagggcggattgtatttggatgtacggtcagcggctgcactgccagaaagacagaagtactggaaaaatcagaccacgtgtatggggcataccagccggacgggaatgcgacctgccttgcggacgggacgaagacacgagtgtgcagtgtgtgcaaagcacaggagacggtggcagatcccggaagcgcgacagggcataagtacggagcataccagccggacggaaatgcgacctgccttgcggacgggacgaagacgcgggtgtgcagcgtatgtaaagcacgggagacagtgagagatccgggcagccgtcttgtgccgaccggatccctcagccagaaaaaaatccgcctgcaatacagacagagcacatctgctgtaaaggtgagcggtctggcaaagggcgatttcgtacagacgtggaagagctccaggccttccgtggcgagtgtttcttcaaaaggaaagattaccgcgaaaaaaaagagcggatcggctaaaatttccgcatatctggcgagcggcaaagtactgaccgtcactgtcaccgtacagaaaaaagcggtaaagacgactgcgctgcgcgatgtaccaaagcggctgacattgcggcggggcaggacggtgaagctgcagccgacacgaatcccggtcacgagcagggaaaaaatcacctacaaaagtgcaaatacacgcattgcaaaagtatcaaaaaagggtgtcattaccggtaaaaaggcaggaaccgtgaagattaccgtgcgttccggcagaaaaaaagcagtggtgactgtaaaggtgaagtgaaaaatctgatttttcttttcttccggctttgcgcataaaagaaagcaaagcagtaaatattattcatacagcagataaccggaaagagaggcgcatttgctgtgtggcataccggtccgggatctggccggaagccggaaaacaacggaagaaaggaaaaggagaacaaagctatgaaacgttggaaaaagtatgtattctgtgtcatctgtgcatgctgtgtgggacttctggccggatgtggcaataaaaatgacggcgtgacacagaatggaaaagcgacagaggctatgccggagacgaaggaaaatcgtacagagacaccgaaggcagagataaatgacaaacgtgcaacagaaccagaagagacaaccgtaaatgatgccacagaccgaagcgatgcggataccggtgttggcggcgctgcaaaggacattgtggacggtgtcggggatgcaggaaaggatattattgacggtgtagaagatgccggagatgcactgaccggagaggatgcgaaacagaacgcaaccggtgaatgagtcaggaatatatgggatgccccatggagcggacatcccattttccggaaaagatctggcttagacctggcagatcccctgcgtcagttacggaaaataagaggctgaaagaggaggagcagtgatgcggtttcgaccatgcattgatatacataatggaaaagtaaaacagatcgtaggaggaagcctgcgggacgaaggagatcaggccagagaaaattttgtggccgggataagtgcggcagattatgcgcggctgtatggaaaagacgggctgaagggcggtcatatcatccttttgaatccgcagacttccgagtattatgaggagacaaagcgtcaggcattcgcggcactggaagcggcgcctggctgctggcagatcggtggcgggatccgcgcggagaacgcggagatatttttacgtgcgggagcgacgcatgtcattgtgacttcatatgtatttcgaggtggacaaattgattatggcaatttggatacattggtccggacggtcggaagggagcatctggtgctcgatctgagctgcaggaagcgcggagaagattattttatcgtgacagaccggtggcagaagtttacggacgtgaagctgaccagagaagtattaaaagagctctctggttcctgtgatgaatttcttatccacgcggcagatgtggaaggaaaatcgcaggggatcgagcaggaggtcgtccggctgctcggggattttgcaggctgtccggtcacttatgcaggaggcgtcggcagctatgaggatgtggagcagctgcgcatgctcggaagaggccacgtcgatgtcacggtcggcagtgcactcgatctgtttggaggccctctttcttataagaagatccttgaattgtgcgaaaaataattatgaaaatataaactatttgaagaatcatgaaaaatatgattttttattgaaaaatatggagaatgtgttataataaggacagaaatacaccggccataatggagctgctgcaaagcagttatccgttatgagcaaagagcgaagcggattacaaatatccgttagcccgagtaaaggagttggatcgtatgaagtttacaatcagcggaaagaatatcgacgtaacagaaggtctgaaagcagcagtccgggacaagcttggaaagctggagcgctattttactccggataccgaagtgatcgtgacgatgagcgtggagaaggagcgccagaagattgaggtgacgattccagtcaagggcaatatcatccgttcagagcaggtcagcaatgatatgtatgtatcgatcgatctggtagaggaagtcatagagcgtcagctccgcaaatataaagaaaagatcgtggcaaagcagcaggatggaggcaatttcaagaaggaatttctggaaaaagagagcgagccgctcgatgaagtacgaattatccgtacaaagcgttttgatatgaagccaatgtatccggaggatgcatgcatacagatggagctgctcggacataactttttcgtattttgcaatgcagagaacgaggaggtcaatgtcgtatacaagagaaagggcaatacttacggactgatcgagccggaagaataagagagagcgaagggcgactgcttttgcggtcgccttttttcgtacttattttgtttacaaaattttaattgtgttgctgtaggtaaagtgttacaataggaaggaaattattctggaaatggagaaaagcaatggcaatcaaatttgtagaaaagtttttcggaacgcacagccagcgtgagctgaaaatgattacgccgctcgtggacaaggtcgagagcctgcggccacagatgcaggcgctgtctgacgaggagctgcgcgcgaagacacaggaatacaagaatcgttatgcaaacggagagtcactcgatgatcttcttccggaggcatttgcgacggttcgggaagccgcaaagcgtgtactgaatatggaacactaccgggtacagatcatcggtggcgtgatcctccatcagggacgtatcgcggagatgcgtaccggtgaaggtaagacactggtatcgacgcttccggcatacctgaacgcactggcgggagagggcgttcatatcgttacggtcaatgattatctggcacaccgtgacgcagagtggatgggaaaggtgcatgagtttctcggtctgaccgttggctgtgtgctgaattccatggacaatgatgagagaagaaagcagtatgcatgtgacatcacgtatgtgacgaacaatgagcttggttttgattatctgcgtgacaacatggtgatttacaaggagcagctcgtacagcgggatctggcatatgcgatcatcgacgaggtcgactccgtcctgatcgacgaggcacgtacaccgctgatcatttccggacaaagcggcaagtctacgaagctctatgaggtctgcgacattctggccggtcagctcgagcgtggtgaggcgagtggtgaggtcacgaagatgacagccctgatgggtgaggagatcacagagaccggagactttatcgtaaatgagaaggacaagatcgtaaatctgaccgagcagggagttaagaaggtagagcagttcttccacatcgacaactttgcagatccggagaacctggagattcagcataatgtcgatctggcactgcgtgcacacaatctgatgttccgcgatcaggattacgtggtaaaggatgatcaggtcatgatcgtcgatgaatttaccggccgtattatgccgggacgtcgttattctgacggacttcatcaggcaatcgaggcaaag

SEQ ID NO: 3770 - DNA, 17297 bp, Unknown
  16S sequences of unknown bacteria
tttgggcacttttggcgagtcaaaagtgccaccccggcggtagccgtacaaatcataaccttttataaggcttgccccaccgaaggtgattacaggctatgtcacgaccgccccgccgggcaggcgtgccagctgtcaccctacggtgactttgccccgccgtcaggcgactacaaattagtccccctgttttcaaaaaaactatttcttgctccgctttttcagtgttccggtagaaagctggcagagatagaccatatcctcgccggtttttttgccgggcggggtggtgatgacgaaggtctttggcaggtcatcggtcacattgatgacccggccggccttttcggcttcgttcagagtcttgcgggtatggcggcttacggtggtattatccaaatcgaaaatgccgatgatatcccgttcccgcaccactgtttcctgtcccaggtgcagatacatattttcacggctcctttcgttttttggctcgtttggcgggcagatacagctgcccttctttcatgcggaaggcggcgccctcgcccaatgttctagcggcgccccggtcacagcaggtgatgaacacctgtcccgggtgttctccatgcaggaagtaatcccggcgggtcttatccaactcgctcagcacatcatccagcagaatgatgggcgcttcgcccaatgtttcttccattacccggcactgggccagctttagggccaaggcacagctgcgctgctgcccctggctgccaaaattccgcgcggagatgccggcaatggttacctccatgttatcccggtgggggcccagggtggtgcagtagtttttgtaatcctcactgcgggccgcggccagcgccgcccggatatgagcttcgccctcgacgggggaaacatcggcccaatcggcgccctgcggggcggggatgctgggctgatagctgagggaaaagggttggtcggcccgcttgcagatatccatgtaaatttccgccgcgggcggggccagccgccggataaaccttgcccgggcatgacagatagagaaggctaccttagccaggctgcggtcccaggtttccagcaggggctccatcatagcggcgttgccgcttttttgcatatcggtgatgagggtattcctttgcagcaggatgcggctcatcgcggccagggtggtcatatagcggggcatcacctggctgatggcgccatccaaaaacgcgcggcgctccgagggtccctcctggatgagcgccagctcccccggagagaacaccaccgccaaaaattcaccggtcagctcgctgggaatacactccacaccattcagccaggccagctttttgctgccataggccaatgccgcagttttctcccggttctggcaggtaaattccgcctcaatgcgggcgacctcctgcccaaagcgcagatagtcgctttccttggccgcgcggaagctcttctgcccggtaagcaggtagatggcctcgatgagattggtcttgccctgggcgttttcgccgtaaatgacattaacaccgggagccggggtcacatccaccgccgccaggttgcggaaattttcagttttcagccgggtgagcctcacggggcggccacctgccagctttcgccgtccagggtgacggtatcgccgggatggagctttttgccgcgcatggtgcacacttccccattcacctgcacttcgccttcggctatggcgatcttggcttcgccgccggtgcctaccgcgccgcagaatttaaggaagctatccagtttgatgaattcggtttggatggtgatggtttccatatggtcacgctttcttagttattattagtctctcccgtgtaatgggtaacgaagtggcggcacggtagtgaatgatctgccggcggcatattaaagccgtgccgtgatggagggattgttggtaggatattatgacttagttttatctctctttcggagccagtttgtggtcgcctggcggcggggcggggctttttgcaaggcttggtgagcacgcctacccggcggggggttacttttctgtgaagaaaagtaaccaaaagtcactcggggaggaccccgagaccccctacgcgtcggtacgccccgaccggaaggtctgcgacctcccggatctggggctagacgacgcttataaggtgtttattttaattcggtttctgctgcatccaaatcaaatgcgccgcaggcaccttgagagcgtatccagccgcagcttgagcgttagggggtcttggggcacagtcccaagcgtattttggtatggggtccccagcgggacgcaaggcccgctggggaaaggagaagcggcggagcgttggagagttgcctatcccatagggatagcgacccgacatggagcaaagcccgcgacgacgcacacgagtaaaaggaacgcctccgcggcgagccgtacaggcttttgtactctgcaaacccccgccccgccgaaggcgcctacaaactatcccccgccgggcaggcgtaccggccgtcaccctccggtgactccgcgacgccgaaggcgagatgaaaccgcgcctaaataatatttgctaaactttagctgaaagttttattccgcgcgcagccgcatgggcagcaccaggaacaggaaatgttcgccctccagcggaaggaccttcatgggacttaaagggccgcacagctccagccgtaccatatcagtatcgacatttttaagggcatccaacaaaaagcggttattaaagcccatttccagcaggttgccggtggtggagcagcagcattcatcgtaggccttgccgatgctggtggagcagctcatcttaatgaccgattcgccgaaatctacccgcagcggactgcgcagccggtcgctgatgagcaggctggtgcgctcgatggaatggatgagggcacgggtattcaccaccacattggtgctgctttcccgcgggatggccgcgtgataatcgagaaagtcgccctccagcagacggctgaccagagtgcagttgcccatatcaaagaggatatgcttgcggctggcttccaccaccacattaccttcctcgcccatcagcttcagcagctcacccagcgttttgccggggacgatgaaccgcatcggctcgtggtgctccaccttttcccggcgcagcgccagccggaagccatccaccgccacgaccaccagttcgtcatcctgcagctcaaacagacagccggtttgtacgggcttggtatcattggtggcaatggcgtagcgggtcatatccaccatggaggagagggtctccatggggatggagaagccttgggcctcccctacctctggcagctcagggaattcttccgaggtcatgcccaggatggtgaaatgggaaacaccgccggtgatctgcaccaggcaccggtcatctgcttcgatggtgacctcatcactttcgatgcggcggatgatatccgaaaagaccttggcgggaatgatgatctcgccggttttttctaccttggcatccacgatggcggtaatgcccatttccagattgtagctcatcagggtgatctccttggtggtgacccggaccaagatcccctccagggccagcagggtgcttttggggctgacggccagcagggcggaattgatgccctgattaagctccccggtattgcaggtaaatttcatcatcattgcggtgtcgtcctccttgtttcacggcggaaaggggcagctgcggtttttcacagcgcacggccgcctgcggcggccatttttcccttttagtgctttcttccgtgaagataaaatataaaaatcagtagccgtagtagagcgtgtgggaatgtggaatggggataaataggcttgtattgatgcgggcttgtacccgatagcgcggtatggaaagagatacggaaagtttgtggggaatgtgaaaagattctggactttgcacagcggggtggaaaacccggtgtgaaaagtggaaaagctgtgggaagatatcagccgttcaggttgcggatatttttgataatatcttcgatgacttcttttttgcgcgggtcggtctggatggccttggtgacctgctgaagggcatacaccacggtggagtgatcccgcccgccgaactcctggccgatctccagctgagtcatgccggtgatctcccggaccacatacatggccacctgccgggcggtggagatttgattgctgcggcgctggccccgaatatcctcggcggtgacaccgtaggtgcgggccacctcatcgatgatgcggtcgacggtgacaggcagcggggtctgctcggtcatgatatcctggatggcgttttcggccagcagcatggtgataggcgctccggtcagattggcgtgggcatccagccgcttgacaacgccctccagttggcgcacattatccttcagcttgccggcgatgaaggccgcgacatcctccgggaggtcaagtcccaggctatccgccttgcggctgatgatggccatgcgggtctcaaaatccgggggctgaacatccaccagcaggccccattcaaagcgggtgcgcagccggtcctccagtgttttgatctccttggggggacggtcgctggtcaggatgatttgcttgccgcattcatacagcgaattgaaggtgtggaaaaattcctcctgggtgctttccttgccggcgatgaactgaatatcatccacggccagcaggtcggcctggcggtatttttccttgaactcggcggtggtgccgttgcggatggccaaaatcagctcattggcgaattcctcgcccttgacatacaggagcttataatccgggtgattttggcgtatcttgccgcagatggcatagatgaggtgggttttgcccaggccgctgccgccgtacataaagagcgggttgtagcttttggcggggttattggctaccgcccaggccgcggcgtgggccaggctgttgccgctgcccaccacgaaggtctcgaaggaatactccttttcgggctggaaatccagccggttattctcctgcgccgcgggggctgcgggggcagcctcgcgagaggtgatctccacctgcacagggaagcccatgatctcctcaaagctggcggtgagcagggcattgtatttttcgttgacgatatcccgcttgaactgtgtggtgcattgcaggcaggcggtgctgctatccagggcggtcagctccagctcccggatccagagatcataggcgacctcgctcatttcgccgcggcacagctgctttaccctttcgaatacatcggaaaaagaatccatattgaacctcatttcatttgcatccccggttttccacaggggataaatacctattttatataatagcacatttggggccgaagcacaacagaaaaggcccgaaaagcgtgggatttttccacatttccatggggcataggtggaggaaaacgccaggcggcggaggcggagcctttttgcaagtcttagttagcacgcctacccggcggggatagtttatggtcgcctggcggcggcgcggagccttttgcaaaggcgtagttagcaccgctgccgcgggggctgggttggtggtcgccttcggcgtcgcagagtcaccgcagggtgacggctggcacgcctacccggcggggggttacttttctatgaagaaaagtaaccaaaagtcactcggggaggaccccgagacccccgacgcgtcggtacatcccgcccggaaacacttcgtattcccggagcgggattagacgacgcttataaggttgatttttaatttggtttctgctggggccaaaataaaatgcgccgcaggcaccttgagagcgtatctgcggcgccgtacggacgatgccttggcatcgttcgtatccagccgcagcttagcgggtagggggtcttggggcgcagccccaagtgcgttttgcctacttttgcgcatacaaaagtaggcccccgccgggtaggcgtgcaaatgaataccttttataaaacttcgcgacgcctttaggcgactacaaactatcccccgccgggtaggcgtacaggccgtcaccctccggtgaccccgccccgccgccaggcgaccgccaactcagccgaaataaatttttacctacttttcatcacagaaaagtagcctacgccctccccacatcttgtacccatccggcagggcggccactatttacgccgcagggcaataaaatcccgcaaaaacagtagctttttcttgacagagggacaagaattaaggtataattcaaaattgcagggtcatctctaccaatagcgcgttggtacaggtggccgaccacatcaggcaggctcccgcgccggggccgccgccaagacccggaaggaggggaagaacgatgctcagaacctatcagcctaaaaagagacagagaagcaaagtccatgggttcagaaagagaatggctaccgccaatggccgcaaggtcctggcccgcagacgtgccaagggcagagccagactgacccactaagaaagatgcccacagcgcctatgccgtgggcattgtttttagtttgaccgcacataccacagggaactgaaaacgcgaaggcagcggtgtgaaagggacgccctctcctctttcttctcagtccggcacgccgcactactgcccgcttctcccgcggcgcagggaagggacccaaaccatgaaaaccaccgtcatcatcaagaaaaaccgcgactttacccgcatgtaccgccgggcaaagacaaaaaccggcccgctgctggtcacctactgtgcccgcaaccggctgggacataaccgcatcggcatcaccgccagcaagcgcgtgggcgatgccgtccgccgcaaccgcgccaagcgcgtcatccgtgccgcctataccggtttggagcagcagctgccccagggctatgatttcatttttgtggcccgcagccgtaccgcccactgcaaaatgcagccggtacagcaggctatgctgcagcagatcaccgcattaacggcggtgccatccgcggtgcgggaggcgggacagacatgaagcgggtgtggcaattcctaaaaaaaatatgcagcgagctattgatcctgcccatcaggttctaccagaagtgcatctccccccttattcctcccagatgccgattttcccccacctgctcctgctacgcggtcacggcgctgcggcgctttggccccatccgggggagcctgctgaccctgtgccgtgtggcacggtgccagccctttggccgcccggggtacgatccggtgccccagcgcttttccctgcgcccctttgccggcgccgagcaggaaaagcagcaggcggcgcacccttcccagccccctgtcggagaaaataccggcgaggaaactattccccatgaaaatgggaacggaggaccatccttatgaattttattatgacagttttcggctacccctttgggtggctgatgtatggcctgtaccacctggtaagcaattacggcgtggcgctggtgctctttaccctcatcgttaagctgctcctgttccctctgggcctcaagcagcagaaatccaccgtaaagatgcagatcatccagcccaagatccaggagatccaggccaagtacaagaataaccaggccaaaatgaatgaggagctgcaggctctgtactccaaggaaaactacaaccccatgagtggctgtggcaccctgctcattcagttcccggtcatcttcggtctgttggatgtagtgtataagcccctgacccacctgctgcgcttctccaaggaaaccatcaccgcccttaccgaggtcgcgggcaccctgggcatcgccaccaccggctacgccccccagatcaacatttaccagagcgtcatgcagaatcccgccgcttattccagtgtaggcgccgatgtcatcgccaagatccagtcccttgatatgggcttccttggtatggatctttccggcacccccaacctgccatggcagggcggctggaactggctggtcatcattccgctgctctccggtcttaccgcgctgctttcttccatcatttccatgaagaacagccccaatatgggccaggccggcgccagcatgaagatgatgatgtatatcatgcccctcatctccatttggttcaccttcatggtgcccatcggcgtaggtatctactggaccctttccaatgtgttcggctgtgtccagtcccttgtactcaataagatctacaaccccaaggaagtagccgaaaagctgcaggccgaggccaaggagcgtgccgagcgggagcgccaggagcgcatcgaggccaagaaacgggccaaggaagccctgaagaacggcgaaaaggtggaggataccacctatctttccgataaggaaaagataaaggaagcccgccgccgctatgccgaaaagtacggcgatgaatacatcgatgattgatgccgccgaataacgaggtaactgaatatgataaaagagatcattgctaccggcgtggatgccaatgccgcgatcgaaagcggtgcgctgctgctgggactgccccgtgaagaggtgcagtttgagatcattgacctgccccgtaagggcggctttctggggctgaaaaagctccccgccaaggtgcgcgtatgggtggagctgcccgatgaaaagcccgcccggagcgaaaagccccgccggcaggaggcccccaagaaggaacagaaagccgaaaataagcccgccgcccccaaggcggaaaaacccgcccggagcgagaaacccgctccccgcgtcgaaaagcccatcagggtcgaagccgaaaagcccgctcccgtggagatagagcccaccggggaggtgcgcgccaaggtggaaaaggccgccgcctatgtcaccgagatcctgaaggccatgggcctgaccgactttaccctgactccccgctactacgaggaaaatgtccgcctgcagctggcaggtgagcaaatcggcggcgtcatcggccgccggggcgagaccctggatgccatccagtacctggccagtctggtagccaaccgcggtgagggcgagtatatccgcctttccatcgatagcggcaattaccgtgaaaagcgcgcccgtaccctggaggccctggcccgcaagctggccaaccaggctgtgcgcaccggccgcagcatcacgctggagccgatgaacccctatgagcgccgcatcattcatggcgcggtttccaccgtcaagggcgctaccagctcttccaccggtgtggaacccaaccgccgtgttgtgatcagctccaccgtaccgcctaccggcggcaaggaaggcagccgtgagggcggccgtggcggccggaatggtcgtggcggcaaccgccgcggcaacggtggccgtggcaacagcggtgagcgccgcagccgtcccgccggtgagcgccgtccccgcctggaggatccgcccgctatcggcggtcccgtccgccgggagcaggctgaaaccgcccccaagagcgaaaagagcgctgtggagcaggagatcctctccgcgaataccggcaagcgctacggtaaaattgatatctaatccccacaaaaggcccccggatctttccgggggcctttcgcgtcccaatcataccttgtgtagggaaaaagtcccgcacccgcaaaggccaggcaagcacgcctgaccggcgtggggttgcttttccatgaagaaaagtacccccctgcggtgagcgccccctgcaaattcctctccttccccgcataggaatgggataaagcggattaaaagggaggtcatgtgatgaaagggataaaaaagctgctggcggcaggactggcggggctgctgcttaccgtgcccgtgggcgccgaggaaaccacctgggaggagatccccaatgccaatatcccggcggcggtgattcaaaaggaggtggccgaggccgaaggaatgcaggtggcactttctctgccggtcaaaagcgctattctcatcgaccagaacaccggcaccgtgcggtacgagatgaacgctgatgaaaagctgcccccggcctccatcaccaagatcatgagcctgctgctctttatggaggcgctggacagcggcaaaatagcccttaccgataccgtgacctgcagcgaggcggctgcgggctttggcggcagccagatatggctgaagcccggcgaggagatgacggtggatgacctgctgaaggcggtagcggtgcagagcgccaatgacgctaccgtgtgcctggcggaatatgtagcgggcagcgaggaagcctttgtgcagctgatgaaccaaaaggccgccgagttgggcatggaaaatacccactttgcctgctgcgccgggctggataatgagggacattacagtaccgcgcgggatattgccctgatgagccgggcgctgctgcggtaccccaagatcaccgattacaccaccatatggatggatacgctgcggaacggcgccaccagcctggtgaataccaaccgtctggtgcgcttttaccagggcgccacggggctgaaaaccggcaccaccaatggggcgggctgctgcctttccgccagtgccagccgggatggactggggcttatcgcggtggtgctgggcgccggcaacagcaatgaccgctttgcggcggcacgagccctgctggattggggctacgccaacctggccgcggtgaatatcaccccgccggagctggagccgctggctgtgatccgcggtaccgctcccacagtggagctgaccgcccaaccgcctgcggaagggatcgtcatccccaagggccagcgggaggccatgacccaaacggtgaacctggccgaaagcctggaggcccccattgccgccggaaccgaggtaggtactgtgaccgtgacggtggagggccaaacggtggccagctatccggtggtaacggccgccgccgtggagcgcatgaccttcggccgcgcgttccagcggctgggccagggactgctggccatggggtaaggccccttgcaaaggcatagtgagcatgcctacccggcggggcctacttttgtatgtgtgcgtcgtcgcgggctttgctccatgtcgggtcgctatccctatgggataggcaactctccaacgctccgccgcttctcctttccccagcgggccttgcgtcccgctggggaccccataccaaaacacgcttggggctgtgccccaagacccccttgccgctaaactgcggctggatatgaacgatgcgaagcatcgtccgtacagcgccgcagatacgctctcaaggtgcctgcggcgcattatatgtggggtaactgcaaatcggcagcagaaagctaccaccgaaaagcatatgcgtccttgtcaaacgaaggtaatgaacttaaaaactttccccacagccgttccgtaaatgtggaggactgtggggaatacatagctggtttcggttttcaatgttaccgattgacctcttttttatcggtgcggcccagcaggtaatccacgctgacattgtaaaaatcggccaaggcgcaaagcacctgtggtggcagcatccggccgccactttcgtaataggcgtaggtgcgctgcggcacattgatggccgcacccacctgctgctgggtcagatcagcatcttcccgcaggtcgcggatcctttggtattttatcattacgatcaccccagggacagtataggggtgaataaattgttctatttacaaaatgaacatattgttctaaagtgatttgtgaaaggagatgctcaaagtggaaaaagaggaatgcatccaaattatgatgatacaggataaaatcatcgcggcacagcaggagtgtgaagaagcctgcctgcaaagtgatacaccggattaccgaatgctgtactttaggctttttgcccgaatggaggaagtgcgaaagctgctggagctgagataaatcaaaataaaaagcccccgctgagggggcgggggtcagggcagctccggttcccggcggatgtggaacagcgcccggagcagaccggaaagcaggcgtgggctgcggtaaactacaaccttcatacagttactcctccttttggcaagtgacagcagctaacggcggcagcgaaagccaaggatcaccaaaccgatggccgcaaagaccagcgcggtgcgcagctcgccgcacaaggccagcagcacccccagcccaaaggccatgcagcacagcgccagggggcagtcgccccggcggggagaacgcctgcggtacatggcctctcccccttccctttcgttgctacgccatcctatgcggcggtgggagatatggtgcggatagggtgcaggggctatgcctgcttccttttggggcagaatatcgcccgcagcaggaaaaacagggcggcggaaatgactgtgccaaaaaggttcatcaggatgtcatccacatcaaagctgcgccccactatgggctggatcagctcaatggcaatggtggcgcacagccccgccagcaccgtgcggccccagtttgcctgcggccggtacagcgggtataaaagcccaaatggcaaaaacagcaggatattatcacggttttccgttgtgaaattccggaagaagtcaaaggaaaaatcgtaatccatcacaaaccacggcagcccgccctgggagggcctgccgtagaacagcagatagtagagatcggaaacggggtacagaaagatggtaaagaccagcagccccgcgaaatagcacgggaacagcgaacgcagcagcacccgcccgccgggcagcgcgggctcttttttgtgcagccgcagggcataccacaccccggccgccagcgcaaagggcagcgcctgcaaaaaatatcccgccacggtagcaaagaaaaagtattggaaggtcatgggtatcctttcttggtgcagggaatgaaaaatcagccgtttggactctgccgcttggtgatggtgaccttgcttactgttgcggcatcgctgccgtagtcgacttcatagtaaatgacgaccacctgatccccgcagttgtaaatatccccgaacaatccggaaaggccgctgtccggctccccgaattgttccagcacctcactgcggggcgttccctctttaatagcctcaaagtctttcagggtgggctccccgctgccgcaggcggccagcaaggtaaggcacagaacggcggccagtacagccgctgcaatgatgcgatgtttcatagagtactcctttctgaaaagacaagggacagcagcccgggaaaactcgttcctcccgggcgccgcccctcttacagcctcataagatcggaaaaatgccgcttaccagttctcgatcatcatatcccgcagatgatagggaaggtcctccggttcgcaggaaagggtgaagacgatctgaacatcctgggtggcccgcaggctatccagcgtgtttaccatctgggtaaaggcctcaaaatcgcgtccgcacatcttaaagacggggtcgatgtaaatgtgggtgatatcgtagttgccggccagcagcccggtgatgaagccataaacggcgtcatagcccgcaatggcgtattcatcggaataaaccaggcgtgcagcactgctgatctcataggtcaggcggacatccttttcgatgacgacaacataacccttgctctcctttacggctttgttggccatttccactatggccttggtcttaccgctgcccttgtgtcctacgattaactgtatcatacttatgatcctccttggaatttggtggttgcagactattcttccatgggcgtcgcccagagttgataaaatttattctcccagcttggccagcagctcctgccgcaggtcctcatagccgggcttgcccagcagggcaaacatgttcttcttgtaggcctccacgccgggctggtcaaagggattgacccccaaaaggtagccgctgacgccgcaggccagcatgaagaagtacaccatatagccgtactcctcctcattgatggccgggacctccagcaccaggttgggcacgccgccgcgggtatgcgccagtatggtgccctgcatcgcccgccggttgatctgccgcatcgccatgccggaaaggaaattcagcccatccaggttttcggggtcctcctccaccgtcaggtcggcggcgggggtgataaaatcaatgaccgtctcaaataggttgcggctgccatcctggataaactgtcccatcgagtgcaggtcggtggtaaaggcgaccgaagccgggaacagccccttgccgtccttgccctcgctttcgccgtacagctgcttcagccactcgcccatctgggtaaagcggggttcgtagctggcgtaaatttctatggccttgccccgccgcagcaggatattgcggatggcggcatagcggtagcaggggttatgggaaaagtcgtcgttatccagctcggtcatcgccttttgggcgccgcgcagcaccgcatcaatatcgatcccggccaccgccatcggcagcaggcccacggcggtcaacaccgaataccgtccgcccacatcatcgggaatgacaaaggtctgccagccctcccggtccgccagggattttagggtgccgcgggcccggtcggtggtgcagtagatgcgcccggccgcttctttgccgtagcgccgctccatcatgccgcgcagcacacggaaagccagcgccggctcggtggtagtgccggatttggaaataacattcagcgagacccgcttgccctcgcacagcgccaggatctcatccagatagctgccagaaagattgcaccccgcaaagtagatggccgggccatctttccccaaagcattgtaataggggctgcgcagcagctcgatggcgctgcgggcgcccaggtagctgccgccgataccgatgacaaccagcacatcggtgtcgctgcggatcttttccgccgccgcgtggatgcgcgccagctcctctttatcgtagtcccgcggcagggtcagccagccgtggaaatcactgcccgcgccggtgtgctgccgcagctgacaaacagccgccgccacctggggggccatgcagtccatttcatggggagaaacaaacccctccaaatactgttcccgtaaagtaatcgccattgctccaaacctcttttcgggtaagatattattccacctatattttaccctaaaaccggcaggtttgcaagtgtttaccgctctgtggaaaactttgtggaaagtgtgaaaagccggaatgacggccggcttttttacaaggtgtatattttatgtccccgcggcccacagctcccctgtgtaaggggagctgtcagccgcaaggctgactgaggggttgctgatacaaaccatgcccagtttcttctcgcctgtcgccgccaggcgaccaccaaccttttctcatagggaaaagcaaaaccgccatgcctttcggcacggcggctttctttttattataggcttgcttacgcggcgggagtctcggtgttctcctctgcggtggtatcatcggtcgcagcgggcacaatgatctcgctgatatcggtgtaagcgggggcggggttctgctcctgcaggtactggcccacattgttgaaggtcacggcgcggtaaatgtagccgtagccgtactgggcaacatattcggagtaatcctcggtatccatctcggtcttaaagtactccttcacatcgtcctcggtggcaaagaggttcatgtcctcagcaatggccatcatcaccatgtactgggagatggtctcgcggatgttctcctcatacttggtgcggaaggcctcctcgctctccacaccgtagtagtagttcagcagggtagaaagctccatgctgtactgcaaggcggagaacttcagctgcttgatcacaatggtgatctcgttatccaccagcttttggggcacttcgcttacggggcagtttttcagtatggtttccatcatggcgtcataaacctggctgtcgcgcaggtccttggcaatggtctgacgcatgttctctacggaggtatagccatagtcgtccttcaggttatcctttacaaagtcatcggtcagctcataggtgtgggtcacaatgatcttgttgatagtcacggtaaagacggcatccttgccggaaagctcggtgttgcgctcataggggtcggggaaggtcacttcgatatcgaaggtctcgccgggcttgtggccgatgagctgctccaggaagttgtcaatgtagctggttacgccgatggtcacctcggtgccggcgccattggtgctgccgccctcaaattccacaccgtccaccttgcccacatagtcgatgttgatggtatcgccatccgctacctcgcggtcggtaatctcttccttataggtgtggctggacataatggaatcgatcttcttctggatgtcctcttcctttacggtcacagcgctctcatcatactggatgccggtatactggcccagcgtcacatagtccttggcggtaatgccatcaaaccggccgtcagtggtcagccccaggctgtagtttacggcggcgtcgccgttgccctgcttgctgctgcaggcggtcaggcctacgcacagcatcagcgccatcagcatggccagtacttttacaaacttattcatttcgcttcctccaaattagcggccgtccgttttcggcggcgtaatatcgttccctattatagcgggttttgccgcgcttgtctaccaaactgccaaaatctttacagcaggttcattattttttacagaatttagcggaagcgtggtgccgcacaatccaaaagccacccttgcgcaaggggcgggcgccgcgccaacccaaaggctcccctgtgcaaggggagctgtcagccgcaaggctgactgaggggttgacggcaaatattaaggtaatcatttcatctcgccttcggcgtcgcagagtcaccgcagggtgacagactgtacgcctgcccggcgagtggttacttttctgtgaagaaaagtaaccaaaagtcactcggggaggaccccgagacccccacgcgtcggtacaccccgcccggaaacacttcgtattcccggagcgggattagacgacgcttataagg

SEQ ID NO: 3771 - DNA, 31343 bp, Unknown
  16S sequences of unknown bacteria
ataagagacagattttaatgaatacatttattattatataaattttatatttatttgttgataaaatatactggattttataatcgtaatagaatataatgaataggaacccatatggatcacgccataagcacgaggccaaatccaaatagtaaaacggaaatcatgacgttggtggggaattatgaaccaatctgtaattagaaggccatcgaaggctcttggcttaagcatcctttgcgtctgcgttttatatgctggggcgatgcttttgaatatggagagcttcctcttcggccggctgcaatacaaaatcgccgaacccctggtttccagccttctcttaataggggtactcgccatgtcgtttctgtttggaaaatatggcggcaagcgatatgtcatcaccctttccgcttatctgggaatatccatggcagcgaccctgacagcctctataatgcagctggcatctcaaagcattgcgtggtatgtatggctgctgccggcgattatggtatggatacccgtttatggcgtttttcactttttccgggatttctattggctgctggtgcttcttcctgtgttttacggcgccaatatcagccttctgaaggccggaaaacgatgcaagaaacataagcgttgcagcacgtttgaataagaagccggacgctacggccgccggaaaagccctgatttccccggtccctccggacaatccgaaggggccggtcgctttttcgggccgccgattcctccgcccggcccgggccaacttttttcatctgtttttggaaaatattccgctccccgcgcccgtcccttgacagggagggccttccggggctacaatgggcggtggaacaaaatcgaataacggcgtacggttccgcgtcgctccgggctttccggggccgcgcggatgaaaagggaacgcggtgcgaaaccgcggcagcccccgctactgtgagaaggacgaaagctttcgggaagccccggccaggccggcgcttcagtcactggataccctctgggaagacggaaagcgagtaggtggaattcgagccaggagacctgcctgacgccgggacacgcgggaaatcgcgcccagacgcaggggagcgcatccccgctgcgcgggatagagagccgaaaccggctctcttttttgttcgcagcaaggccggcgggacgacccgaccggcgaagaaaggatgtagccccatgcaactgaaaaagcgcttgttcagcgcgctgctggcactggccgtcgcggccggcgccgcctgtctcccatcggcggccgcgggggcggccggaaccggtgcctcctccgccatcacggcgaactcccctctcgacttcccccaattccgcggccagtccggctctcccggcgtgacggacgccaaaacgcccctcaccgccgcggatatcgaggaaaaatgggccgctaaatacggctccggctggttcgccaacatgggaacccccattgtggcggacgacgccgttttcgtcctggccccctccaagagcgcccttctcaagctggataaacgcaccggcgagatcctggccgagggcgcctgccccggcggcaaccagttcttctccatcatcggctccggcgacggaaaaatcttcgtcccccgggccgccacggtggacaaggtcagcaccgccgtgatttacgcctacgatcaagagaccctggagatggtgtggcaatcggccccgctgggcgaaaaggcccagcccctgtccgccatcgtgtaccataacggccacatctacaccggcgtctccgacggcagcgcgaaggtgggcggcttctacgccttctccaccgccgacgacgacccgaccaagaccgacgaggtcaagcagccggcgtggacctacgccccggaaagcggggccaagggctactactggagcgccgcggccatcgtgggggatgccgtcgccttcgccggggaggccggcgaggtggtgctgcacagcccggacaccgacgaggtgtacgcccggctgagcctgccgggcgaggcgggcggcgtgcgcagcacggcccattatgatcgggaaaccggccgcctgttcctcaccagcaagggtggatacatacattctgttaaaattaacggtgattacacattcgatcccgcctccctcatcagcaaaaagatcggcaacgacgtcacctccagccccctggtcttcaagggccgggtgtacgtgggcggcggcggggtgcagtccaccgccggcttctcggtgctggacgccgataccctcgagctcatttacggcgtggatgtgaagacccagtcctcccccgtcctgaccaccgcctatgccaccgaggaaaacggctggcaggtctatctgtacgtcacccagtacgaacgcccctcctccctggtgctcatcgccgacaagcagggccagaccacgcccgacatgacggtgctcgccgagccctccaccgtccaatactgcacccagtccgcgaccatcgaccgggacggcggcatttactacgtcaacgattcgggcaacctctttgccttcggccatgccgatcccgccaagggcctctataccgccgccgacgtggataacgccatcgggcggctggccgccagcggcccggtgcagctggccgacgccttcgaggtcagccgggtgaaggcccgcttcgacgggctggacgccgccgggcaggccgctgtcacccgcggcggagagctgaccgccatgctggaacggctggccctgctggccgacgagaaggccgaggcggcggacatcgcggccgccatcggcgcgctggatcccgccgccgtgaccaaggacgacgccgcggccctgggcgccctgctggcccggtataacgccctgtccgccgaggggcaggcgctggtggacaacatcgacaccctgaaggccgctatcgcccgggtgcaggagctgaccgacaaggccatggccgccgagctgacggcgaaaatcgccgccctgcccgaggaggccgccctctgcctggacgacaaggccgcggtgcaggccgtggccgacctgctggcggcccagaacgcgtcggtgaaagccctggtggacgccacccgcctgaccgccctgcaaacgcggctgaccgccatcgagcaggcggtgaccgcgctgaacgatcgcatcttcaaagacattcagcccctgaacgtcaccctgaaggacaaggaaacggtggagaagctggaagccgcctaccaggccatcggggagaaggataggaagcacattaccggctacgacgatgtgctgtacgcccgcaaggtcatcgacggcctgctggcgggccgggtggaggccgatgtgttcgccaccatcttcggctcggacacccgttacacggtgcccggcgtgaccccggacggccaaagctacaccgtcgcctttaccggcacggccatcaccgatccctccctctccttcaccatgggcctgtccttcacctcgccgcacgccgcggccatccgccggctgtcgcccgacgcggtgattttctccttcgcccatcagggcgctctgcccggccccatgacggtggaggcccccgtctcccgcgccgacggtacttataccctctaccgatataatgcgatcacaggcaaagcggaagccgccggaccggtggcggtgaaaaacggcaccgccgtctttacggtgacgcagggctccgacttcttcttcggcgaggccgcctccgcgtcccccgatacaggcgtcgcctccgccctgccggcggcggcggtgctggccctggccggcgcggcgctgctgtacgctgtgcgccggaaacggtaatccgaatcggcacgcggccctgaagcgaacgacgcagcagggccgcgcgtccttgtcaaaggagccttcttatgaaaagattcgccgccctgctgctcgcggcgctgctgtgcgccgccgcgctgaccgggtgtaaaatcgagtttcccgacgatgtggcggtaattccaccgctctcgtccaccggatcggccgacgtcagcgccccctccgcctcctccgccatcccggcggaaacgacggccgcgacgacggcggcgaccggaacgacgacggtttccccgccggccggctccaccgccgcttcgaccgccaagcccaccgccgcgaccaccaaggacaagtaccagaccgaccccgtccccgaaggcaagccccagccggtcaaccccgaggacacggaggtcaaccggaaaaagaccggcacctgcaccctgtcggtggactgcctgaccatcctggacaacaaggacaagctgaaaaaggaaaagctgtccgtcctcccggcggacggcatcgtctacaaggagcggacggtgctcttttacgaaggggaatccgtctacgacgtgctgaaccgggagatgaagaagtaccgcatccacatggcttcccgcaacacgcccgtctacaacagccggtacatcgaggccatccagaacctgtacgaattcgactgcggcgacctgtccggctggacgtatcaggtcaacgggtggtaccccaactacggctgcagccggtacacggtcaagcagggggacgccattaagtggcggtacacctgcgacctgggccgggacgtgggctgcgatttcctggagcagaacgactgagcgcacgcggcagaaaggagggaactcccctgaaagacagcttttccgccttccatccggcggtgaattttctatttttcgcggcggccctgttcttcggcatgttctgtatgcatcccgtctttctggggatttccctggcagccgccctggcctacgccctgcggctcggcggccggaagaccgcccgcctgttcttcctcggggtgctgcctctgcttctgctggtggccgtcctcaaccccctgctcaaccacgccggcgtgaccattctcgtctacgtcaacgacaaccccatcaccctggaggccatcctgttcggcgcggccagcggcgtgatgttcgcggcggtgctgctgtggttctcctgctacaacgcggtcatgacctcggataaattcctgtacctcttcgggcgggtgatccccgccctgtccctcatcttctccatggccctgcgcttcgtcccccgcttcgccgcccagctgaaaatcatctccaacgcccagaaatgcgtggggcgggacatctcccagggcaacctgctcacccgggcgaagaacgggctgaaaattctttccatcctcatcacctgggccctggaaaacgccgtggacacggccgattccatgcggtgccggggctacggccttccggggcggacggccttttccaacttccggctggacagccgggacaaagcctctctcgggctgctgggcgggctgaccgccctgctgctcgtcgggctggccctgggggaaaccacggcggtctattttcccgccgtgcgcatccccccggtcacccccctcagcttcgtcttctacgcggcctacgccgctttgctttcatttccgctagtcgtcaatggttgggaggacatcaagtgggcgcgtttgacatccaagatttgagctttgcctacccggaaaaaaccgaaaaagccctggacggggtgagcctgcgggttcagccgggggaattcgtggtgctctgcggcccctccggctgcgggaaaaccaccctgctgcgccacctgaagcccatcctcaccccccacgggcagcggcagggcgtcatcctgttcgacgggcggcccatcggggagctgtccttacgggaacaggcggcctgcatcggctatgtcctccagcagccggaaaatcagatcgtcaccgacaaggtgtggcacgagctggccttcggcctggaaagcctgggggaaaagcaggaggccgtccgcctgcgggtggcggaaatggcctgcttcttcggcatccaggattggtttatgaaaaaggtgaccgagctgtccggcggacaaaaacagttattaaatttagcaagcattatggccatgcagcccagcgtcctcattctggacgagcccacctcccagctggatcccatcgcggcggcgggcttcctggacacagtgcggaaaatcaacaacgagctgggcgtcaccgtcctgctgaccgagcaccggctggaggaggccctgcccatggccgaccgggcgatcgccatggagggcgggcggattctcgccgacggctctcccggcgaggtggggcggcagctccgtcggcagaaaagcggcctgttcgccgccatgcccgccgccatgcggatttacgccggtgtcgaaggggtcggagcggacgttccctgtcccgtgacggtcaaggaggggcggcggttcctctcctccctgcccctggatcagccggccctggcggccagcctcccccccgccgcgcccgaaccgcagggggagccggtcatcgtcttcaaggaggtctggttcaagtacgagaagaagggggaggacattctgaaggatttgtccctcaccgtccgggcgggcaccctccacgccatcgtggggggcaacggggccggcaaaaccaccgccctctccctcgtcagccggctgaaccgcccctaccggggtagcgtttccctggccggccggcgggtggagacctacaccgacgccgagctgttccgcggctgcctgggggtgctgccccagaacccccaggccctgtttgtcaaaaaaacgctgctgctggatctccttgagatgaccgacagccggctgagcaaggccgagcgggagcgggaggcccgccaggcggcggaggaggtggagctgtccgagcggctggacgcccacccctacgacctgagcggcggggagcagcagcgggccgccctggccaaggtgctgctgctccggccgaaaatcctgctgctggacgagccgaccaagggcctggacgcccagtttaaggagaagctggccggcatcttccgccggctgctggggcagggggccaccatcctgatggtctcccacgacgtggagttctgcgcccgccacgccgacgtgtgcaccctgttctttcagggcggcgcggtggtgaccgcccccgccggcccctttttcagcggcaacagcttctacaccaccgccgccaaccggatgtcccgccacctgatggccggggccgtgaccaacgaggatgtgattgaccgatgcaaccgacacgccgccgtctgagcggccgcaccctggccgccctggtgatgctgtgcgccgtccccgccctcatcgccctgggggtgacggtgttcgacgaccgaaaatattacctcatcagcctgctgatcatcgcctgcaccctggtgcccttcgccgtggccttcgagcggcggcggcccatggcccgggagctggtggtcatcgccaccctggtggccctgacggtggccggccgggccgccttctactgggctccccagatcaagccggtgtccgccctggtgattgtggccggggtctgcctgggggcggagagcgggctgctgaccggcgccatgagcgctttcctgtccaacttcttctttggacagggcccctggaccccctggcagatgttcggcttcgggctcatcggctttctggccggggtgctgttccggcccggagccctgccccgggggcgggtggcgctgtgcgtgtacggcgggctgtccaccctgattctctacggcgccatcgtcaatttcggctccctgctgatgttcggcagcacagccctcaactgggcggggctgctggccgtgtacgcctccggcctgcccttcgacctggtgcacgccgccgccaccgtcctgttcctggccatcctgggcccggcgatgatcgagaagctggaacggcttaagcgcaaatacggcctgctggagaccgccgcgtaaaggaaagggggctgctcatgcacttcgtcatgtcctacagcggcggcaaggacagcgccctggccctctggcggctgaaatgccaggggcatcagcctgtcgccctgctggccacgtataacccggagcaggagcgctcctggttccacggtatccccctggccattctggaggagacagccgcggccatgtccctgcccctgctgccctgcccctgcccgcccgcggattataacgcctccttcgagagggcgctggcccgggccaaggccctgggggccgaggcctgcgccttcggggacatcgacatccccgatcatcggcagtgggacgaggagcgctgcgccgccgccgggctttcctgcctgctgcccctgtggggggaggggcgggcggccctggcccgggaaggggtgggggcgggcttccgcgcggtgatcaagctcgtccggctcgactgtctggacgtctccttcctgggccggacgctggacgaggccaccctggccgccatcgcggccaccggcgcggatatctgcggggaaaacggggaataccacaccctggtcaccggcggccctttgttccgccatcccctccccgtgcgccccggcccggtcatccacttcggcacccacgccgccatggattttctcctgccatagccaaagggggctgttgcgaaagggattttaccccttttcgcaacagccccaatttgttcagactgtcaaaaagtcggcaagcggctggacggggacgctggattgcgacggccttgtaggggcgagcattgctcgcccgtatcccatggcggtggggccgtttcgcaggcgagcactgctcgcccctacaatctctatccgaatgggagggggtgcaaaaagagttttgcaacagccccccttttttcttgcactcataaacattttagaaacattttctggtatactggaagggagcgaaacgaaagcggggattgccatggtgaacatcttggtggtggaggacgacgacaggctcaaccgcatcgtctgcacctacctgaacagcagcggctacgccgccaagggctgccggaacccccgggaggcctacgaccttatgtacaacggccggtatgatctcatcatttccgacatcatgatgccggagatcgacggcttcgagttcgccgaaaccgtgcgaagcctcaacgccgccatccccatcctgttcctaaccgcccgggacgacctcgcctccaagcggcggggtttccgcgccggtgtggacgactacatggtcaagccggcggacatggacgagctggtgctgcgggtggggccctgctccgccgcgccaacatcgccagcgaaaaaaagctgaccgtcggctctctgaccatgaacgccgacgagatgagcgcggcggtgaacggggaggaaatcccgctgaccgtgcgggaattcaacatcctgttcaagctgctgtcctatccccggcataccttctcccgggcccagctgatggacgagttctggggcctggacagcgacaccagcctgcgggcggtggacgtgtacatcaccaagctgcgggataaattctccggctgcggcgacttcaaaatcgtcaccgtccacggcctgggctacaaggcggtgccggtatgaggggggcacccgaccagcgggtcaccgcccggcacttttccgggggagaatttttcatcaccttcgccgtgctggcggtgctcagcgccgggcaggccctggtgctgagcgcctacgtggagctggagccggtgccggcgggctttatctgggggatggcgggctattgggccatcgtcgccgcggtgttcagcctggtcacccattaccagatccgcaaacggttcgacctgcccatgcgccgcctgagcgcggccgccaaggcggtggccggcggggacttctccgtgtacgtggagccggtgcacaaaggggataagcgggattacctcgacgtgatggccgaggacttcaacaccatggtggaggagctgtccagcatcgaaaccctcaagagcgatttcatctccaacgtctcccacgaaatcaagacccccctggccgttatccagagctatgccatggccctgcagcgggaggggctgtccgaggaggagcggcgggactataccggcgccatcgtcgccgcctcccggaagctgaccgccctggtctccaacgtgctcaagctcagcaagctggaaaatcaggaaatccccccggccgccgaaccctttgacctgtgccgccagctgtgcgactgcgccctctcctttgaggagctgtgggaaagcaaggggatcgcgtttgaggcggacattgaggatcgggcggtgatccgcgccgacgaaagccttctggagatcgtgtggaacaacctgctgtccaacgccctgaaattcaccgagcccggcgggacggtgacgctgcggcagacctccggcgccgacacggtgacggtggaggtggcggacaccggctgcggcatggacgaggaaacgcagcggcatatcttcgacaagttctatcagggggacgcctcccattccggggagggcaacggcctggggctggccctgacccaccgggtgctggagctgaccggcggccgcctccaggtcgccagcgccctcggccggggcagcgttttcaccgtcaccctccccgtggacggctgagcgttttcatatttcgtaaacatttccgcgacaattttccaacagccttccggcatactggtgtcatcggccgggctttccgcccgctgaaataccgactggaaggttctgaagctatggaaaccaacaagggaaacgggtttattggttacgagtatatggaagtcgccgccgaccggcagatggaggccgtgtacgcggacagctatcccagcttcggctggaggctggacgcctgtaccccctgcgtccaggggctcacccgcgtgaccatgaaattcaagcgggatcgcaaaatccgcaacaaggctgagctgacccggctgcagcggcagtttgaatccggcgcggcggagatagccgccctggaaaaatccaaaaccctgggggcctcggccgccgccttcctcatcggcatcgtgggcaccgccttcatggccgggtcggtgttcagctacctggcgggcatgctgcccctatgcattctgctggcggttccggccttcgcgggctggatcctccccaccttctgctacgccggcctgcgccggcggcgggccgccaaggtcggccccctcatcgatcggcagtacgagacgatttacgccgtgtgcgaaaaggccagcgccctgctggacggctgaccgcggcgcaacccccatgaaaggatggcgttgaccatggaggaaaccggagggcttcgccggcggctgcgccggtactgggcgatgcgcaaggatcccgacgagagcgccatgctgacagcctccctctcctttttcgtcaacgcggccatcggcgtgggcaagctgctgctcgggatcgggctgggctccttctggttcgtggtcaacggggcgtattacctgctgctgtgcatcgcccgcggccgggccgtcgggcagtaccgccgggccctggccatggacgacggcggccgacaggccctggagcgggcggttacccgccacaccggcgtgttcctcatcctgctggggctggtctacgccctgacgtgcctgcggatgtatctgcatggggattccaccgtctaccggggctatatggtctatctggtggcgctggtggccttcgtcaagatggggttcgccatctccggcaccctctccgcccgcaagcggaacagccccatcgtcacggcggtgaaggtgctcagctttgcggacgccctggtctccatcgtggtgacccagtgcaccctgctgacctttaaaaactccccccacgccgtgaccagcagcgccctgttcggcctgggggtgagcgggctgttcctgctcgccggcctcatcatggccatacggggccggaagtccgccggaaaataaagaagcgctccctttaaagggggatttataattttttactttttctatagggtgaacccccttaaaatcaaccggcggttgattttaagggggttttaactgcgccgtcattgtttcagacaaccaaaggtcgtataatgataacaaaaagaagcgaggtgttgtgcatgcagtatacgctaaaatccccccgctaccagttcgcattcgaaacggacggccacaccgcccggatagccggcggccatatgggtgggatacccgcggccccttctccgcttttcaccgccacattgaaaaacacggcggacaaccgcaagctccacattgacaccctgtcccactgggaggaaatccagatccacgcttttgagcaaagccttgcgttttatttccatataccatcggagatcgaaggactgacggtgatggtgaaagccgcgggcgaccaggatgggattacctggcagaccgacgtgagcaacgccaatcccgcgtggagcgtgatggagatcacctatcccacgccgttgctggccgccgaagagtgcgatctgttcctgcccctgacaagcggactggtcctgaaaaatgcggggcagcgctgctatcaggaaaccagcttctacccatttcatcaggcctgcatgcaatatttcgccctgtataacgcgcgcggcggcgtgtacatcggcattgaagacggacgggcggccgtcaagcgctttgacatacgtgtccaggacggcatggcctccatccaggcctccttttttggcatcaacggcggcaaaccggggaactccttttcccttttcggcgcggcgcgctggcaggccttcgcaggcgactggtacgacgcgaccatgctgtatgccaaattcgttcatgcccaggcgaactggctgcctccgattggcgaacaagggcggccggacacccccgcccgctttcaaaacgtccctttctgggtatgcgactatatccccaacagcgcgtcgcaaggggacaaccggcccatgaacctgagcgccggaagcgataaaaccgacccaggatactggtaccaggcggtcatcgacctgcaagaagcgttgggggttcccatcgcgtaccacgtgtacaactggcacgagattcctttcaacatcgaatatccccattttctgcccgccaaaacggcgtttgccgaaggggtcaaaaagctgcgcgaacacgacgtgtatatccttccctacatcaacgcggttagctgggaaatgcacgacgaggaaggcgggcacgcggtgacgtttcgcaacaccggatgccatggcgccgtcctggacgaaaacggcgaataccaggtggaagactacccgcaaaagacccgccgcacaggcaagacggcgaagctggcccccatgtgcccgacatggaacgagtggggcaatcttatggaagcgctcgtccgcgaaatggaacggacgctggatatcgacggcgtttatttcgatcaaatctccgccaccccttcctatccctgctacaaccccgaacatacgcacctgcccggcggcggggactactgggtggaagggtatacccgcatgatggacaagatccgcatgcataaaccggcggacagcttctatttttcagaatgcaacgcggaaccgtatctcaaaagttttgacgggtttctcacctggatgtgggtacgcgacggcgaagtccccgccttttcggctatatacgccgggtatacgcagatgctgggccgctgcacgatcggccgcaaaaaggaggatttcgactttttcaaatactgcacggccaaatccctgctgtacggccagcagctcggttggtgtaaggcggatgtgctattcgacgcggacaggctgtcctacctcaaacagctggtacagctgcgctaccaatacacctccctgtttcggagcgctcgtatgctccgcccccccgtcgtgacctgtgacgcgaaacccgtcgtcacatcgcccgctttgtggttcaaagacgatcttgtcatggagcaagtgctggccggggcgtggcaagcgcgcagcggggaacgcctggtgattttcctcgtcaacaacgccgaacggccgagcgcgttttcgctcgcctttccggcggcggaatatgccctggagcggtatcgccttaccgaggattgcgtccttgagggggataccggccgcctgtcaggcaccctgcagccgctggaatgccgcgtctgggaatggagagagaaggacgaaccgctatgctcaacaccgtgattttagcagacaatattcaaaaatatcggaaagcccgcggcttgacgcaaaacgaactggcgcaaagcctgtccatcagcccgcaggccatctccaaatgggaacgcggcgcttccgttcccgacattgagaacctctgtttgatggcggaacggctggaagtttcagtcgacacgctgctgggcggcagctatgccaccgaaaaagcaatgatagcggtggatggcggcacaagcaaaaccgagtttatcctgttcacggaacatggaacgcttttgcaccgcctgctgctgggcggctgcaaccccaatgtcatcggtattgacggcgcttgtcaagttctgcgcgagggccttgacgatctgttcaaacggcatgcgtttgtgtgcggcgtgtacatcggcgcttccggcttcggcacgcaggataacgcccggctcatcgcttcccagctgcaaaaagtatacccgcatatcaagctgcgttgcacaagcgatatcttcaacgtcatcgccaccgccaccagcagcgagcaatgcctggccgccatatgcggaaccggcgcggtcgtgttcgcgaaaaaaggcgagacgctcacgcgcttcggcggttggggatacttgtttgaagaaggcgggagcggctatgccatcggcaaagccgccatatgcgccgctttacaggaagaggacggcttggaggagaaaagcctgctcacccagctggtacaagacaagctgggttccaccgcctggggttctctccaccggctttatggggaacctcccgcttttatcgcggattttgcgccgcttgtctttcaggcgcacgcccgcgcagacagccgggcggaccgtatcctggaggaacacgccggttgccttgcccggttgataaaccacgcgttccatatcgtgcgcggcgacggcccgctggtgctgtccgggagcattttgaccagtcagaccgtttttcttgacatgctgaaggcccggctggatccctcccttcccgtgctggtcccagcggttgcacaggtatatggggcgtgcctgctctgttgccgcttgtgcaagcttcccaccggccctttggccgaaacattttgcagccaatacgcttctttcgtatccggtaggtgaaattgatgcttcgtacagaaatgcgcaatccccgcaccactcatatcgatcaaatggacaccatggatatcctgcgctgtatgcaggcggaaaatctggcggcggtgcaggcggtggagcggccgctgccatccattgctgccgcggtggacgctatcaccgccgccttccaagccgggggacggctgttttatatcggcgcggggacgtcgggccgcctgggcgtgctggatgcggccgaatgcccgcctacttttggcgttcccgcggataaggttgtcggcatcatcgccggcggcgacgcttcgctgcgccacgccagcgagtcggccgaggacgatccgctggcgggcgcggcggatttgcgacagtatgctttgacggcccatgacgtggtggtggggatttcggcggcgggcggcgcggcgtatgtgctgcgggcgctggaatacgccgccggacaaggctgcgtcaccgtcgggatcacctccaacgagggaagtccgctggacatggccgccgccatttccatttgtaccgacacgggggccgaggtggtcaccggttccacccggctgaaggcgggcaccgcgcagaagctggtactgaatatgctgaccaccgcctctatgatccgctgcggctatgtgtatgaaaacctcatgatccatttgcatcctaccaacagcaaactgcgcaagcggatgatccggattgtatgcgaactggccgcctgcgacgagtatacggccgaacaacggctcatcgcaaacggctgggacattcccaaggcggtctccccgtgcgattgaatcggcgtcaatgaccggcctcagccaggctttttcaacaaagaagggcgcgttgcaaaatcttacattttgcaacgcgcccttctttgttcagcccagcagccagccaagctggttgaacagcaggcccatggccagggtggccgtgttggccagcgccgtgtatcccagcacccgccagcgggacacgccgcggtagaggaaaagataggcgatgaactccgccgcatacacggcgatttcgcccaccagcaccgccgtcatatagggcaggccgctcagagacaggaacaggatgagcagcagctgcgtcgtcaggttgaccgccgccaccttccacaccgcccgcagccggaaggccagcgcgagcgccgtttccacccccaccgacagcagcaggcgggccagcaccgcccacagcggcggcatcccccgccgggcggccgagccgtggtagtagttggtataagtcgccgtcagcgtatccgcctgcgcatcgtaatggagcgtgcgcagaaagctgtcggcatccggcggcgccgcctccaccaccggggaaacctgcagcacccggccctcatcgtccagcagggccaccttgacccgggcggcgattttgtccagcggctgattggaggagggcagcagaatcagcccgctcgcctgtccatcgaccgatttcgacaggcgtttgttttccgaaataccctggagatggagagtcaggctgacgaacccctcctcgtcgtaggcgacgatgggcgcgtcctccggcagccgggccccggacaagacgcgccggttgagggcggtatacccctcgtcctccggggacagctgcgccagcacgtcggcccgcgttgccgcctcgtccgcgccggtgatttccatgtacagatagttagggggcgcaggggcgttggccgccgcccccagcgggaacagcgccgcgcaaaacgtaagcagcatcagccagagggaagctctcgcttttttcatccagaatcgccgcctttccagattatctgttcacttgtcgtataccgttgtccaaccgtcagcctttggccttgatatacaccttaagcaccgccgcctgggttttcgcgtcggtgatggtaccgtccagcaccatggccgccgccttctccagaggaatccgctccacctccaggaactcgtcctcgtcggggttcatctctccgtaggtcaagccggtggccatgtacatgtagataatctccccgcagtagccgggagaggggtacagcttgcccaggaactcgtactgcgcggcggcggcgccggtttcctcctgcagctcccgcttgccgcattccagcggatcctccccgggggtcagcttgcccgccgggatttcggggatgacctcctgatacggatagcggaactgccgcacgaagagcagctccccttcgtcggtcagggcggcgacgcagacccctccgggatgctcgatcacctcccgggtggccttcgccccgttgggcaggcgggcctcgtccacccgcaggttgatgattctccccttatatttatattcctgcgacaggggcgtttcggtcaaattcataatgtcgtctccttactaatatgatagactatgtacgaggagggaaagccatgacggacaccatcaccatcccccaggtcaccgacagcggcgcggtgcggggcatgatgtacgccctgcgggggcgctaccggttcttagacaccatccccatcggccgcagcgtcctgggccgggaaatcttcggcctgctgctgggcggcggaaacggcccggaaaaggtcctgttcgccgccgcgttccatgggcaggaatggctcaccgccctgacggtcctccggctgtgcgagaacatctgcgaggccatgcagaaggacggcaagctggacgatctcgacctgcgccaggccctggccgggcgcagcctcattctggtgcccatggtcaaccccgacggggtagacatcgccctgcggggcgccgaggccgccggccccttcgccgagcaggccgccgccctgggggccgaccggccgggcctctggcaggccaacgcccgcggcgtggacatcaatcacaattttaacgcaggctgggccctcttgcaagagctggaacgcaaaaagggcatcgacggccccgccccccgccaatggggcggcccctgccccgaaagcgagccggaaacccgggccctcaccggcctgtgcgcccgcttccgcttccgccacgtggtggccctgcacagccagggggaggaaatctactggcggtacggcgatcgcaccccgccccaggcccagatgatggccgacgtgctgggcgcggccagcggctaccgggtggccgaccccgagggcctggcctcccacggcgggtttaaggactggttcatcgattccaccggccgccccggcttcaccatcgagctgggccaaggggtcaacccgctgccggtttccgacttcgaatcgctgtacgccaaggcccgggaaatgctgctgctggccgctcttttatagccaaatgcgtatatctttgcaaaaaaatacaaattgtatagtaaatcacgccgttttctcccggatttcctccggatggcagcggcagtagtggaagatatactgctgggcgatgcccgcgtacgggccgaaaatggccggggcgctctccggcattttccccgtttcctccgggaacagccgggccatggcccgcttcatccacacgtccatggggaagcactccagccgccccataccgtacagcagcacgcattcggccaccttgggccccaccccgcggatgcgggtcagctcccgacgggcgtcggccagcggcatgacggccaccgcctgcaaatccaccgtccccgccgccacctgccgggcggcgtccaggatgtagcccgcccgccagccgctgcgcaggggggccagctccgcctcgctgcaggcggccagcctctccggcgtgggaaaggcccgcgcccccccgggcagcggctccccgaacagggcgcacagccgggccaggatccccttaatgcggggcacgttgttgttctgggacacgatgaaggcgatcagcgcctcgaaggcgggctgcctcagcacccggataccgggggcgaacgccacgcagggggccagccggggatcccgggcaaaggcggcccggacggccgcatagtcccggtcgagatcgagatagtcccgccagaagccctcgaactccgccgccgtagccccctccagcacgagactctccccctcgaagcgcagccccgccgcgtggcctcccgccgcgccgaaccagccgccgtcccccgtcggggcgaagcggaagcactgcccgcagtccagcgtctgggccagatcgaagggctccgccccctccaccctcaccccgccggggaattccgtcaccgtcatcgctcacgcaccgccttttcatttcgattcccgtatgctatactgttcagtatactggaaaacaaccatttccgaaagagtgaatttttcccgtcggggaaggaaggcgtgtgaacccatgagagaggatattaccagcatcccgataagcgaggtgttcgaaccccgggacggctgccccatctgccggatgcgggacatgctggaggcccgggtggtggactacatcaccggcgcggccatgatggagccggacgtgcgcatcgagaccaacaagcaggggttctgcttcccgcattaccagatgatgctcgccaagcgcaaccgcctgggggtggccctgatgctggaaagccatctggacgagctggacaagcagatcttcgccggcctgcccctgcttggcaaaagcgggaagaaacagggcaaggacgccggccaggcggcgggctcctgcttcatctgccggcaggtggactgggccatggagcggatgctggacagcgtctgccgcctgtgggagaacgagcgggatttccgccggctgttcgaggagcagccggtgctctgcctgccccacttctcccgcctgaccgaggtggcggggttgaagatgagcaagaaatacgcccccgatttcgccaaggcggccgccgccctctgccggaactatctgaccgagctgcggggggacgtgtcccatttctgcaagatgttcgactaccgtaacaccggggaggacgccgactggggcaattcgaaggattccatcgagcgggccgtctggtggctgacctcccgggagccgaagtaaaaatggacgacaaaacgaagcgggcggccatatacggccgcccgcttcttctatttcgagtgcttttcctcatacgcgataagcaccacgttcttgtcccgctcccggctgagccgttcctccaggcggcggatttcctccacctgcccggggcttacctgcgccacggggaactccagcttctcctccatcacaggaactccttgagctgctccaggttgcgctcttccattttcagcagccgctgggccagccgggtggtctccggctcggcgtcggggcactccttcagcttcttggtgatgtcgataatccccatgttgctgccctggagcatcatctccgcgatgtgtgtgttggatttgtccagcagggtgttgaggttcagcatggtggaggcggacacccgctccatggtgctgatccccttggcgtccccgccttccttctgaattttttcctccgccttgttgaagatctcctggtattcggtcagctgatcctccaacaccctgcggaagttcacgtcctccacgattttggtcagcttcgggatggtttccttacccatctccgcgttttggtagatgaaattgagcagcgccatgtcctgcgtcatagttgtcccgcctttccttgtttggctttagcgttcccggcgggacagaggattatcgcagacatctcctggaaattttatacacgggtcaatgtgaaggacagggcttcgaagtccttgagaaccggaatgcccagcccggcgaacatcagctcgccgccgccgaaatcggcgtccagctcgtcgatatgatagcgggcgtccgggtcgagacccatcagcttaagacgggccgccaggccgggctcggtcagcgcccgcacataggtggccaccgcccggctcttgtccggggagacgaacatccaggcgcagctgttggtttcaaaggggctgaccaaacggtaaaaatccccgtcggtgattaggctgcccagcgcgtgatagcgggcggtctgctccgcgatttgccggcgctcctcctcgctgagttccagcggattgagctcatacccgaaggaggcgctcatggccaccaggccccgggtgcggaagggggtgacgcgtcccacctgatggttggggcaggcggagacatgggcggtcatggcctgcggcggatagaccagggaggtgccgtattggatgcgcagccgctcgatggcgtcggaatcgtcgctggtccaaatctgggggtcataatacagcatccccgcgtcaaaccggccgccgccgcccgagcagccctcgaaaatcacgtccgggaacgtcgtggtcaggtaatccagcagggcgtagagattgaggatataccggtgaaaaagctccggctgccgttccggcggcagggcggcggaataggcgtcggtcatgtggcggttcatgtcccacttgacataggaaatccggttggccgccagcatcccgcccaccgtctccttgaggtagtccagcacctcttgccgggacaggtcgagaatcagctgcttccggcccaggcaataggggcggccctcctgccggatacaccagtcgggatgggcacggtacagatcgctgtcctccgaaatcatctccggctcgaaccacagcccgaaggtcatgcccagctcctcgcatttttcaatgatgggggtcagcccatggggcagcttgcgcttgtccacgaaccagtcgcccagggaggtagtgtcgtcgtcccgatggccgaaccagccgtcgtccagcacaaaggtatcgatgcccatcccccggcagctctctatcagttccagcagcttttcctcgttgaactggaaataggtggcctcccagttgttgatgacgatgggccggggcttgttgcggattttggtgtgccccaggtggtatttgatggcctgatggaagttccgggacaggcgtccaaggccgctgtccgagtaggtgaggatggcctcgggggcggtgaaggtctccccgtcctccagccgccaggagaagtcggccggatggatccctatttgcatcctggtctgtccgaagggcgtgacctccgcctgggccaggaagttgccgctgtaaatcagcgtcgcgccgtagcactcgcccgctgtctcggtggtctcgggcgcggcgagggccaggaaggggttatgctgatggctggacgcgccccggcggctctccacagcgttgaccccgcggcgcagaggggtgcgatcgatttgccgctcccggcaatggatgccgtacaggccgatcatgtcccaccggctgtctggcaaatccacgctggcactgagcacgcgggtcaaatccaccggcgcgccggtggcgttgatcacccggacgttgcgggtaatcacgtcgcaggcgggatacaccacatagcggagcaccaccgtcaggccggtgaactcgtcggccagggtcacctccagggtctgctccccgccggacaggcccggcagcccctggggctcgatacagccgtcgaaaatgacatgggagcggtaggtgaggtccaacaggcggctgccggtttcaaaccgggcggagaaggccggcacccggaaatccccgccgccgtacaccggatactcggtgggaatgagatccaacgaatgccggctatccgccgcgccgctgtaaaccggcgagaacccgctggggaacggctgccagagccgggtcaaatcggccggctggatttttgttccccaataggtgctcagcagatagcccttgtcaaaaatacggaacatatagcaggtgcgatccgtcgcgagataaaacgtgcctgtgtctttcaaaaaagttatcgccaaagcaaacacttccttttaaaagatgattctgtgagtattttaccgggttttttataaaaaacaagagaaaaagcgtcccaccttatggaatatcgtcccatcgacaagaaaaatcaaaaataggacttgcaaaatccgccgggacgtagtagaattgatatgcccttttgaaagggaaactatccgcccgtggcgaagctggatatcgcagtggattccgattccaaaggccgggggttcgaatccctccgggcggaccatatgaaaaaagtcgtgtaaacctagtgtttatgcggcttttttctttttgtcttgaaatggggaaagcacgttttaggggtgctttccccattcttctaagactttttctaagactgcgggggtagccacccgcacaaaaacacctgcggtgtttcctgcggtgtttttcagccccccgttaaggaaatgagcctttatcgcccgaaacgctcctcatatgcagcagctcacccatgccgtccgccagccgcatcttggactgatactccagatgcccatagatatttccggtcgtaccgatgtcgctgtgtcccagccattcgctgatttctttaagctgaaagcccctggcgagcagcagactggcacaggagtgacgcaaatcatggaaccggatatccggcagatggtgacgcttaagcagccgccggaagcccctggacaccacatcgggacgaaagggcaagccgtccggccacttgcagacgaaatcgttgcgcacatagcccgcccccatgagaagctggttttcccgctgctcctgcttgaggcggcgcagatacctctccatctccggaatcagcggcagggtgcggcggctcttcttgtttttggtgcgctccttttccacgacaacctttgactgtaccaccgtgttctgaatatggatacgtccctcctcaaaatccaccgccgcccatttcagccccagcacctcggaccggcgcaacccgtaaaacagggtcagcaggataaccggctcgaatggatcaccccgtatcgcctcgatgagcgccgcggcttgctccgcattgtagtagtttccgacgtactgctgcaccttgggtaacgtcacccgctccgccgggttataggggatgagatttttgcgcacagcgtctttcagggcgctgtggatgacgacatggtgctttttcaccgtattggcggataacccgccccggccatccagtcgcccgtttttcaccatgacgttgtagtatcgctggagcatctgtggcgtcaggcccatgagcgtgactttttgcggctcgaaatagggcaggatatgccgctcggcaaacaccttgtaggaatcccatgtggagcgttccaccgcgtactgcatctgttccagccactgccgcagccagtctgcgaacaatacgtctttggcataggccacatggctgtcttcatactgcttcagcaggtcgcggaaagctttttgcgcctcccgctttttcaccctgtccacccggagcttcaggctgatccatttgggatgcggcttgccggcatcgtctgggatgttgagtacagcgtagtagatgtttccttttatttgaaggcttcctgtcatgttgtcctccttcctgcggaagcccatcacttactatgagtatagcacagtgagggtcggtcagcaattcttgccgtccagaaaccgcacaatttcgctcttggggatccggtagcggtttcccaccttgacacagcggattttctttgcccgcactagctcatacgccatgtttttgctgatgcgcaggattgtgcagacctctttgacggtgaggacgtcgccgtactcgtcaagcatcgccgtcaccgccgttccagtagctgtccggtttgccttccgaatcagccagataaatccgcgtgatctccgcccgttcatgtcccagccagcgggacacctgcagacaggcctcatgcggcgtttttccttcgcgggtaagccggcggtaccattctgccgcgcaggtatgccgcaggccgtggaaggtcatggggcgctccgagcctttgtccttgacggcgtcacgatgccgccggataaaggcctcaagctcatggataacgctgtgggtatcccgaccggccggaacaaacagcttatgtcccggcggcgtgattttcagcagtgcggccagttcgatgcggatggtttcgttgatgggtacctcccgcaccttgccgcccttgcccttaatcgttaggaaaccatcctgtaaagcggcccgggctatggcagtatccatgcgcatcacctcgtggatgcgaagccctgcgtatcgaccaataacgatgcagacctcaaaatccgggcgttcagctttccagcactcgccgatcatccaattgaattcccgatagctccatgtccgatcctgcttcccgaatacccgacgctccagctccaattcccggttgtccggcagggcatagcgggcgtttggaatctgatcatgccaaaagcggatcgcggacagctcggtcttgatggtggcaggcgaaagtctccgcctttgcatatccgcgacgtaggcggccagatgcttgccggacaggttggcgagtttctccaggtggaaccgctctgccgtaaaccgcagaaagcgcaggaaagcctcgtaatatcgctctttggtcttgtagcttccctgccggttgtggcggcggaacttctcggcctgtgcagccaaattgataaaggtggtcttcatatgtgctcctttccttgtcaggagcaccgcgcagcctggattcgggcagactctccccactggcattttcatcgtttccggccattttccagagaaaagcctgcccaaacccgcgctgtcactggatgcggcggcctttttggcttctgtctcttggaatggaggatgaccggctatgtggttgtggaggtttagtaagttcccgtatgggctctgagaagcctggggccaatgcctcgacggggagcgccttcgccggggatacccggctgcagccgaatacgctgcgggcgctcggcggccagtccagacgatgacagggccgctgaatggtgggtgtcccggcatcgtctgtgggggccaaggcccgcctgccgggtcggaatccgccgccgtgcggttcctgcaaaggcgttttctgtccgtgtcctccggcgcctttgctggtggccggggggacgctcacttttttgaacatcatacctacgctcctctcggtgtttgacttccgtaccgggtcggcaatccgggggaagagctgttgaggcaaaaaagccgcaaaaccattgctttcctggttttgcggcttaacgcccctttacggtggagttccatgcccgggaccccatcttttcgctccaaattggtgacctttgcttggagttggatttgggaagctctcgcttctatccgctctgtcctctcgtacagaacaaaaaggccggacttcccccttttgaaggaaaatccgacctcttaactcaaaccaatgtccactttagggacacttatctcaaacctgtttacagatgtatcttatcacaggctgcctgtcttgtcaaatgttttgctggttgcctgtttgcacacataagaaggcttatgcctcctgcggtgttttccttcctgttttccgcgtattatgcgctttcaaggcggaatacaccgccctcttttccgaaaccaccggcctgatgggcatacctcgaagggaaaatcgagactatttctatatattgtaattgtatgtcgatttgccttttgtcgttataattcttttaacaattctcctggctagtttgtacggaatttcaacatacattacatagtcgtgatctacacttatctattaatacatattggactatacaagaatctgaatgggtagactggaatctattgtggtgccatctccgagttccccacggttattgcgcccaaatgcccatatctcaccgttatccgttataagccgtatgcagataaccggcgctggcagcggttacatgttccattacctgcacaggtatagaactatctgttgttccgtttcccaattggccgaacttgttgctcccccacgcccagagcgtatgatcctctttaatggccacagcatgcgtgtaacttgtcgataccgaaagaacgttgtccattactttttgaaaaaggggagcttcctgagtttcacccaatcccaatacaccattgccggccacccacaactcatgatttttatttatggcataaatgacgttgtagccgataaccaccgtttcgatatcgctatacagcctgcagggagttaattcggattcataatcgtcccggccgaattgtcccgcatcattggaaccccaaagccagcgcgctccactgctgtcgagcacagcagattaggcaggaccgccaaacgctttgcgcacattgcccataatcttctggaatttgtaaatcgatttcgtcgaaccaattcccaattgaccgacctcgttgtcaccggttaagcgtaactgccagtcggtatcgattatcatggtataagaggctccagcagaagtggatatcacactgtcctcgagtttgagaggcttgagttgtaaggtgtcaccgacatctcccaactggcccatagacgtctgtccccatccccacaaagtattatcattccgtatagccacggtatgattgtaacccgctgagatttgtacaacacgattaaggacttggacgggacggtaccgctcgccagttgtgccgtctccgagttcgccgcaggagttgtctccccatgcatataagcgccccttttccgataaataaaaagttttataattggcggctattatatttggctcaatagagatgcgctcagcgaaatagatagtcatcgtaccagctaccaggagacaaatggctccgaataggagaagccattttcccacccggcatgtgcaacatccttttttcgtttattcattcgtatcaccttctattacaataaatttggacaggaaagccgggcagccagtccgcttgactttgctaatataagtttacggacaagacacagcagcctgccgtgtcttgctctatctcatacttaagctacaatgagaggagtaattggcctggcaaacttgactatggactacccacgtccgtaaataaaactgtcagccatcctcttattgcagcgttcggtttaagcaggttgagcttcgcgctcgttttaccgggcaaatgaaatcggcaatgagaaaacgatggtcgccacattacgatattattcgcatggaggaatgccgatgaatgctgtaggaatcaatgtttccaaaggcaaaaggttgaaacaatttaatttgagtaccattccaaaaaagagcgcacaagaacaagccccctaaaagcgggcaaaatcgaagttatgcttaaagtctaagcggtaggcggagcagttaccaaatacccttgtcgttggataatgtaaatagcttcttccagcgaaacttcacggtgggccgggggacggtctgccaagtggtagagagtcgattgtacggctcgtttttcttgagcatgttgtaaatggcagtgagcagcatcctggcaatggcaataatggctttcttgtgtccacggcgtttctttagtgcaagatagcggttacgaacttcaggaaacggcttggcacgaatcgcaccaagagcgcactgaacgagcaatggcttgatgtaggctccggcccggctaattctggtggttttcttctttccggcactctcgttgttttgcggcgtaagccccgcccaggagcagagatgcttcgaggtggggaacacggacatatccactccgatttcagaaatgacgccgattgcggcaaaggattggatacccggcaccgtcataataagttcgagttgaggaagatacttctcagcagtagacagaatcagggattccagattgagcttgcacagttcaaggctgtccatgtgggaacggatgatgcggagcttttcagcctgttcaacacacatctctccgtccacagcagcaaatatttcctcgttagttgctttcatgtgcttggtgcggaagccggaaacatctgtgattttcatcgctggattttctaaaattctggaaataattgcagaggcggccttaccaaacacatcggagaacacatcatccagcttgaagttggagaccgtcaaacagttctgtgcccggtttttctcgccggtggtgaagctggtgagtttccagcgatagcgtactaagtcccgcagttggcggatgttcgcaggaggaataaaactcccggcgacaaggtcgtgcttgaagatgtcagcgatccacttggcatctcttttgtccgttttcttgccccgaattgctttcacatacttggggtgagcaaggacgatgttgcaggtgggctccaagatgttgtaaatggggatccaatactttcccgtggactccatgcatacgtcttcgcagttgttctcagaaagccaaactgcacaccggcgcaagtccccggtgaaagtggaaaaccgcttgcttttgtagcttgtaacaccctgctcattggtggaagcgatacaggcaacgacaaaggatttgtgaacatccatcccacagcagacacggtaaacgattttgagcataacacatcccctcgaaacaatattagagggaacaggcagggactggacgttcactgaaagattgaagtagtccgtctctccaaagataaggttacagggtgcaaagccctattcattggtgcttgaaagagcgtccggcacacataagcattcagtccagcgtaaggccgagcctactcaccttcacgtgctgtgtagtgtgcctgcttcctcaagcctattctaacaaattacaaattgctgcgttataggctcccgtgtttcactccctttggtgccttgcagcgcagcggaaaggaatggtcataagcatggtttctgttaccggggtggctgtcccggtatagaggaagcgtccatttgcttatttgcagaaaaaaaggccgcaaaaccaaggcttaacagtcgtaaggaactataagtcttgcggttggggcagaggacggtgtgaccgtaaaggtcacgccgtttttctgcgtccaagggaagattctgcgatcatgggttctgccagcacggggatctccacctcgtcaacaaaattaaagatgatctccaccttctgtctgcgcttgccgccagacttatccggtgcgtaaatgatgatcttcctgatatactcgttgacaatcgtctgcgtcagctcggtgacatccacatactttttcgtcagcgcaatgaaagcgtccagatcatctcccattgcctgccgctgctcgacccattcttctgttgtttcaatttcgagctttaaccgttcctgctccgcttcataatcagccgtcattttcttgtatttttccttactgatctcaccgagggcgtagtcctcatagagccgggacatgaccacatcgagggtggcaaggcgcttttttgcctgctccacgcgcttctgatcttcccggatgtcccgttcctgatcggcgcggcgataatgcagccattcctcctgaaagccctctacatcgctgcggatatacgcattgaccgcccgaatccgttccagtaccagttcccgcagtacatcttcccggatatagtgtgcagaacaggtgcctcgaccgcttttgtagctggagcatacatagtggtcttgcttgccgtcaaagttcttgcaggtagcaaagtgcagcttattcccgcaatcgggacagaacagaagccc

SEQ ID NO: 3772 - DNA, 9156 bp, Unknown
  16S sequences of unknown bacteria
atacaaagagggaaggactccaaacctggccaactgtgcagttgtagcaggctacagcagaagaagtgccagccagcgagcgggggagactatgcgagtcccagaagtgcgcgcggctatccaggagtttgaggatggcattgtcaaggagatacaacggagatttgcgatagacgcgcagaacgcggtcaaaaccgtagtagaaataatgaggaaccccgatgcggccccacgggataggttgaacgctgcgaaagatatccttgaccgtggtggatataaaccagacttaaatgcggtactttccacaagggatggagcgccgctagaaatacatttttcgggagatctggaggactggagtaagtagtgctaactatgcgcaaaactaaagtttggcgaaaagtataggcgagaaataaataattatacataaacagtgccgaatatacatcgttatgcagcgtttttgcggggatgtacgcatattatttgcatattttgtgcatcgtgtatttatacagatacttccgtactgcttctctctcctcctttgacttgtgcggtattggatagctaacgggcgggcgcgtgtgtacatcccccctcccacctcacaggcacggcacgtccacgggcgcaacggggcgagggtatgggggcggatagctttcccccaaatagggcttaaagggcaaacgcatggggtgttgtagtgtgattttgcgggtatccccacaccattcccactcccaaaaaaggccctaaaatagagtcccttgcattgcaacaaataaaattttctcacaaaaaaggagtcccaatgtctgcaccgatttttgagcgcctggaaacagagacgccaaacgaaaagcaaatacaatttttcaaaagcacaaagaggcatatagcatatggcggtgctcgtggcggtgggaagagttgggccatgcgcagaaagtttgtaatgcttgctatgagataccctggtttgaaattgttgcttttgcgccgaactctgccagagcttagagaaaaccatcagttgcctttacaggaagaactaatcgggtatgccaaatacaagtcagatgaaaaggcatttgtatttccaaacgggagcaggatccgacttggatactgtgactcagagagtgatgtataccagtatcaaggccaagagtatgatgtgatagggctggaagaggcaacacactttacagaaacacaaaaggacttttttattacggccaatcgatctacaagggatgattttactcccaggatgtattacacttccaaccccggcaatgtaggtcatgcttggtttaagagattgtttgttgacagggatttccgtggggctgaaaatccagatgattatgaatttattcaggcaacagtctttgataataaggtgcttatggagaagaacccggagtatgtggaaaatctaaaagcgttgccggaaggtatgcggcgagcccatttgtacggggaatggaacttattggagggaaggtattttacagagttcaacccagaaatccacgttatgcgtccattttcgattccagatagttggaagagatatgtaacaatagattatggccttgatatgtttgcttgttattggatcgccgtggactacaacggctttgcgtatgtataccgagaggtgtaccagaagggaatgattatctctgatgcggcaagggagttgagattgaatacctttgacgaaagaattgaacattatatcgctccccctgatctttggaatcggaggcaggacagcgggaaaagcgcggcagaactattttgggactgcggcgtttatttaattaaggcaaacaatgatagggtgcaaggatggtacaatctccacgagtggttaaagccatgtgaagatgaagaggggaaaccagccgcgaagcttagaatttttcaaaactgtccaaatttgattgaatcaattcctcaacttcaattcgataaaaagaatcccaatgactgtgccgacgaacctcatcagtttacgcatggcccggatgcgattcggtattttgttgccagccgtccttcattacccgccgtaacaaagagagaaaaaagagaacgatatgagggcttttatggaaaacgaaaagaaaaggacaactcacttggctatggcatggaggtgcagatcgtatgacaatccttgtgtttttaatggctatgacaggtctatttttatgttcattcgcatggtacagaaaaggtgtacaggtaggacagaggaaaaaagaagactttatgtcggataggcatatagagacaatgaaccaggtgtttgcaaatatcgacgcttataacggcagtgagatcggtcaaaaggcggtaacagatgacagataaaacgacaaaggtatggaatcggtacgaaaaagggaaagagtataaccgatcccaaaatctatatgaacagacagataaaaactggcgattttatgctggagatcagtggcgaggagcaaaacttgggggcgctgcggctgttcgatttaactttataaagcccatcgtgctttataaagtagcttctatcgctcaaaacatgatggagatttcttatacgcctaatctgtacgctatgcaggcagagggcgaggatattatgaatagtgagtttgtgcaaaacgtcagagatatttgtgaaaaactcaatggatatacaaaaaaactgtgggaactaaacaagatgaatacagttatgtgggatagcgtattgaacgcttgtgtgtccggagatcaaattttgtatttctataaaggagattatgaaatcgaatgtgagcaggtggatacgacaaatgtgtattttggtgatgaaaatgacccggatattgagtctcaaccgtatattattattgcctttcgtcgcactgtagaatctgttagggaagaagctaggactaacggtatcccggaaagtaagattcgagagattgtatcggataatgagactgaggagcaatccggcgatgccgctaagtatgaagtgaacgatagtgaagaagatggaaagtgtattgtactattggaattgtataaaaaggcagataaagctggaagaaaaacggtatggagccaaaaatccacgagaaatgtcattatacaagagccaacaaaccaggggcatacaaattatcctattgtgcatatgacatgggaaaatatcaagggttcgattcgcggtgacggggaagttaaatacctaatcgacaaccagatcgaggaaaacaaaaacttgattcgcagggccattacgattggccaaacggcttaccccaaaatgatctatgacaagagcattattgccaatgcagaagatattaccaaaatgggtgtagcgattgctattgatgggatcaacgtaagtgatgtgatgcaaaagataggatacttgaacccctctacctacaacccggacgccaggaacctaacagatgaaatcagaaatgtatctcaagagcttgcaggggccagcgatgcagcgttgggcaatatagatccgtccaaagcgtctggccaagcaattttggcggtaagggatgcagcgcaagcgccgatgtccaggcaggtagcgaagttcaagcagtttgtagaggatataggccgtgtgtggtttgatatgtggactgcttattacccagaagggaagctggttgtttcagaggaagtggatgaactgggaaatgttgttgccgaaacagtagaaattattccctacgagatgatgcagaggatgaaagtaaatgttgtggttaatgtttctccagcaaacccatacaacaaacaagcacaagaatctactttggaaaactttttgttgcaaggacagattacattcgatgaatatgtggaagctcttccaacggatgcaacaagtcctaagtacaaattattacagatcatagagcgaaggaaacaacagcaacaaatgatgatggaacagcaagagccgttagcgagtgagcaaatgacagaagagttcccgttagagagtattgatttgcctatggatgagtcaggacaaaatacaccaatcgatactctcacggagtcacaggatcctatggcattagaagatggaccgggaattagtgaacaacttctattggcgaaaatgagagaacaatttccggggttaacatacgacgaactattgcaaatagacccacacatgatggaatgagcgcataagcgctttttttatggccgacgggcataaaacggagccgacgggctgtaagcggaatttgtcgacggacataaaacggaggggaatatggaacaagaactggcgaatgtagaatctgtagagatagaatcggatcgcgtagaagacgtagaggatcaggagtccacagattcgcaagagattacaacggatactgaggaggtagttgaagaaccacaacctcccatgtatacccaggaacagatgcaggcagagctaaaccgtatcgcgcaaaaggaaagagagcgcgggaagcggaatgcggaagcacagtacgcagattacctgcaaatggcagacatcatccgacaaggcgctgggatagacgttacagacccaaaacagctcaatactatgcttttgcagatgtttgaacaaaatggagtaaaaatcgaaccacaaaagcctggtttgcagcagagagagcaaacaatcctgggcgaggcagatgcgcaagatgatatagagcttggaattgattatgtattagaaaagctggatatgtaccaagcatcgccgccccaggactttcgtgaaattgccagggcaaaagacctagcggactttgcatctaaatattttgccgccaaagaactggaaaagcaaggcgtcaatgctacagaggtgctagggaataaaaatttccaagcatttgcagcacgatatagagccgatgtgccaattacggaaatttatactgattttaaaaaggtaaacggcgaaatgcctagagcaccaaagtcaacaggcagtgtaaaaggctctggaaaaacaaacgatttatttttcaccaaggatcaagtcgcggctatgagccgagatgaaattagaaagaactttgacgcaatagagcgttcaagaaaaaaatggtaaaaggagagaaaaatggcatatacaaattttatccctgaactatgggcggaaaaggtacaaagagaaaacgaaaaaatgctggttatggccaaactatgtaaccgagaatgggaaggtgagctgaaaaagaaaggcgataccgtacacatcttggggattggatcaccaacgattggtgattatgacggcactgcgattactggcccggaagcgctgacggatactacgattcctctggttatcaaccatgcaaaatattttaatgttttgattgatgatattgataagagacaggcttcccccaaagatttgatgacacagattctagcagaatgctctgaatcgctctcggccgctgaagacctggacattgccaaagatgtttacaaagatgtacagtccgcgcaaaaaattacggtggacagctgtactaaagaaaatgcacgatcctttttacagaaagcaaaaaccaagctgtataaggcgggcgtaaaacaggggagtgaaatcgttgcggtggtttcccccgactatctggaaaaaattgaacaggatgtagaaaatctggaaacggataacatgaacacggctactaacggttttaagggaaaaacgtctgggatctctatctatctcaccaacaatatccatacaagctcgtctaaagagatcatctatgtgatgacaaaacgagccattgcacatgcaaaccagatcaatgaagtaaaggcatattcgccggaagatctttttgcagatgcagtgaaaggcttaaatgtttacggttcaaaattagtacgtcctaaagaactggttgcccttgaagtcgcggcatacgcgtaaggagggatacgatggcagcaacagagattatagtaactaaaatagaaaaagaaaaaacgattgagatccctactacagcggcggtggatgcgactgacggtgcggccgtgaaatgggactgcgcagacggtaagctgctactcattgtggaaaatgcagattcagcttctgcaaaaaacgctacgatagtcaatggtggcggccttcagggtatgggggatctaacacttagcattgcccaatcctctacaatggccattgtgctggattccggcaagtataaacaggtgagtggtacttataaggggaaactttggattaagggagaagacgcgaatattaaagtagccgctatggagctagcataaaggggcatatgccccttttatcattctaagagcacaccgggtgcaactcccggaagaatggagagagatgaaatgacgctaggacaggccaaggctatggcaatgaagctaatggatgagtatatggttgataccccccccacagacgatgaagagacactggcaaaactgaactcaatgtttcaagctgcacagatttttgtttgtacaataaagccgcttgaaaagtattttatcattgagcatccacaaagcgatactatcttcaatgaatatgatttgccaaaagacttttaccaagcattccttgtgagagacgcacaaggaaatggatatggtcaggttgagtttcatgagccaaagctaatgattacggatcaaactgcgcagacaattcgcgttgattattatgcttatccaacggaaattacagatgacactccagatgattatgaattcgaattaactcaagatgcacaacaggtgctaccatatgcggtcgtgtctgacttgttaaagacagacccaagcgctgattatacagcctttgaggtaaaatttaataatttagtagcgagtttgagtccagcttcatacgcaggaatatcttttgtgggcggtatcagaatttaggagggagattatatggtacagttgcaaaacccatctaaacggacggcgttatcgccaagaacaagggtttacaatggatttaccggcgtggatttttcttctgactcttccaaggttagcttgaaacgtagcccaaacagcatcaacatgtataagaattatagcgtagaactaggtcaatgcgttgagacgcgaccaggattccggagaatgatcgagtttccgaatcaagaagattccatcgtatatgggtataatttttttgagataaagacagaacaaggacgtagtacaaagcctattttccatgtgggagaaaaattgtttttatggtctaattatcctgaaaaggctgaagaggaaggagatattgtagagctatacaacggtatgaataatgatttttcctttatgcttgtattcgaggaaagcctttatattatagatggggaaaattatcttgtctacgatggtgaaacagttaaaagtgtaacagaagctgcatttattcctacaacttatacaggacgtccaccactaggcggggggcagcaataccagcaggttaatcgcctacagcccacattcaaaaactcttttttggcggaagagggaaaaagagactactatttgtccgtgaaagatattgacgctgcccctgtcaaagctacggtaaacggagaggaaaaaactgaaggtgtggattttacggtaaatcgcgaagaggggaagataacatttaatacagccccgcccgtaccggatacggcaggtcaagataacgtagtcattacagcttcaaaaacagtagaaaaatatgcccctagtattctacattgtacggttgccactgtgtttgacaaccgtatttttttagcggggaatcctgatactcccaatacaatctatttttcacaactcaacgatcctacatatttcggtgaattgacctatgaacaggtggggacagaaaacaccaatgttatgggatttatgcgtatcaacgatgcgttggcgacattgaaggatagtagccaacaggaaccaacggtatttttgcatgagccgaatgataccggcgtggactacaacgtaaaaacgtatccagcaaaagacggattagcgggaagtggatgcatctcgaaacgtggatactgtaattttttggatgaccccgtgtttatcagctcgctaggtttgcaagcaatcggaaagatgaatgtggggttggagagaagcattgagcatagatcctccttggtagatggaaagcttgtcaatgaagaggggttaaacacgagcgttcttaaggaatggcgaggatacctattatgtttggttaatggacgaatctaccttgcagatagcaggcaacgatataagcaatatgcaacagacgtcgtggaatatgagtggtttttttgggagaatatcggcgtgtatgagggagaagtgttcaaacccgctacatctctaatggtgtaccaggatgcgctatattttggaacggaaagcggggtactgtgtaaattcaataccgaccaaaaaacagggagtagcggagaacttttttctgctgcttataacgatgacgggaaaccgatcttttggtgctggacaaccccgtttgacaattttggagatagcaaccatgtcaaaaaggacaataagcgcggcaatgttttagaattgaaatcaatgacacgttcatatataaaggggaaatgcagaacaaataaggatttttggaaagattttgctcgcgtagatggtggttattttgactttaatgaccttgatttttcagatatgaatttcaatactctagatcaaaacaatgtggcttttgtcacaaagaaaaaaagattcatcaaaaaacaaatcatgttttatggtgatgaactcaatcgcccaggtggtatttactcaattacgatggaaatatttactggtggttattttaagtaggtggcaagaatggcatttacaaagtttacttctgacgttgaaaatatacaaaagttagctgacaggccgcagctagagccaaaggcattaaaagaggtattcgataaagcgggagaggatataaagaaatatgtagcagagacgctggtgccggagatggaggctgtgacggcggcggaaagcatc

SEQ ID NO: 3773 - DNA, 32759 bp, Unknown
  16S sequences of unknown bacteria
cccctgtctctactggagcctacgggatttcacttcttttcggacggtctgaccacaatttgtctgaaaactacggttttcagactttttattgtgcatttttacatgaaatgtttgaaaaagcaaaaagaaggggcctttcattccctgtttttccggtttcttgcgttaaagtgcgcgacaagagcgcctgcgcccaacaggttgatggcgcggcgtagattgtaaccgagaaggctgagggccatttcggtgcgcaccatctccttttccctgcacaggaagaaaagagctccgtcataccacttcaccatcccaaagggatgctcggccggttcctttcttcgctgcatgtcttccgggttgcgccggaggatcacccacacaagcgggcttttgcggcctccccaggctgttgtgaggctgaaagcccggcggcagctgctgaaggatgattcgggtggccatacatgcgcacagcgacaatgtttctgcttggcccgatgctcaccggctttgttttgtgcgagtctgtgcagcgattggggcaggtgcggcgggcttcccggcttccgttgaccgttccatgctcccgtttgcgatgcttgaacagctcctgccccatcgggcaggttacacgtccgtccggatggcggatgaagcaactaaccacgctttgccgctgcacacgcacggagatggtcgtccccccaaagcattcggacagcgtgcctgcgtgcaggcacttgcagatgtcttcgggtttgttctttgggctcttcatcgatttcagcagggatgaattctgcaggtcatccccggatcattatgctgatctttgctgtactcctgcacgagcttcaagaggcctgcttctgctttccttccttgcgccttctttatggcagtcggcaagaaccattcgcctcgttcttaaataggaaagaagcagtcctacgtgcgcaggctatgtctttatgggtggaaccggcaagccctgtcacagaagaaagaaaaccgttcgtccgaccagggtatgctcacgtccggggagcggagactgtggcgcgctcaatgagctctacatccaacacccgtacttctgcgggtgtgtcccggcattcgatttgacgctgtaggatttctatggcaagcgttgccttttgctccaggcactgcccgatggtcgtcagcggaggatagatttgcccgctcacaggaatgttgtcaaatccgatgatcgacatatcgcggggaatggaaatcccgcgctctgccagcgcgcccatcagccccatggcaagctgatcgctggtcacaaagacgccggttatactgccggccatggcgcacagcgcatccgtcgcggcagaaattgcctgcggatcattgtcggattccacaacaatccgatgtttcggttccagcgaaaggccgtgggcagtcaattcgtccataaatccggcgagacgctgctggatgacgcccgtagcgcgctgtgcaggtccggcaaaggcaagacggacgtgcccatgatctatcaggcatcgggccgccagccgtccgccccggtagtcgtcaatgcccacgctgcagatcctgcgtacgttgctgtagctgtccacaaacaccataggggccttggaggcagcataaatctgctcaatttcatcatcaaacattcccagaaaaaccgcgccccgcacattccaggcccgcagggttttggcaatatcggccttgttttccacgaggctgaccattgcataaaagccgccttcctgaagcagccggatcatctgtcccaccagcgctgcgttatgcggcccgctcagcgcattttcattgccgatattgcgcagcatgatggccacgatgtttgaattggccttggcaaggttgcgcgcactggcgttttgcacatagttgcgccgtcggataatctcctgaatctgcgccgctttttctttcgacaccttggacaggttgccgttgacgacgttggaaaccgtcatgacgcttacattggcttcctgagcaatgtccttgagcgtaaccacaggcatcctccttgcaaaggtttataaaccatgctaccacaatctgaaggagaattgcaatataaaattgatttgtaagttttattgactcttttcagtcgaatatagtttaataaacctcactcttgcttgtgcgaaagaaacgttcaggcagaaaaacatttcgttatatttatttaattttttattttactattgacaaaggataccagaaggttataatagaatcaagtttaccgctatactagtcaggcggaaagaaaaatatcggaagggaagattcaatcatgaagaaaaatctcaggcgtctgctttccctgctgcttgcaatggccatgtttctcaccgtgggcgtcgccgcggccgaaggcaatgcggtcattggaagcgccattcagtatgatccctccgttccggtcaacaacggggaggacatcgccattgaattctggtattggacgggcgcggccaacctgtttcaggcagtggtggacgaatacacggccattcatcccaacgtaaagatcactctcgtggagaacccctatgaggactactggacaaagctgcctctggccctgcagggcacggacggccccgccatcttcaacgtacacaacagctatcatgaaaacctgatcggttatctggcgccttatgatattcccctggaggatctggaaaccgactttgtgggcgtttctgcacatgaaattgacgggaaggtctactatacggactatggcatgatgacggcaaccatgtattacaacaaagacatgtgggccgccgctgggctgaccgaggccgacattcccaagacgtgggaccagttccgcgaggtggccaaaaagctgaccgtccgggacgaaaacggcgaactggtgcaggcgggattcagctttaacggcggcgctcagggcgatgtgctgggcatgcagtatcagtacgggcagaacctgtttacggaggataacaaggtaaccttcaataacgaagccatccgcacggttgtcaatcgcatgaaggatatctatgaggtagacggcagcggcgactacaattttggcaacaactccggcgacaactttggtcagggcatggtggccatgtacctgggctgggggttcatgcacaacctgttcaagagcctgtggcccgaaaccgactttggcagttttgaaattcccacccctaccgaggaagtcccctatgcctatcaccgctataatggcgaatccacctttggcatcaacaaaaacgcgccggcggatcagcaggcggtagcccaggatatcgtgcgcttcttcctggccaacgacgcgctccaaaaggagttttgcctggccaactccgtcttcccggccaagcgttccctggctgaggatgaggacatcctcagcgtgtcgagcatcgccgtgctggccgagcatatcgaccgttacatctggcccggccccatgcccagcgcggttgaaaacaacatgaagattgccctggaaaacatcttctacaacggcgaggacgttgagaccgccttgcaaaacgccgaggacctttgcaacgaggaattggcaatgagtgaatttgtttccgtcgagccgcagtaccagtacgcggacgaagcgaaataaagcacaatctgccatgactgcacgggccggtgggtttacccctcccaccggcccttttggggaagggaggcgcccgcctgatggcgcgcagacaccaaatccatccgctgcaaagtcgcagcgaaatcgtcctgcgcaacacggtcgtcgcaggactgattgcgtttttttcaattttctatctcattcccattctcatggcctttgtgggcagctttcacctgtggaatccactgaagggacagtaccgctttaccggcctgaaaaactggcagatggtgcttaacagcagcctgttctggcagtccatgggtaatacggcgctgtttgcggcggttgcggtggtggcgcggctggtcatcggcatggcgctggccctggccctctataccaggctgattcgccatcggtcgctgtaccgcactttgtattacctgcccacgattaccccgatggtggcggtcgctttcgtatggaaattcatgtatgatccgcaatttggcctgctcaaccaggttttgggcacgaagatcaactggctctttgatgcgcgctacgcgatgagcgccattttgctgctgaccgtctggaaggatttcggctacgcggtggtgatccttttgggcgggctgtactctctgccggccgattgctacgaggcggcggagatggacggcgcctccgcgacacagcgcttcgccttccttaccctgcccctgctgaagcccaccatggttttcatcgtcatcacctcgctgatctcctattttcagacctatattcccgtgatggtgctcactcagggcggcccgggcacaaagacgtatctggcttcctatatcatttacgatcaggcatttgtcaaatacaactttggctatgcttccgccatctcctttattctctttgtgatcatcgccgcgctcacggccctgtccttccggtttagcggcggggttaaggcataggaggcgcaacgatgcagaaacgaaagttccagtccctcgcactgaatgctgcgctgcttgcttgcagcgtcgtcaccatactgccttttctatggatgcttgcgtcgtctttcaaatccaatgccgagatcagcgcgttggagcagcattttctgccccttcacccctctttcgcaaattatctgaatgcgcttgagaagatgaattttcttcggtatttcgccaacagcctgacctatgccatgctgctgacggcgcttacgctctacaccagcgcaatcagtggctttgttctgtgcaaataccgttttcgtggacgcgacgcgctcttcggcgccattctggcgaccatgatggtaccgggcgtggtgacgatcatcccgcgctacaccatgatgcagcagctgggatggctggacacctggagagccctgctcatccccagcctgtttacgccgttcggtatctttctgatgcgccagagctgtgccactgtccctgatgagctgctggaagcggcacggatggatggcgccagcgccggctacatctttcaccgcattatgttgcccatgcttggaaacaccatttccagcctggccatttttcagtttctctgggcctgggaggattatctctggccgtacctgatgattcgtacggagagcaaaaacatgctgagcgtagcgctcaacatgttcagcgggcgctactccaccgattacgccgggttgtttgccgcgacggctatcgccatcgtaccggtggttctgtgttatctgatctttcagaagcggtttgtggagggcatcgcttcggcagcggtcaagggctgatggcaggaaaaggcaagctttgcgaagaaagacaaaaatcaaaccaggaaagaacaggaggcggcagcatggcctgggataccagcaaggcacttcgccagcaggtgatgtactgcgtatatgtacggcaatacagcaaggaaggtacctttgagaaggtgcgggaggaccttacgcgcatccgggatttgggggtggatattctctggctcttgcccattcatcccatcggaaaaacatgcagaaagggtgtgcttggcagcccgtatgccatccgggactatcgcgccgtgaatgaggaatacggcaccatgcaggattttgaacgccttgccggcgaggttcaccgcctgggcatgcggctgatcatcgacgtggtctataaccatacatcgccggactcctggctggcgcagaaccacccggaatggttctatcacaaggcggacggcagctttggcaacaggatcggcgagtggtcggatattatcgacctggattacaaccaaccggaattgtgggattatcagattgaaacgctcaagatgtgggcttccatggtggatggttttcgctgcgatgtggcgccccttgtgccgctggatttctggctgcgcgcacggcgcgaggtaagtcgggtacggccggactgcctgtggctgagcgaatcggtggagccggaattcacgctcggcaatcgcgcgcggggtatggtcagcctgtcggacagcgagatctatcaggcgtttgacctgagctatgaatacgacgtctatcacgactgggtaagcctgctgtgcggagaaaagccgctggacgcctacgccgctgccctttcccggcaggagtatctctatcctgacaactatgtcaagctgcgctttctggaaaaccatgaccgcccgcgcgcagccttccttgtgccggatgccctccagcgccggaactggctggcattcctttattttcaaaagggaatgacgctgatttataacggacaggaggcgagctgcgaaagccggcccagcctgtttgacaaggatcccatcgactggcaggcgggtgaggacatttcgcctcagcttcgtgcattgcggacgctgcgcagccatccgctgatggcggaaggcagctacagcgttcaggatgccggaaatggcatcctccgagccatgtatgccaggggcgaacgccggctaatgggcattttcagcacgaagggaacaagtgcgcccgtgcgcgtgcccttccgggacgggcgttattgcgatctggtgagccgccagacagtgcaggtggaaggcggcctgctgagcgtaaagggcgagccaatcgtcattgattccgaaacggagggggcaccatgaacgaaccgaccaccgtgattcagggagagcggtaccgcttgatgctgctgacgccgcagctgattcgcctggaatatgcccccgatggcatctttgaggaccgtcccacgcagaaggtgcaaaaccgggcatttccgccagttgaacaccggctgtggcgcacggaacgcggcattgagctttcgactgcgttcatgaatgtattctatgacgaagggccattttcttacggagggctgtggattgaaaaccgctccgaatgtcgggggatctactgcacctggcattatggggacgcactcacagaaaatctgggcggcacggcgcggacgctggatgaggcggacggtcctgtgccgctggagcccggcatcctgtcccgccttcagggatacagcgtgctggatgacagcacttcctatgcgctgacagaggacggctggattgagccgccccgcccgggccatcaggatctgtattttttcagttatggctacgcataccggcaggcgctggcggacttctttcacctgtgcgggcccacgccgctgctgccgcggtatgcactgggcaactggtggagccgctttcatgcctacacggccgaagaatacctctccctcatggaccggtttgaaaagtctggcattcctttaagcgtggccgtgatcgacatgaattggcacatcagctccgacggctccgaccacaaggggtggacgggctatacctgggacaaagcgctgtttcccgaaccggcggcgtttctaaaggcgcttcaccagaagggactcagggtaacgctcaacctgcaccccgcggaggggatacagccgcacgaggtcgcctatccacaggctgcggccgcgatgggaagggatgctgcgcgcggtcagcggattccttttgaaccgggaaaccgggcgttctggcgggtatactttgacctgctccatcgcccgctggagcgggagggtgtggatttctggtggattgactggcagcaggggcacgcctgtgccattgaaggcatggacccgctgtggcttctcaatcattttcatgcacaggatgccgtgcgcgagggcagacgggcgtttatcctgtcccgatacgcgggagcgggcagtcaccgttatccggcaggcttctcgggcgacagtgtgatcagttggcgatccctgcagtttcagccctattttacggcgacagcttccaacattgggtacgggtggtggagtcacgatatcggagggcatacgcatggcaagcgtgacgatgagctgcaaaccagatggctgcagtttggtgtcttttccccgattctgcgcatgcacagcacgtccaatccgtttaacggcaaggagccgtggcgctatgggcctgaggtgtgcggcgtcatgacggcgtttctcaggctgcgtcaccgccttctcccctatctctacagcatgaactggcggtgccacagccttggcgaaccgctcattcagcccatgtattatgcatggccgcgtgaggatgccgcctaccaggtgcccaacgagtatctcttcggcaatcagttgatcgccgtccccattacctctcccatgtctccggagctcaggctcgccagcgcagatgcctggcttccggatgggctctatcacgacctgtttacaggaacaatttatcacggtggagggaggaggcgcttgtaccggccgctggaaagcattcctgtgctggccaaggcgggtggcattgtgccgctgatggcgcctgaggagaagggcgcaattcctgaggccctggagattcttgtgtttatgggtgcggatggcgcgtttgatctctatgaggacgacggagagacagaccgttatgcctcgggcgaatacctgttgacctctctgcgtctgaccggtggtgagttctccctttcggtcgtacatggcgcccgctctctgcacaggacgcggcggatcaccgtcaccttctgcggtgtggaccagcccgcttcgtgcctggtgcgctgcggaaaggagcctctctcggccgaaaccgtctatgacccgcaaaagcaccgtttccgtgtgacacttccgcccattgacaatatgcgagacgtcacggtgagtcttcccgacggcgtttgccttgccgccaacaaccgtgcccaatactgtgagacgctgctcaaccgcgcgcagattgattacgagctcaaggaacggttgtttcgcctgattctatcacatcatgaaccgctggcgattctgcgcgaatgcagctcttttcaccttccggatgggctgctggaagcgctggcggagatcttctgagaagaaatctacaaaagaaagatggaccgaaagaaagaatttccggtccatctttttggttgcctgctgtcaggcgtcactttttcatgagtccagcgccttcgtgccaggctttacccacctgctcgccggagacataatacccatgctgaaactggtcgaagatcaaagcgtttaggcgggcggggtctaccttcccgttctcagagagcaccgactcttcggcggcggtattgacgatacggccgacaatggcatagaagctgtctgtgctgctcacctccgccaattcacactccatcaccaccgggaattcatcaatgacgggcgcattgacaaacgcgctcttgctggcatgatagccggtacgctcaaatttatccggcattttgtttccggtggcaatgccgaagaaatccgccacatccatatgtgcgcgatccgcgatgctgaccgtaaatgccttggctttcaaaagattctgggtcgttttgtggtcctcatcgatgaacagcgcaatccggtcgctgttgcaaatcatcccccacgcggcgttcatggcattcaccttgccattttcgtcgtaggcagcgacaatcaataccggcatgggatatacggcctgtacaacaccaagattctttttcatcaggataccttctttccaaagctcagattgcctcactggcaggctaatggtatcattggcaggaaaataaaacaagtaccaacatgattgttagatacttacctaaaggaaagcgctatcagcagatgaatcgatgagacggttttttcaaaaacgggttacagcacgctcggtcgttgatttggggaaagcaggaaccctctgtcctgtccgagggaccatgtgcctgtgtgcttgcaggaaataaagcgatcctgcgcacctaacattaagcagcatgctccgaaaataaacggcatatacgaatagcattttagattgatattgacaaacaatctttattgatttataattcttaatgataataattattattagagaggaatccggtatgaaacgcaacacgatccagcgcactttggttttggaagctgtcaatcatctgcggtcacatgccaccgctgaagaggtatacgatgccatcgttcagcagcacccccacatcagcaagggcacggtctaccgcaatctcaatcagcttgcgaaagacggggagattcagaagctggaaatgccggatggacccgactgtttcgatcatcgccttcaacggcattatcacgccaaatgttcccggtgcggacgtgtttttgatatcgaaatggactacatggaggatctggctcatcgggtgaaagacgcttacggatttgccattgacggtcacaatctggtttttacgggcatctgccccacttgccagcagaacggcacgcagccgggtccctccaaataacgggcgcatacgggcgcatctacccgtaaatagaaatgaaataggaggatgacaacatgagaagcattacgacgctcgaccttcaatacgcacatcgcttttatggctttaagggtgaggcgcaatatctgcatggccacacgggggtgttgaccattgaagtcgaggatactgtgaatcccggcgtaaacatggtattcccctgcaacgagattcaaaaaactgcctggtctgtcctgaaaaacttcgatcatgctctcattctcagggaggatgatcccctcctgcctgcgattctgaaggtctatgaagagcagggcatccgcaatggcgcgccacagaaccagatgaaaggcccggcctttaaaaccgagctggcaaccgcctacccggagtgccgtttggtggtaaccaaggaaaccatgacggtagaaggcatgatcaaaatggtctatgatctgctcaaggacaagctgaacattgcaaagatcaccttcaccagcggcgtgaatgctgcttcggccgaatttgaaacgcataaccaaattgatcgctgcccgctttgcggcattgcgctgaatgagaacggtgtctgccccaaatgcggctataaaaagggataagccttgcgtcagcagacgccccggaaaacaggcacaataaattgtcaggcccgggaaagcccgggcctgatattttgtaccatgtcctactgcttgaaaggcatcacacaaccaggtccatgagaggaggcctcaatcatgcgacaaaaatgcgttacccttctgattgcttcagcactgctgttaagcagttgttcggccccgtatgcacggtcattggaaacagactcatccgcaaatacaagcaaggaaatcgggcagacttcaaacagagcggataaggagggcatgtatatggacacgactgagaatgttatctatctggcgggcggctgcttttggggcttggagcatctgatgcagtcaattccgggcgtgatggatgctcaaagcggatatgccaatggcaccggcgagtcggacgccaactatcaaacggtttgtaacggagataccggctttcgggaaacggtgcgcgtggagtacgacccggagcaggtcagcctggatgcactgctattggcttatttctacgtcattgatcccacggtgcaaaacccggcagggcaacgactggggcagccagtatcagactggcgtctattataccaatgaaagggccaaggaaacggtcgagcgcatcgccgccattgagcgcggccgcagccaatcctttttcgtagagattggaccgctgataaacttttatccggcggaggaataccatcagaactatctggaaaagaaccccggcggctactgtcatatttcccgggaagaaatcgagctgttttccagactgcgcattgatccgggcgattaccaaaaacctgccgcagagaccattcgtgacaaactgaccgcagagcagtaccggatcacccaggaaagcgggacagaacggccttttgataatgaattctggaaccagtttgaaaagggaatctatgtggacgtagttaccggtgaacctctattctcctctacggacaagttcgaaagcggctgcggctggccggcgttttccaagcccattgaagctccggcagttgtggagcttcctgacaacagctatggaatgcagcgcacggaggtacgcagccgtgcagggaattcccatttggggcatgtgttcagcggcgacccggaatcccccaacggtgtgcggtactgcatcaacagtgcggccctgcggttcattccctatgagaaaatggagtccgaaggctacggatatcttctcaatctctttgaggactaagccgaaagaaacggtttgtgcatcggcttgagcttattccgtgtcacggctgaaacggcacaacattcctgaccgcatctgccggccagatccggctgtcgtcgttttcgaggtccagaagccggtagcggtcgttgcccatgcccagctctttcatatagctcaactgacgcaggccatggcggctctccatgcgctctaccaggtcggcatgttgatgctcctgcatggcatatatcagatccaccgacgcctgatccacagccagcaggtccgtggaggccaggatgccgacgttgggggtgacgaccggctcggcagcacagccctcgcagtcacaggagaccgacatgttgcgcaatacgttgatataaacgatgtgcttgccgaaatggtccgccacagccttggcggattcggtcatgcgctccatgaactcctcgttgctgatatcccacatatcgtcggaaccgggcgtagtgtggatcatggccttgccgacgcggccatccgcgcagccgataccgatattcttgcaggagccgccaaagccgcccttggtgtgacctttgaagtgcgtcagcaccagcagggaatcatagccgggcaaatgtccgcccatggccatctcggtaaaccacttgccgccgtttacaggcagcattacgatgccgtcctcgtccagaatgtccaccgggcagaaggtccagccgttgacggcaatggtctcgcggtgctgtggcgtagtatagcggtcgccctcataatacgtattggtctccacaatcgccgcgctgctgaggcgttcatcgacgagcttttttacccacgggcgggggataatgttgggaccgtccttttcgcccgtgtgcagcttgatacccaccttgcccgtcaggtgtgccccgaccttgtcaaagatgcgaagcagcccctccgcggacaggttggctgtgaaatagaccactgattcctgaccttcacggttttcataagggatatacttgtccccatccgttcccgcaacggcttgctttttcatgctcaaagcctccttcgcccgtcaagtttatgaagaagggcgtcaccgcccgttccgcgcgcgcattgacagacctgctgtccaatgctatacttcatgatagcacctgaagctgactttaggtcaatatctttcaacaaaatttctgaaggaaggcgtcggatatgtatacgatcggacaggttgctgcgatgttccaattgccgatatcgacgcttcggtattacgataatgagggactgtttccctatcttaagcgaaaggcgggcattcgctggttttcagagcaggagcttgaggcgctgcgtgtgatcgaatgtctgaaaaaagcaggccttgagatcagggatatcaagcagtttatgcagtggtgtacgcagggcgcttccacatacccgcagcgttatgaactctttgtcaggcagcgcgatgccgtcgaggcggaaatcaggcacatgcagcgcacgctggatatgattcgctacaaatgctggtactacgaaaacgccatggcggacggcaacgaggaacgggtgaaagcccttacgcccgcggagatgccgcaggatatccgcgaggcttatgagggtgcacaccggctctgattcaccctaatgggaccgtccctttttaccaattggaaaaccttccatgagaagatggatttcctaaaaacaaaaaacccggagaccccgcaaagcattggcggcatatgccaacgcaccgggcgcctctcccccaccactcaaaagcgcgaaagcagaattcgttgtgaacaaaggaaaagcgcctatgcctggaaaatccggtatgggcgtacttttgttattgtgaagctattttccttcatttgaaaatcgcttttgtagaaaacgcggatctgttgcaaagcttaacggtatcggttgcagaggcgtgcacaggttgtagacgcattttcgtgttttcagtcacatcgtcgtttgttcgtaggcgcaaagggccatgccgctggtatgaacaaatcagatcaaggatagggcgccccaataatcagacttgacaatgcaagtaaagcgagtaaaataagtaatcggttacttaattaatcggagatggaagaagcgagggattggacatgatgccctttggcctgaaaatcgccattatcaaccgggcgtttcgcaagaaattagacgaaaaggcagctgctctggggctaacggcggttcaattgcgggtgcttggatcgatcagtcgtttagaggctgccggtgaaacggaaattcatcagaatgatctggaacgtcttgaacatgtaacacatccggccatgacaaagctattgcagaggctggaggccaaaggcttcgtcaattgcgtctccagcgccaaagaccgcagatacaagaaaattgtctgcacggaacgatcggccggcattcatcacatgattctggcccaggatgaagaggtctttgcagagctgtgccgtaatcttactacggaacagcggcaggaactatcgtgcttggccgacctcatcctccaaaatgtcgaatccgagtaaatctggcttcttaaggcagtatgtggagaatttcctccgcacgctgcccgctttttccccaatcaagtaactagttacttatcaaaaggagggacctccctatggaaactacaattcccgaaaagaaaagctccttcgctacagagccaatcggcaaactcattgtacgatttgccatccccagtgtgattgcgttgctggtgaactcactgtataacattgtggaccagatcttcatcggctggggcgtgggctatctgggcaatggagctaccaacatcgtctttcccattacgatcatcgcgctagcactgtccatgatgattggcaacggcggtgcagcgtatttgagcctgaaactgggcgagggcgaggcaaaggcagcccagaaaggcgtgggaaacgcaattacactgtccgtagttgtaagcattattctggccattgtatttatcatttttatcgatcccctgctgacgctgtttggcgccacagaaattctccgcccctatgcgcttgattatggttacatcatcggagacgggcttccctttatgatgatttcggccgccatcaactccatgatccgcgcggatggaagccccaaatatgcgatgttttccatggtaatcggcgcgattctcaacgtcattctcgatccggtgctgatatttgtgtttcatatgggcatgcagggagccgccattgcaaccgtcatcggccaggtggcatcttttgtggtgtctgtcgtttatttgccccgtttcaaaaccatacggctcagcgcttctgcctttcgtctgaacatacgaacctgcggaagtattgcgacattcggtttgagcagctttattacccagtttgccatcacaatcgtcatggcgctaaccaataaccttctggccacttacggtgcttcctccgtctatggagcggaaattcctcttacagcaaccggcattgtcatgaaggtcaatcaaatcatgattgctattctgctgggcattgccaccggtgcgcaacctatcatcggctttaactacggcgccaagaactttcaacgcgttaagcaggctcttgagatctctttgattgcttcagaaattgtatcggtcctcgcatttttgctctttcaatttgcgcccatgaccgtcgtgtccctgtttggctcagaagaagggctttataacgaatttgctgttatggcattccgtgttttcctgcttctttgtcccctgaccgggtttcagaccattgcggcggtctatctgcaggccgtgggcaagcccgtgaaatccgccatcctttcattggcacgtcaaattattttctttattccagcagcgctcatccttccgacctttatgggcgtggagggggtcctgtggaccgggccggttgcagatgggttggcatttgttttatcgttggtagcagcaatgcaaaagcaaaggaaggcaggcttgcgcagatgatggccaccgtagaagcgacgctgtccgccagcttgttatgatggaaacccgcggtgattcccagcactatgccaaaaaacacgccgatgcagatcgccatcacgccgatttgaatggtaacgtggaaacgtttggaaagcagatccgcaacgggcaaattctgctgaatattatacgatacaccaaaatctccgcgcagcatatttttcaagtaaatgaaatagcgcgtcagaaacggctggtccaacccatatttttcttcaatgcgcgcacgctgttccggcgtgatctcggggttgttgaacggggaaccaggcatcagttccatcaggataaacaggattaacagcacgaccagcaggatgacacatgccatcaaaatcctttttaagacgtattttttcaatgtcgatcccctcccaggaccagctctggtaagcaatcagtccgtttttgtacttttatagacgaatgccttgaggcggcacgtcatccgcgcctcctcaaggcactttgtccgcgccgcctcagcggcttacaaaagaggtttcaggtgagaagcggatcagtcctcaaaccgcgcatcgcggaaatcgaaggacacaccgatcaggtgatgataataacccgtcaggccaggacgtaccagctggcaggtcgcgccacgatagaccggaatggccaccgcgctcttctgcgccatctcctcaagatccaggctgttgttccagatggtttcctcatcgctcgacgcaagcgtctcgttatagagggcatcgtattccgcgttgctgtacttgccgtagttcagcgcatggccggtcgtatactggcccagcttagccacgatgttgggcacggaggagccggtacggtggatggccagctggaaattaccattggtcatgtcatccagacgctggttcatcggaacgacgcgcaggttgatgatcaggccggggcaggtggtctcaatctcggactggataaaggccgcaacgttctgatgcgattcagcatcgtcgcaggtcagctcgagttcgagggtctccacacccagttcctccttggcagcctcccagtattcgagcgccttggccttgtcgcaggcccagaagtcaggacgggcggagttaaactcggtgccgtcaggaccaaagaagcaatcggtgtagttgcaatcgtacttggccacggagccatcggcaaggatgttctgggtcagagaatcacgatcgatggagaaaccgatcgcatagagcaggttctggttctgcagggtcgggtcctcaaagttgggcacgatatagcagctggtcgtggagggagcggaaaggaaagcttcgcttccttcgtaaagcgcaacctggtcagagctgatggtaacgaagtccacggtgccgctttcaaaggccatgatcgcggtctgattgtccttgattacctgatattccacagcatcaaagtagattttatcggcatcgggatgatccggattcttcgtcagcgtccaggtgaggtcgccggcggtccagttttcgagcttgaaggggccattggtgagcagattgtcgctggagagcgcatactgatcgccgcagctttccacaaactcctgattcaggggcgcaaagaagcaagcgcaaaggtattcaaccagccagttgcaaggcgtggtcagttcgacaaccagcgtcttgtcatccttcgccgtcacacccagcgtggaaatatcagccgtaccggcgttgatttcagccaggttcttcatcggaatgtaattgaaaaggaaagcgttttcaaagccgtttgccgggtcacaggtacgcttccaggcgtattcaaagtcggccgccgtcacgggagtgccgttgctccaggtggagtcgcgcagcgtaaaggtgtaggtcaggccatcctcggatacggtatagctttcgcatacgttaggctgcggcacgttgttctcatccagacggaacagacaatccatcatcaggttcatcatgtcaatcgtcgcggacaggcccgtgtttccggtgtccagcgtatccatctccgcgttctgggacatgtgcagaaccttcggttcttcagcgtaggagccagtgaccattccggcaagcagcagcgaggcaactaccaaaaaaccattgctcgggtcaaacttttcatgtaacctcgtaacctcattttgcaggcaccagcatttgaaaatgcattttgagaaaaagcgcttctcaaattgatttgttcgaacacagataacaatacgtacatttatgcatatgtcaaataaaagtttttacatcatatccataaccaaatagttaacttgttttatggtatactcgcaaacaaatgtatacttgccttgcaggcaaatggcaatgcacgtttatgtataagaagaaaagtatggaaattcagttgggagatgcatatatgcggtatttttcgtgcaaaaacttataattataattttcgaagttcggtagacttccttaaattggcgttttaacaaatacagaatgattgattcgcaggttcatagttgcaatttacaccatttgagttttttcatcgacgtcgatatgtgtctgtttccggattggccaccatgcccggacgatcccgaagcgacgctttccaaacggagagaagcagataaaaaggcagccaatctggacgtttctgcatctgaccagaatgactgctaaaatatagtggaactggtgaaattagaaaggcgaacaatccggtcctgctcatcctggtcgttcgatatgcaggctgacgaccggaaggacgcagacgcacgaggtcaaaggaaggaaaaaggcaattcactcaaatacgggccggtcatccgcgtcatagcggatgggccggatatacgtattgcgattggggtcgctcaggggagaaccatgaaaaccgggataggggcgcgcatggaaaaccatcagatcgtgtccctcagcgtcccttgtaaagctgttatgtccgggaccgtaaatctgacgcgcttcatcagttgtcataacgggctttggactctttttccagcttgtggggtccagcaggttcgcattttcatcagcttccagcatgcccatggcatagcgttcatctgtggcgctgccggaatacgtcaggtaaagtctgccgtggtgacgcagaatggaaggcccttcattgaccaggaagccctggcattcccaatcatactccggtttggaaagcatcacagccggaagctccagctctgtagccgaacgcatgcgcgcaatatagaggttactgttgcccgcaatggcataatcgcgttgcgcccagacgaaatagcgttggtgtccggaagtaaaggtggtcgcgtccagcgaaaagctttccataccggtattgatctgtccacgctcctcaaaatgaccttccagtggattgtccgactggttggacagcgcgaagatccgatgatcgaacactccatgttcatccggttcggcctcagccgcggcaaagtagatcatccattcgtttccgatgcgatgaatctcgggtgcccaaatatagcggctcatgggtccgctttcatgcctgcgccagatcacttccggctgcacagcggcaagtccctcaatgctccttgcccgccgaagctcaatccgatcaaatgtggggaccgtggccgtgaaatagtaataactatcctccgccagcaagatgtaaggatcggcgcgttgaagcagaacaggtgtgtcatagcgattcattacagtttacctcccttgcagccatacggccatctctccgttttcccgctcgccccataggcagtaaggaatgagtgtcatggacacttgcctgcgcctgttcacaagaggaaagtacagtcgtttttcccccgctgcttcccgactcgagcgtgtagcggccgcgctgaaagccggataggagccaaagccggatacgtcgtttctctccatggtttccaacggcgttcctgtatcaaccatcaggtcgctcagcaacgggccattgtccgcctcttccgtgcagtataccacagggcctaccgccatagcaacctttcccgcatcctcacgcacacgcgggttggcctgtatccattcggggctgatttccagcacaaggcagatttctgtctccgtgccccagctgcgctccagaatccggtatccatccacgagcggtgcttcttccacaggttcgccatccacggtcagatgatacctttcgcaccactgtggaatgcgaagggctatcgccgcatccagcggatgctggctgcctatggaaaaaacaattctcccgccgaagggatagtccgtcatctgagaaatccgcagccgcccatcattcagttcaatctcggcttcgctttgcgcatataagtgaatattgacgcgtctgtcttcgaccgtatagagatactgcggcagacttgccaacatccgcgccagattgggcggacagcatgcgcactcgtaccaggactgccggcgcgacttgacgtgcgtcttcagagggctcttgagacaggcttcctcgttgacctcaaggggattgacataaaaataatggcagccatcctgggagatcgcagcaggaagaatgttatagacgcatcgttccaccgtgtcggcataggcacggtcgttttttagtccgagcatccggcgggcaaaaaagcacagtccaatggaagcgcaggtttctgcatacatcgtatcgttgggcaggtcatagggataggtataggcttccagcacagcggttgtgcctatgccgccggtgatatacatctggctgtccgtcacgtcatgaaacagccggtcacaatgctccgccataaccgtgtcgccggtttcacgagccacgtcagccatgccgcaatagaggtacatggcccgcacagcatgtcccgtcacatgctcatagctggatagctccctctgagggtcgccccagccccagcatccataatccagtggattcccctctctgcggccatcccggtaaaacagttcaggatgatcgcgccgcatggcgaccagatattcggccaggcggctgtaccgtgcttcaccggttgccgcgctcagacgcatcagggccatttcgatgatttcgtggccacggtagctgtggagctgtccctcgttaggcccaaaaacgcggtccacatgatctgccaggcggcatgccacgtccagaaggctccgctttcgggttccctcgtaatagctcacacccgcctctatcatatgtccaaagcaatacagctcatgggattcaggatctgtccatttcttttcggggcacaccagctgatagtaggtgtccaggtatccatcggggtcctgcgcccttacgatggtttcaataatggcgtcggcggtttgttccagcaggcgatccggtccgttttgcagtacacagcccacagcatccaaccactttgccaggtccgtatcctggtagggcacacctgaaaagctcccattgatctctccggcggcaatttggaagttccggaccgtcggatttttatctctcattccactaagaacctgccactgataagggagcgcctgatgggcgataatgtccatatagtgttttaaaaatccccccgtgatatgggcccggtacccggtcatagaaattcctccttgctttcctcatcattttgaaaggggatgcggatggttacggtggtcccctcctcccagtcgctttcgatctccagcccatgtccgtaagacagcagcagacgctgatgaacgtttcgaacccccacgccgcctgcaaagggatcacggttctcttccatatctgtgcgattgatgagctcaagtagcgcatgcaactgctcttcagtcatgcccattccgtcatcagcgacgacaaggatgagctcgtcgccctcccgcctggcgctgacgcagatctgaccgcctccgggtttgttgcgcaagccgtgattgaggctgttttctaccaggggctgcaataaaaatttcatcacacggcaatgcctcagctcgtcgggaatcgtggtatgccaggtaaaatccagcggaaagcgaatgcgttggatttgcaaataacaggtgatatagcggatttcatgttccagcgtgacaaaatcctgaccatgcgccagactcagacggaacagtgtggacagggacgtcaccatatcttcgatttctccattgccgctgcgcctggccatcatatagatgctatccagcgtgttatagagaaaatggggattgatctgatactggagcgtcttgagttccagctctttttgccgccgttggttcctttcgttctcccggatgtattctttggtgtcggcaagcatacggttatacgttcgggcaagaagggcgatttcgtccttacgtctgacatgtacgttggcattcaggtctcccccaccggcacgcaccatcgcatgccgcagttcccgaagcggtccggtaaggcggcccgaaataaataccgtcagcgcaatacctgctatcagcgtacttgccaggcaataagcaagcatgttgagaatggccttggcaggcgcatatacctcatcccggctgagccaggcagacagggtccatccgtctcgcatacttgtacagacgaagaattgctgctggttttccggcaactcgtttcccagtatcagggcgccgtcctccaggcgataacttacattggaatccaaaaatcggtcgcatacgtctgtaaagctacgcatatcgatcatcagatacagcgcgccaatcgtgtgcgtcagatcatgcgtggtatcgtgaatggcgcgatacatcacaagggtgtctccggaagcaggggtgaaccagattgcgtgcccatccgaagcaagggcgtcttcaagcgtgtcataaatgagggactggacttgagcggttacaaagttgccgtacagctctccgttaccgtctgccatgtagaccccttgaatgctgcggtcatattccgtgtagcgcatcatcaacagccgaagctgattggacaggccggaaatatcctccagatgtcccagaagaaaggactgtattgtcgaatccgccatgatgttgacggaataatcctgaagcttttttcgctggttgtccaattcccagctaagcagatcaacgtttttttgtaactgacgcacccgcgtgtcgtagagatagggtcttaaggtaaaaagggtaaaacccgccaccacagccaacagcagcacaatgaccgtaacgaaccaaaggatgatctgattctttagcagtttgagagaaagcgccttgcgccaccaccgccgtgttttgttcatccgtcgtccccgccttccaaacggtattgcttgggcgtcataccggcatgctttttaaacagggcgctaaaatagttcggattgttatatcccaccttcagagcgatctcatagcttttgacgctggagcggcgcaacagctcctttgcggccgctatccggataccggtgagataatccatgcacgtaaccccgcacaccgagcgaaacaggcgggacaggtactgctgggatacatacagctgacgcgcgataccggcaatgttgagcgagggatcggaataattttctcgcatgatacgcttggcttcttccgtgattcgggtcatggccttttgctgcgagccggattttcctcttgcggtttcctccacaagtcggcgaagccggtcataagcttcctgcctgctttccgcacgaagttcgggatgaaagggaggaagatccgtaacgccgctaccctccgccaagcgatacagcgccacctgaaacctcagtagcatcaagctccgctcggcggcagggcacgcatacaccgcgccgacaaacgcggcaagtgcctgcacgtccggctgatcgcggtagcgtaggctctcaagcactttttcctcctgtgcagcaggatagacggcttcctcgcctttgatgcttttgaggtcctgatagtaggaaacagtgctgtcgccaataccgatcaccgcttttaacgcatccatcgcctcgcgtgcagaaaggtgcagctggcccagcccgtcgtatgtccgcccgactccaatccacacccgcagcgacagagaggcatccaagatggcagggaatccctccagctcctgctgcaccgcggtggctgtcagaatagccagcaggtagtcgccttgatccagcagactgaccagccggataccccacagtgcttccagcgcctgtcgcagtttcaggcgctggttcagcgtcaggctgttttcatccgcgcccagtgccacgcagagcagctgtcccctgggaagctgaatgtcgtaaagggcagcctgatgcaatgcctcgcgttcctccggcgcattttcgttcaccagcatctgccagtactggcggcataccacaggatagtattccctcagtttttcctgggtttcagccagggattgctccatgcgctgctgcgccagaatctcaccgcgcatctctctgagcagatcaagcagctcgactggctgaatcggtttcgtcaaaaagcgttttacgcccaaagctaccgctttctgtgcatattcaaacagtccatgtccagtgagaattacaaagcgtgtatcaatctccatgtttcgggccatttcaatcatttcaaggcccgatagggattgcataaacaagtcggtaatcaccagatcgcttccacggtcggtaagcacatccaacgcatccaccgcattttcgcatccgattacctctgaaaatccctccgccgcccaatccaccatggacaggagtccttcacggattaacgcctcgtcttcaacgatcagtatacgcaagagatgctcctccgtttcaataccgctcagcccttgaccgctcccgccgtcattccgctgatgatctgattggttagcagcgcatagacggcaattgtgggcaggatcgccataaccattgccgcaaaggcataggcgtaattggcctcaaacgtagtcaagaaggaacgaatggctacctgcagcgtgcgggatacatcgctctgattcagaatattagcgaagagcagctcgttccaacactgtattacaacgaatacgcaagccgttacgatccccggaacgctcaccggcaaaatgatgagcagcagcgtctgaaacgtggttgcgccgtcaatgcacgcgctttccctgagctcatgcgggagcgtgttcatatagccccgtatcaccatcacggtaatggggagattgatccccgcgtagaccagcgcaatgccccagaggttgtcatacagaccgatttgattcatcatgatgtaataggggaccagaaacgcattggtgggaataaacagccccagcgtaaggaaaaaagaaacggcacccttgccgcgaaagcagtgcatgaggccataggacgccatcgtggcgatggctacgtccaggactgttgcaaccgcagtcacaaatactgtgttgaacagatacagaaacatcggatggctgctcagaacagccgtatagttgctaaaactgagggttctggggatggcgaagggttcgctaaacaattccatgttgggccggaaggaagaaacgatgagccagaggaatggaacaatcatgattatcagtaccagccacaaaaaagcgttcatcgcaacgcagccggccgtcaatttccgcttcattgcacaagtcactcctctctctgcagtcgggtgacaaccagcatgagcaagacgcccagcagaatggtcaccaggccagcggccatggaaaccccgtaacggttggcgctcatcatctcccgatagatgtagagcgccagattggttgtcgaattgctcggaccgcccgaggtcatcagaaagggatattcaaacgtgcgcagacaaaacgcgccgttgagcatgacattggtcaaaagtgcaggcttcagcagcggcaacgacacataccagtccttgcggaggccatctgcgccgtctatttccgccgcctcatagagctcggtgggaatggtagaaagctgcgtgagaaagataatgctggtgagccccacatacagcataaagggaatctgattgcagatcagggcggtttgcgtatttcccagccatgatctggccaggcttcccaatccaactgcgcgcaggattgcattaagcagacccatatccgcatggtaaataaagtaccacataaaggcaaccgccgtggtggaaatcacgtttgggataaaatacatcacgcgcaggaatttccagccgtgcgggcgacggttgagcatcagcgagagcagcaacccaaagggaatgtgaacaatcagggccgacgccagccagaggagtgtcactcgaaacgccttatgaaaattggcgtttcgaaaaatatactcatagttacccaagcctgtaaattccatcggaccaaggccattccacttgaaaagagataccacgatcaaataccccaagggaacgacaaaaaagacaaaggtcagcgccagggccggaatcgtgtagatcaatgcgtgctcctgccgtctgaaggattgcatgcaggttcctccttttgaaaaaaggcgccgcagatcggccgggcagtgcccgttgatggattgcggcgcccatatggatgcggtcaggaaatcaatagtcgttttcggcggccagctgagaaacaaactcttccgccgtgatctctcccagcaccagcgactccaccagagagggaagtgcggcgttggcagcggtggaaaggttgcgctgcacattgacaatgctttcttccccatcggaatagacgttgaagtattcccgctgtacgctgttcatgctggccatatcctcatcggtaagggtcagcttggcagactggtactcgctgccctccagcgtgtaaatcttggtggactcttcattggtgaggtatttcagcagggtcacaaccgcttccgccttggcgggatcttcctgtgcagctgcagcccagggagcctgcgcatccgtcaccagataattctgcgcaaccttgccatcgccaaacgacggtgccacgcccactttgatcttgtccaccatgtcttccgggatggagccaatcagccaggggccgtcaatcaccatggccgtcttgccggtaaggaagttactggaggaaacggaataattcgcgcctacagcgtcattggtcgtgtaggcaaacgccttctgcagatattcggcagcctgaaccatctcttcgcattcaatggtgccgctattggccagttccgcaccggcgaggctggcaaacacataggtcaacagtcccgtggcataccatgcatcatctgcagtgtagagcgaaatggcagcaacaccgttttccttgagcgcttcggcgcagtcgaaaaactcgtcccacgtggtgggaaaatggtcatacccggccgcttcaagaagctcctcgttgtaatagaacacggccgcctgctgcgctctgggcaaagagtagagcttgccatccagggtcagaaggtccaaatcgctctggttgaacctggccttccactcgtcatccatgtagggcatcaggtccatcagccttccgctcttctgacgggaaagatcgttgggattataggtgtagcaaaagatatccggcgtctcattggcggcgatcatcgcctttaccttttcctgatacgtgggaaaatccggattgacgtcagccacagccttatagatcccttcatattcctgattgaacatctccagaatcttctcagtggcctgaccgcgcgcggtgtcgctgctcatgtgatgataaatgttgatttcgatcggttcctgcgcatagctcaccggagccatgcccacaagcaggcaaagcgccagaatgatacccaaagttcttttcatgttgctgagatcctccgtttcatcaattttgaaaggcaaccctttctctctatgggcttagtatagcagagcacaacaagaattacattccacagatttatcctgaaaactatacttttcgccacaaacggagaggtttcacggagccttgaacacacatttgggtgcatctagcagagtattgtgcgtgctgacggtagggaaaatcacaaaactaactttatttatagacatttataaatatgaaaacacaaaacagtcgcgttcgtcagctcattcgggcggcacagactgatgcagcgcttccgtctccagaaaaccagtagcatgctaaagacaaaccccgccgaagggttttcaaaaaccttttcagcggggttgcattttcccgtccatccatcagcccaggccgcttgtccagatcgtctttacgcccaagaatcccatggatttccgaagcgattcgtcaatcagcaccgcctcatacccatgatcgcgcagcagatcgtgaagggcagcgcccagcgggggtttgcttgcgatataaaggacatgtccaggtgaaaagagggaggaatgctccaacgcctcaaggtccatgcgcatgacggctcccagcagaaaattacgtgcctcggatgcggtgaagttgcccagcgtacgcatgatgcgaacaagaaaagccgcgcgtcccagcccggcatcgcacgcagcagcaccggccagcatgagcgaggaatcataatcctgaggggaaacaaaagcactttccagagattcggagaggactgtatgatgggtcaacacgtcgaggagctcaccggaaatagaggtcatgcacccccgcaagctgccgtcgcggcccactgagataaacttgttgtggctgcccggcaacaccagcatcagatcgtggttgggacgcagggcggtccacagcccgatggcctccgtttcctctccacgcatcatatccacattgcaaaggcgatccagcgtcaccggctcggtggtgtttttcagccccggaataaacgtaacaggaaacggaaggaggtcgggaaattcgcatgtgaccaacccggcatgaaactgtgccgggccggccggcgccgccagatgaggaatctccataaggccgacatcgctggtaatcatgccatatgccgcgcagaggcgcacgtcttgcgccgtgatgccagccgaatccattacctgccgaacgcacgtcctgataccgttgcacaagcggccgttatttccgtcgatagccgtgtggctgacgccagcttcatcgctggcctgagcgagcggctgccaggcctcatctaacagcgatacacgcagattcgtcgtcccggcatcgataatgatgaaatagctcatgccttctcgcgcgcctcccacgtcgtgatggcagcaacgaattcacgtgcgcgggcagtaattccggccatatcgcccgcgcgaagaagatctttacgcaccagctcgccgccgactccaaaaccaacgacgccagcatccaggaaggaagcgatcgtttcagggcgcacgccgcccaccgccgtcatggggatatggccaagagggccccggacggcgcggatgtaaccaacgcccagttctcccgcaggaaaaagcttaaccaggtcggctcccgcttcgtaggcagtaacaatttccgtaggggtcaaagcgccgggcatggaaaccgcgcccagttcccgcgtgcggcgaataacttctacattcgtattgggagagatgaccagctgtcccccggcagcgatgcttttctctacctcttccaccgtcagcgctgtaccgcatcccaccagcagatcctccgggaaacggctccgtaccgcatgaatacgctcgcagttgtgtgccacacaatcgggatcgtcatggtcgaaggtaaactccagtgcccgaacgcccccttcataaagtgccgaggcaatatccagcgcctgtccgctgcctatgcctctcaaaatcgccaccagccttgtccgcttgatttgttcgagcgccgcctcgtgttgcaacataccccgttctcccttcacttatcgcataaattgggccttgtgaaaaatggcgccaaatgatataatatataatattcattgaagatgcttttgtcaaggaaggggtcaaagaaaatggagggcgcttgtatcatccagaaaagtacgctgacgcagatggtcacggaccagcttcgtcaggatatcctgctggggattatcgcctccggtagccggattaccgtacagtccattgccaaacgctataataccagcgcactgcctgtgcgtgaggccatgcagattctcagcagtgaaaaccttttggaattaagcccctataaaggcgcttccgtatgtgaaatcaaccacacgtttatcagcaatacctatgatattctgcgcagcatggaggtgctgatcgtcgaatcctgccttccgcactggtctaatgagatccgcgcccagatcgtcgcagccaatgacgagattcatcgactggatagctatgaggccgtgatcgaacgtttcaacaggctcaaccgtgaatttcatgatccgcttgagcaattttgcatcaatacccgcgctatggaactgcgcaacagctgtcatcgaatcattacgattcttgtggacaagaaccggccgcaccggctggaacgcatccgccatgtggccttagagcatgatgccatcgtagcggcactcgactcgggagatattgaccgactgcgcaaggtatatacggagcactccgtagcggccaaggaagaaatgatgtaccagatttacggagaatagatctgcgattcatctctgcggttagcagccgcagagctttttgttgcaaaaaattaatataaaatatttgatataatatattgacacgcatgtacacaaatgctataatccggccgtggcagacaaatgagatcctgaatcgttgtcatccgggcagtattgcctgaaaataattaaggagggttaaccatgaagaagtttctgtctctggcgctggttgccgtgctatgtctgtgcagccttgccatccctgccgtcgcggagaatgacgtggtagaggtgctctacctgtcctccaccattctggagacgccggaaggcgcgtttgagcagcagctcatcgacaagttcaacgctgaaaatcctggtattcatgtgaccgttgagggctgtgccgccaacgatcttaacgccaagctgaccgccatggccgccgccaatgacctgccggcctttgtgatgggcaatgaaaccaccatgtccgccctggtagacatggatatggttgtccccatggaggatctgatggatcaggagtacatcgatggctttgtgcctgccaacctcgacagctatgtcatcgatggtaagcactatggcatcccctatttcggcggtgctcagggtattatctaccgcaaggacatcttcgaagagaagggtctgagcgagccgacgacctgggatgagttcgttgaggtttgccaggcgctgaccggcgacggttcctacggcatcgcgttggtaggcaccaagaactcctccggcgccagccgcttccagcctgtcatccataactttggctgtgatgagttctacaaggatgagaatggtcagtgggtaaccgacatcggcagcgaaaagttcaccgccgcgctgaaggcctttaccgatctgaacaacgtctatggcgtggtgcctccgggcgtggtggaaaccggctatcccgaagctgtcgcgctcttcaccagcggacaggccgcgatgctcatcaccggttccaacgcactgggcgccatcacctcccaggtgcctgaactcaagggcaagctggcctctatgcccaacattcccgttgagcgttccgtcagtgccgctgctggttttgccttcttcgtcaccgcgcaggatgaagctgtgcagcaggcggccgtcgagttcatcaagtactttatcaatacggaaaattccctggacttcgccgagctgaccggccgtctgccggttcgcaaggaagcgatggaaagcgagcgtatttccaacatgaccgagctgtccggcttcctcaaggcgcttgagaatgtctggatcccgccgacaatccccggctacagcgagatcaacgata

SEQ ID NO: 3774 - DNA, 2622 bp, Unknown
  16S sequences of unknown bacteria
cacgtttctttttctctcgcgagagaaaaagaaatgtggggcgcaaacgttcccccctcttccaagaggagaaaaaaccccgccccgttgtggggcgcaaccgtttctcccctctttccaagaggagcaaaaacaccccgctgcggggcactaaaaaacgccctccgcgttttcaaccgcgaggggcgtcctgctgtgccggcagcgcaatttcgccgtggcattgttcaaattcccggatggcctgacggatcagatacagcacttcgccgttgccggagcggccctcatatttggccatataatgcagcttatagtgcgtttccggatcgatcagcagtcctaaatgcttatttttgctcatatcagaactccaacatacttttaataagtagattttatacttattcggttgatattagttgaaattaagtatgaaccaagtataatataagtattcaatattttgctgttttgggctgtcaaacaccgggaaggggagcgtgccgtcatgcgtctgtttgtgccggatgagccggataccgtggaaaacaatatccaataccgtgctttggggcgcagcttttaccgctgcctgagggaatttgacctggccgatctgcacagccaggtacatgacgaggctgtggatttgcttgaggacattttgatggtgctcgatgatccggatctggatgatgcgcactgccttgatgaaattgtgctgctttatcagcgccggctcggtgtggcttctgcgcgccatgaaaagcgcgttttgaaacgcctgcagggcagggacccggacagccctggaccggcgccggggacggaatagaggattttgtggaaaaccggaaaaagcgggccgcctgtcaggcggcccgctttgctgttttgtgtttcgttattcttcatccagtttgaggacggccatgaatgcttccgtgggaagctgtacgctgcccagagagcgcattttctttttgtttatcccacaaaagctgcgcttttgcgggaaccctgatttcaaaagctccggggcaagtgaattgcccctgcgccaaaggttttgcctgcggcaaaacgcttgcacggcgcacttgcgccgatgggcaaacaaaaatgcgcgtttattcttcatccagtttgaggacggccataaatgcttcggtgggaagctgtacgctgcccagagaacgcattttctttttgccctctttctgcttttccagcagcttctttttgcgggtgatgtcgccgccgtagcatttggccagcacgtctttgcgcatggctttcacggtttcgcgggcaatcaccttgccgccgatggcggcctgcacggggatctcgaagagctggcggggaatattctccttgagcttttcgcagatgcgccgggcgcggggataggccttttcccggtgggcgatgaaactcaaagcgtccacctggtcgccgttgagcagcaggtctactttcaccaggtcgctgggctgatagcccgacagctcgtagtccagcgaggcgtagccccgggttttggctttcagggcgtcgaaaaagtcgtagatgatctcgcccagcggcatgtcatagtgcagttccaccagattggtgtccagatactgggtgtctttgtagacgccccggcgctcctggcacatgggcataatgttgccgatgtattccggcggtgtgatgatagacactttggcatagggttcgtaggcttccgcaatctccgccgggtcgggatagttgtgggggttgtccacagatacagtggtcccgtcggttttcaccacctcgtagatcaccgagggcagggtggtcaccagatccaggtcaaattcccgctccagccgctcctggatgatctccatatggagcatgccgaggaagccgcagcggaagccgaagcccagcgccgcggagctttccggctcgaaggacagcgaagcgtcgttgagctgcagtttttcaagggcgtcgcgcaggttggggtatttgctgccgtcctcggtgtaaatgccgcagtacaccataggctgggcggccttgtagccgggcagcggctcggcggcggggcgctcggcctcggtaatggtgtcgcccacccgggtgtcggccacgtttttgatgctggcggtgaaataccccacctcgccggccatcagggcgtcggtcttttccatgcccaggggtttgaggtagccgcactccagcacttcatattccgcgccggaggccatcaggcgcacgttttggccggtgcggagggtgccctccatcacacggaaataaacgatgacgcccacataggggtcatactggctgtcgaagatcagcgcccgcagcggcgcggccgggtcgcctttcggagcgggcacgttggctacaatgtcctccagcaccgcttcaatgttgacgccctgcttggcggagatctccggcgcatcctcggccaccaggccgatgatgtcctccacctcctgtttggcccgcttggggtcggcggcgggcaggtcgattttgttgaatacgggcaggatttccaaatcggcttccagtgccagataggtgttggccagggtctgggcctccacgccctgggag

SEQ ID NO: 3775 - DNA, 1699 bp, Unknown
  16S sequences of unknown bacteria
cttccgagaatccgcccgaattcatccctgaacccggcgtccgtcccttttgtcggctcgtcgagaagcagaatgtccgccccggtgagcaggagcatcgcgataccagcccgctgtgtctcgccgccggacagatcatacggatgccggtcgagaagtccgccgagaccgcatatgcgaatagcttccgcgagcttgtcctcatcaccggaaatgcgtgcgagctcatccctcagtgtgtttttcgtgaagagcgctctcggctcctgcgggagcatcgcggtcttcgcctttttcgtgacaaaaccgcattgaggctgtataatccccgcgagcagacgcagtgtcgtggtctttccgcttccgttcccgccgacgagagcggttatctctccgcgccgcacctcgagcgtcaggtctcgcacgacctgcctgtcaccgtaagcgaagctgatgttttcagctgagagaacgacgtcgccgcgcaccctttcgtttttttcaggcagcgcgaagagcttgttttccgacgcgagcctgccgacaagctctctcgccgcacgcacgcttccctctccgatacgcatatacgccgggagggcggctctcagggcgcgcgttccgctgccgatgtcaccgtccgcaatcttccgcgcgacatctgccggagttccttccgcgagtatttttccgtcgtcgatcacgaccgccattgtcgccgccgacagggcttcgtcgagacggtgttcggtcattatcactgtcgtcccgagctcgcggttcaccctgacaagcgccgagaacagctcgtccgccgcgaccgggtcaagcctgctcgtcggctcgtcgaggatgagtatttccggtctcatcaccatcaccgcggcgaggctcaggagctgcttctgcccgcccgacagcgcggacgtgtccgaatgaaaccaccctccgatgccgaagaatgaagcggtctccgcgacccgtctgcgtatctcatcggtcggaataccgagactttccggtccgaaagcgagctcgtgccagaccttgtcggtaacgatctgattctcggggtcctgtagcaggaaaccgatcttcgccgtctcgtcatgatgcggcatttcagttatcggttcaccgtcaaaaattatctccccgctcatattaccggcgggtgtgagagaaggcttcaggcagcgtaaaagtgtcgactttccgcttcccgaccgcccgaagagggcgaggaaatcgccccgccgcacctcgagcgtgacgccgtcaagcgcagggttctcctgcccgctgtaggtgaagcggaggtctttcactgacagaattgttttgttttcagtcatttttctcctccgctgtcggtttctttgcaccaagcacggtcggcataaatccgagcgccgcgaacatcacaagaaagaacaccgtgagcggtcccctctccgaaacctttatcgtcggataaaacctgaacccgaacccgcccgcgagcgcgccggatacgaccgaaaacccgcagaagacaataaacgccgccgcgctcctgtcgcgctccgtgaacctcttcggatagaacgacccccgccccgggagtccccatcctcgagcgcgcatactgtccgccgtgtcagccgaattctcgagagcgcgcccgagaaccgccgacatatttccgacggcgtcgcgt

SEQ ID NO: 3776 - DNA, 25039 bp, Unknown
  16S sequences of unknown bacteria
gcgaagcagaagcaccgaccgaggcggtagccgtatggctgacgaaggggttgtcagaagctagaatttaatataaaactaaaattttcaaataagctttagccactaacaatccctcagtttccttcggagccacccgctgacggcggcggtcacctctgtcacttcgtgacatctcctcacactgtgaggagtcaccataaacaccgggagccgatggtcttagcgaatcgccgaatcaatatccatgcaaaatcagccgttcggcacagccgatatccgttttaccgtgcgacagcacagtcagcaggatatttcgtcaatccttttaagctcctcggcagaaaaggcggtgttgtttatcgccttgatattatcgagtatctgtgagggctttgaagcgcctatcagcacggatgtcacaacgccgtccttcagcacccacgcaagcgccatttcggcgagggtctgaccgcgttcgtttgcaatttcgtttaagctccgtatctgctccaagcgctcgggcgtcacggcggattgctttaaaaatctgccgtcggtcataatgcggctgtccgccggaataccgtttaaatacctgtttgtaagcataccctgcgctaatgggctgaaagcaattatgcccttttcaagccgcacggcggtgcttttaagtccgttttgctctattgtacggtcgaatacggaatatcgattttgattgattataaacgggcatttaagctcggttaaaattttctccgccttttcaagctgctcgccgctgtagtttgaaaggcccgcatacagcgccttgcccgagcttaccgcatgagccaacgctcccatggtttcttcaagcggagtatcgggatcggggcggtgatggtagaaaatatccacatagtcaagtcccagccttttaaggctttggtcgagacttgcaagcaggtatttgcggctgccccagttcccgtaaggtccctcccacatatcgtagcccgctttggtgcttataatcagctcatctcggtaggacgataattcctctttgaggattttgccgaaatttctttcggcgctgccgggcgcgggaccgtagttgtttgcaagatcaaagtgggtaataccgttatcaaacgccgtgaagacaagcgccttcatattttcataatcggcggtatcgccgaaattatgccagagccctaaagacactgcgggaagctttaatccgctttttccgcagcggttataggtcatggtcaaatatcttttcgaattcggttcatacattaaaatcatcctttcttaaagctgaaaagtattttttgaatattggggtcgtacatattttccttacttacggttgtaacggcagtatatatcgcctctcctcccggctgttcgccgttcttaagctccgctgccgtctttacgctcaaatatcccattgcaaacggattttgcactataagcgcacccatttcgccggtttcgagcattccgacagagaccgtattggtatcaaacccgacggtttttatcttccccgcggcatttgctttctttattgccgctcccacgcccaaggtagtccattcgttaagtcctataagtgcatttatttcaggatgcttttgcagcagctccgctgccttgctttcggcgctttctatattgctgtcagccgcggctgcggctactacttccgcattatcgagtcccgcgaagtattcacgcagcccctcttccctttctaaaatattttccgttttttcgctgcacccgactattccgagctttattttctctcccacggaaaactgtgcttcaagcgcctttgcggcagatatgcccgattccggattgtccgtaccgataaaaaggcttataagcggtgagtccagcgcagagtcagccgctattaccctgactccgcttcttacagcggcatttacagtcggcgcgcagcgcgttctgtcaattgcggaaagcactataacatccgctccgttctctgccgcacgggatatcattttgttttgctcagcgtaatcttcctcgttttcggggccttcaaaggttacgctaacattgtactcagtagcagcagattcaacgccgcttttaaagttctgccaaaaatcggaatccaccgatttcacgatgacggcaatcttggtttcatctgtctccccgcaggcgcaaagagacagcagcagcgcagacgaaagcagagcggcgataatttttttaaatctcattttgcctttcctccgcatttcccggtattctgacggtaacctctgttccgacatcaagctcgctctttattgaaataccgtatttatccccgaaataaattttaagtctgtcgttaacatttttaacgcctattccaaccgaatccgaacgttcctttgcaagtatcgcggcgcactgctcgtccgtcatgccgacgccgttatccgaaacggttattaaaatatcctcgggatcgtcctcggcgcgtttcacggttattttgatctcaccgtcgtccatatcggcaatgccgtgatatagcgagttctctataagcggctgaatcgtaattttgttgcaaaggcagtcttcaagcgatttatccgcgcagaagctgtaggtgaatctgccgctgtaacggaagctttgaattataagatagctttcggcatggcgaagctcgtcctttatgggaataagctccttacccctgcttatgcttattctgaaaagccgcgccaaggcacgcaccatttcggccgctccctcggttttgccctgttcgcacatccactgtatggaatcgagcgtattataaagaaaatgcggatttatctgcgcctgcaaggcgcgcagctctgtgcggcgcagggcggtttcgtccctttttatctgctccataagctcctttatctttcgtgacatatgcccgaaggaatccgaaagctccgctatttcgctcacggcgatgctgccgccggtgtagctgaaatttgccgcatccttttcaaaatcgtgcattgcgcacataaggcggcgcacgggcttgttaacactttttaaataaataagaagagccattccggctattgtcacacagcaaagtgcggaaagcacaatacttaccgctatttgtccgcggcgctcgtacatcagagaatcggtaaagctgataccggcaacgcgccacctgccgtcggacgtggagctcagcatataaagggtggttccctttttatgaacgccgtcagacagggaggcaataagcgaggagtcctccgctttgattcccgaaaaaaggagctgctgctgcggatggtaaacaatatcgccgcggctgtcggtaacaaagcagtagccgtggcggcctatgcttatattatctatatactgcgctatttcggtaaagcttatatccatagcgatataagcgccgcccagggctgaattttccgtttttcgggcaagggtcacaacccaagggtactccccctcaaaaagggtctgaacatgcggggaggaaagcgaaaaatcacctgaagcgtcaaaaagcgtcttatcaaaggacagatccttataaatttcatttttaagctttccgccactgcctacacaatttattatttttccgttttcgtcataaaccgtgaccgcgtaaatatcactttcgatttcggttatggcggaaattctttcctccatatcatcggcagtcctgcagccgtttaccgtatcgcttacgatcgtgagctttttcttcataagctcaagataattattgaccgccgccgctgcctgcccgaccgactgctcggcggaaagccgtgcgtcgcgcataagctcgcgcttgtaaaccgtggcgaaaatcacggtgcagacagccgccaccagcgcagaggataaagcaacagacagtaccgtaagcatccaaaggctcaagcgtttcttcattcattcacccctatgcgccacacgtaccttattcggtgtgtcgccgtaaaattttttaaagcaatagctgaaataatgctgatcgctgtatccgcatttctcggatatttcaagcaccttcatcccggtgcatacaagcatatcgtaagccgctctcattctgcgttcggtgagaagattcacaaagttttcctttttagtcttcttaataagagcgctcaaataattgggactgacacccagctcgctgctcacgcccgttaaggacagggtctcgtccgaatagcggtcgtctataatctgcaccaccttatcgcacagcacctcgctgtctcttcgctgcgagcgggctatgattgtctttgccttttcgcagaaatcgatcagatcgtttttcataacgctttcgctgctgtatgaggtgagccgcgcaaaaataggatttgaggaaaagagcgccaaaagctccgccttctcggaaaccgcgcttgtaactctgtaaaccgtggagattatctgcataaccaaaaggtcggcgttttcgggcgtgttgctttcatacaggctgttaataaagccctcgagctcattttccttgcccacctttaaaagctgctccaatttaacggcggatttttcaactttatcaagctctaactcgccgtcgcgctcctggtcgtttataaagcggatctcgcccgcgccgtctgaggtgtagcgtctggcggttatcgcctgaaaataagccgaggagcaggcagataactcggaaaagccgcggcttacgcccacagtgcatctttgagataaaagtcttttcgccgtctgcactatttccttaagcggcatgtccataaccgaggaaatatcctcgctgccgtctgttacggcaagggtcaccactctgccgtaaaccgtaaagcttaccgagcgcatatagcgcgacagcaccgtgtcaataaaagaggcatgcttttcatttgtgcattttcggcgttcctcatcgctgaatttggaaaccagcacgcaaaatacgttttcttcgccttcaccgattattccgagctccgccgcacggctgaaaagcgcggcttcatcgggcttttcctcattgcttccgagcattaagggaagcaggaattcattcaccgaaaggcgatgaagctgcaatttaaggtcggtatccggcgcagtcagaacgctgccgagcttttcatccattttgcggtggatctccttaagctcgtcagtcagctccgcgggggaaataggctttaataaatagcttattatgttgtattctatggcggtgcgggcatattcaaagctatcatacccgctcaatatcactatctgcaccataggccgcagctgacgcacacggcgtgcgagctcaagtccggtcatcatgggcatccgtatatcggtaataataaggtcgggttcgagcgtttcggtaagctcaagcgcttcaaagccgttttccgcttctcccgccacctcaaagccggcagactcccaatcgactctttcaatcagcgcacggcgctggtctctttcgtcctctaccacaagaacggtatatttcattaaaatacccccgcttatattatatatttagtataatataaacgaaggcaaaaatcaagtaagttaaatttaaaaacgcgggagagacctttttatcggtctcccccgctcgcttggggggaggcatatttatttttcattccagccggcataaagcgtcatgctgcccgtaacctcttcctctgcactccattcgtttgtgcagtctcggtcggtataccagccggtgaattcatagccctctttaacggggtctgcgggcgatacggtttcggaatacatcaccttaacgggagctatatacgagccgccgtcggtatcaaacttaacggtaaagccgttatgctttacaataaacaccgaaactattacaagcagcgccgcgagcgttcccaccataatatttgcggatctcaccgacatatttactttggcataaagtccgccttttttggtgctttcagctttgttttccacaccgttcacctctttttataattatttgcgtgccagatatttacgcatatcgatagcgcaggcaaccaggattataagaccctttataacatagagcatatttgcgtctaccgagaggaagttaagacctacgaaaattatctgtaaaaggaatacgccgattactataccgcttattttacccgtgccgcctacaaacgaaacgccgccgataacgcacgccgcgatagcgtccgattcgtagttaagacctgtgtttgcagagcaggatgcaatacgcgcgccctctataaatcctgttataccgtacatagcgcccgcaagcacgaataccaaaactatagtccagaacacatttacgcccgatacgtttgccgcttcctcgttcgagcctacggcgaacatatttttaccgaactttgtcttgttccagataacccacataagggcggttaaaatcagcgaataaagcacatatttcggaacggcaacattgcctattttaaagagtgtgccgcgaacaaagtcggtgtaggaggtatcaagtcccgaaagggtctgaccgttgtttccgccgagcattaaatacataagcaccaaaccgaaaacaataagctgggtagaaagggttactataaacgggtgcagcttgaatttagccacaaaaaagccgtttacaagacctatggccgcgcccacggcgataaccgcaagcagcaccacccacaggggcataacctttaaattcgggaatatcttattggcatagcccgtcatttgtaaaagcgacgccgcaatacacgcggtaagacccacgcagcggcccgccgaaatatcggtaccggtaagaactatcgccccgcctataccgagggctatgggcagctttgcagccgtgagtgaaattatgttgattattgagggcagctttaagaaagccggcactcttattgctatgtatattaccgctatggcaataattatatacattgcgttgttgaaaagcagatccgtaattgctctgcgcttgtccgcgcccgatttagctttgaaatcgtcaatccacgcggaaaaacggttttttcttttaatagcagctgttgacatttcaattccccctatgcaaatttagccgcaagagtcattatatcctcttgagtggcggtatcggcgttaacttcgcccgctaactttccgcccgacattaccagtattctgtcgcacacaccgagcagctcgggcatttccgacgacaccattataaccgttttgccctttgcggcaaggtcgattataagctgataaatttcgtacttcgcgcctacgtcgattcctcttgtaggctcatcaagcagcagcaccgtaggctctgttaaaagccagcgcccgagtatcaccttttgctgattaccgcccgataacgagcgtatcttggtctcctgcgtgggcgttttaacgtgcattgagtttatgcaccaatcggtgtttgctttaagtttcgccttgcttaaaaacggaccttttttgcatttattaaggcttgaaatggtcgcgttttcgcgaatattgagtattccgaaaattcccgttgcgcggcgctcctctgtaagcagggcaaatccgtttttaattgagtcgcgcgggttgcggtttttaatctccctgccgttaagctttaaggtgccgccgcgccttgttgccacgccgaaaatattttcaagcagctcggttctgcccgagccgtcaagccccgcaacgcctattatttcaccttttcgcgccttaaagcttacgtcgttcagccttgcgtattcagagcttaaattatccgcctcaaacaaaacatcgcctatttcgttggttttgggcgggtaaatgtttgttaattctctgcccaccataagctttataatttcgtcggtggttaaatcctttgcctcgcgcgtggctatccatttgccgtcgcgcattattgtaacctcatcggaaattcttaaaatttccgccattttatgagaaatatatattatcccgcagccttgactgcggagcatatttataattttaaaaaggtgctcaacctcttcctctgtcagcgatgaggtaggctcgtcaaatactatcacctttgcgttatatgataccgctttcgcaatttccaccatttggcgttgcgataccggcattgtgctcataactgttttggggtcgacattgacctctaatttttcaaaaatttctttcgtggcggcgtacattttcttttcgctggttatgggcacgccctttgcaaccgtggggaaacgccccagccacatattatccataacattgcgcttcagcgcctgattcagctcctggtgcaccattgcaaccccattttcaagcgcttccttggaatttttaaagtttatttccctgccgtccaaatatatgtttccggagtccttattgtaaaccccgaaaagacatttcataagtgtcgatttgccggctccgttttcgcccataagcgcgtgcacggtgcccgcctttacggtaagattaaccttatcgagcgccttgacgcccggaaaagccttttcaatgttttccattctaagcagaacaggcttttcgcttaccgcggtattgtttgcaatgcttctctgctcgttcataagcctttctcccccgtttttttgctcacagcagccggaataaccggctgctgtgaaagttatatattattcgccggtgtaggtagcgtaggggatattaactctccacttgcctacaaggttttcgctgtcaagtccgtcaagggcttccttatctcctaagaagttctgcgcgatagaagtaatagcttttgccataccgtcggcgtcctgcttaatggtacctaccatagcgccgctcttaatagcggatttagcggcgtcggtcgcgtcaacaccgaataccgggattgccttcgcgccttccttgttgtagcctgcggtctgcaaggaggaaattgctccgagcgccatatcgtcgttgtttgcaattacaagctcaaccatattcttgttgctctcgctgtactgcgctaaaagagtgcccatataatcggtagcggcagcagaagaccactgaccgttctggtctacaaggtatttgttcttatttgaagcgtcatagaattcaagctcgggcttgcctgcagctttgagcaccttgttagcgtcctcaacgccgtactgtgtgcgggcgatggcctccatattgccttcctgacccttgaacattacgtagcttatctttccgtcgccgttaagatcgagcttattgtaattatcaacaagatacttgcctatcatttcgccctgcatatgacctgccatttcgtaatcggttcctacgaatacgcacttgtcatagctggttacaaccgattcctgaacagagcggttgaagaagattaccggaacatttttcgcttttgcctggtcgataatgttctgcgcggcgtcgtttgagccggtgtcaacaacattaactacaaggagctttgagcctttcgcaagagcggtggttacctgctctgtctgggtggtctggttgccgttggcgtcatagttctggaatttcagcccagcgtcctttaagaacttatccattgccgaacgaacgcttgaaatgtaggtgtcgctgtaggtgtagtagaaaaccgaaacctcgccgtcggatgaaccgccgtcgcccgagccgcaagcggtaagacctaaagcaaacgccaaggtgagaattactgccaatagttttttcattttgagttgcctccgtttctttattcgacttcttgtcgtcgagtattattatatttcgggagtctctctttttaaatagatttttctatcggaaatgtataaaaatttattcaaaggtgtatttttttaattgttttttcaaatccatactcctgcagcgccgaaattatcgccttgaaaaagctgtaacaccgcgtttcggctgtccgcttttcaccgtaacactttgcggaggaaaacataaaatattatcggacaaataaattttgtttgattaaattctgtaaatacaggtaaaaatataaacagattgagcggtcggaagccgagtgcttcccatgctcgacccaccagtatttaagcggagtgtgaaacagaaatgaatataaagcggggagaaatatactatgcggatctgagtcccgttgtaggctctgaacagggcggcgtgcggcctgtacttataattcagaacgacgtgggaaacaaatacagtcctacggttatagccgccgcaataaccagccagcgtgacaaaacgaacctgcctacgcatatttccgtaaatgccgacggctgcgggctggcaaaggattcgatagttttgcttgagcaggtcagaaccatagacaagcagcggcttaaggaaaagatgggctgtcttgataacggctctatggggcttgtcgacaaagcgctttcggtaagcttcgggctcaattgaacaacccgaattcggcagacgacgattttaccgaatatagcggcaggccgagtgaacgaatccatcgtttgcccggctttttcttttgcatattataaaatatgcttgacattagcgaaaataagaatgtaatataattatggaataatgcgaaagatgataataacatggataccgccgaaattataatgtatccgatcaaacagaggatatttcggtatttttgattcacgaaacaggctctgttgatgagattaagaaaagcatttcccgtgttctgagcgcaagtctgtaccgtcatataaaaatttccgcgaacagctccgttcttgaggccgcaggcgaaaatcggatcgcggtcggctacatgaagaggaaagcggcaaaggtcggcaaaatgcggcaatgcgggaaatccgcgctcaaaaaacgggttcggattattctcgtttgcctaaattaaaaaaaccgagagaatcatcatgaaatcgttataggctctgccgacgcaccgtgggtcatagtcttgaatatgctttcgggcaatgcctccgccgtatagctcggtacaatgcttattctcggcttgccgctgtgccgatccggcacgaagatgaaacataaaccggaacaaaaaagcttctttttacttatatctttatttctctcctgcttcaaggcgggagattttttattttttcggaatgatttataaaaaatacggttttgatgattattttctatagttttttaatattttgcgatattgaaaaaataacgtccgaaacagtataattataatgaagaaagaagtgtttcggagcggatgcgatgtataaaaaaataacagctttgattttgtgctttgcgctttcgggaattttattaacgggcgcgtttgaaaccggcgccgccgcagatgtttgcgccgtttacctttcgagcgacggcgatgattccaacagcggtatcacagccgataaaccacttaaaactctgaaagcggcggtaaatacggtaaatcggctggagcttgtcggctataacagagtaataaatattgtaaaatgcggctggaacggaatttcctttgatatgtcgggctgcacgccgtataccgaaatgattaccctgacggcaccttccgggcttacggtatggtcgacctcggatatgtatctggcgggtcctttgacgctcgatgcggattacggaaattcccgcactcagagtgcgcttaatatttataccggcggttaccccttcaccctgctttcaaaggatcaaaagggaaattcaaacatatatgctggctttaacagccgcttggggctgacagccgatgaggaaagcggaaatatagagtggaaaagcgatttaaaaataacgcttgcgggtgagcgcgaaatgacgatcggcaaggttattgcgggaaactgcagcgatcctggtcacaatgtgatatacggtaccgccgatattctcattgataaccccaacctcaccgtttcctcattaaagctcggcagcaacggaaacttcacaaacaccggcacgcagtccaaccgctttaagggtataagcataaccgtaaacagcgttaaggaaatagcaacccttgagggtgctacatattataatgcggtatataccgaagaactgcggctgatattcaacaacggcacggcggacaggataacagatacgcttatttacggcaaatacggaaacacaaatatacaggcagctaaaaaatggattgtcaaaaacgggacggatactccgatcaaagcgggagcccagccgggattatttacggttgtcggcggcagcgccgtaatcttcacggatgatgaaaatccgaagcttacatatacatccgaaaaaggcaatataacggtccctgcgggcagctacaccgtaacggtatcagacacggaggaatatacattttccgaaggtgtttttaccgccgtcaccgatttaaaggactttaatcttacagatattgcccccgcacagtcgggcgggaagatattgctcggctttaaagatgaaaacggcggatatttgaatcgtaccgcaaatttaaaaatcaacgccggtgaaaggctttacgccgtatataccgatttcccggtaagcggcaaaaacgcggtattttcggtatcgggctttgaaaggcgcggcggcgaaaagctcggaatacggtttatttttgaaaaaagaaacggctttgaagcggcgacagccccgctttcaggcatgaaatacggctttgcggcaatgcccgagcattttctgaatatcggagaggcgctcacggtcgataacgaaaacgcggctgtaaggactgtcggcggccccggcttcgtcttttttgacggcagggaaaaattcaccgcctgcattaccgatattcccgaaaagcactatgcggagggctttgcggtacgcggctttgttacctataccgatcttaacggcaacagccgcaccgtttataccgaagtatcttgcgcctcattaatggaggcgaccgccgattcggcactgaacggcggtcttaccgattcggaaaaagcggagactgcaaggcttgcggacaattccctctcgcttaaaagggcgtctcttgagagcagtgtttcaaatcatccggacatcgtaaggaattcggtctcgggtaatatttattatgtttccgaaagcggcagcgactcaaacgacggtctttccgaattaaagccgctcaagactctatatggggtaagcagtctttccttaaatgcgggagacgcggttttgttcgaaagaggcggcgtataccgcacctcaaaaaaatataccgacggctcttcctttatacttaaaagcggcgtttcatacggtgcatacggcaaggggcaaaagcctgttataaacggctcgtttgaaaattacgccgaaagaaagtggagaaaatacgccgataacatttggtacatatgcatttcaaatatctcggcagatcccggtgttttgcgtgtgacgaccaccaaaaattattcgtacacgggctgtgtcaaggaaagcattgacgcgcttgcccgcgaatgggatttctgcagagacggcacaaatttatatatgtactgccagtacggcgagccgacaaatcttttaaacgcgattgagataggcttcggctttgatatgtttaaaatagataacgcaagcaatataacgattgaaaatttgaccttcacctgcggcggcagacacgcagtgggcgcttcaaacggcgctgcgagcgttacggtaaggggctgcgaattcagctatatcggcggcagcctgatgagcggctccgacggcacacgtctcggtaacgcggtggagtttttgggcagcagctcggatatacttgttgaaaaatgcaaattctccgatatttacgacagcggcgtgaccttccaggggctttcggcaaaggtaaacggctttaccgcacggagcaatgtctttgataaatgcgggcttgcctcctttgaatactggctcggcacggcgggatacgccgaaaacataaccgttgaggataattatatgtcgaacgcgggcggcggcttcggcggaatcggaaaaagaagcataaacgcgaaatatgtctctcacataagggcggacggcgcgaaccgcataagtaatttcattataagaagcaatgttctcgattccgcggcggatggtgcgtgtcttgcggcgctctgctgctataagagcagcggcggcagtctccccacacttttccgcaatatatacataagaaaatccggcgaatggcttttaagtgttaagaccgaatcggcagctgacgccgcagtattttcgacggacgccacaggaattgattatttaaagcaaagctttgataataaacccattgtaattttaagataaggagtaattattatgaaaaaactatcagcgctgatcgcaacgacagtgttaacgctgtcgacagcactttccgtctctgcggcagagccgacagcctctgtacccgtaagcgacggaaatgtttacaaaaatcttttttcgctctcacaggacgccgcagaagaggatacggcggcaataccagctgagcttgaaaaattatcgggcgcggttgacagcagaagcacggcatatttaagctttgcggtttatgctccgggagcgggcagttattccttcaagctttcctttacgggaacggactatgccgcggtaaaggtaggaaacacggttgtaacggcatatcccgataccgcgttttcgctcactctctcaaagggactgaaccttataacctgcttcggcgccaccgcagatcaaaagggagccgcaattaaatataccgcccttctttgcgagaacgggctcaacccgatcgagggcgagttttatttaaacggagatgttaacggagataaagaggttgatataagagacctcgtacgctacaaaaaacatttcgcaaatgcctccgaaatcaaggatgttgcggcggatatcaacagcgacggcacggtggatgccgcagatatgagcgtattgaagcaatattttgtgggagcggaaagcgctctcggcgcggtatcgccgggttatgaaataagctatgttatgagagataacgatatttcggataactggaattactgatttgacggaaaggagtaacgaactatgaagatcaaaaggctgtttgctgttatccttgcggcgtgcatggcgttttcaacggggcttataggcagctcggcagaggacgccgcacctaacattcaaatctctgccgatcccgactatatttatgcaaaccaatggataggatataccttcaataacctgacatcggatatggaactcggtattgttacagacgcgggaggacaacctgctaaaagtataaaaaaatacataaaaaataaaaccggaagttataaggaagacatccaaataaaggaagccggtgtctaccacgccgcaatttggaaaaccggttggaactttcaggtttcaaagaaaataaccgtctatcccgcaattacaatttcaggcaataaaatttccggaataggaatgaatgcatcattcaaaatctccggaataaaatccaaaatgaactttgcaatatttcaaggaaaccaaaacggcggcatttccaactacaacaatcgaatttacaccgatttaaatataaccggtgacaaaaatgaaagtgtttcaatatccactccgggctattatgttgcggccgtatggaacggtaactggacatttgcggcgcagttcccgttcagagtgtccgattcggataaaaccgcctcacttgacaaagcatcctactccgagggcgacacgataaccgtaacaacggacaagtggcaagagaatgacttttttgcgatatatagcggctccgttacggatataacagccgacaccgaagccgtatacagcgggaaaaacgaccccggaaaatcctcgtataccgtgagtaccgcaggctggcagcccggagaataccgctttgtggcgtttgattcgggagattattcggcggatcacatagcagatacaaaattcacaataaaacaggataagcgtgcaactatggataaaaccacttatacgaccgaagaaacaataacggtcaccacaaaaaactggacatataacgagggctattttatccgcatttacaaaaagccgataagctcgggctacaacagcaacttcgtagcggacacctacggcgcgtgggcaaaggaaacctataaattttatccgtacaactgggagcccggcgaataccagcttattgcctttgaatatcaaggctgggtaaaggtcaacgaggtaaacttcaccgtcaccgcgcccgaaaagaaggcgtttgaaataaccgacggaattcttaccgcaaatgaggaaataacccttgatttagccgaaatctcacccgactcaccggacggcaagttgtttatcggctggaagacagcgaacggtgaaaatgcgaaaagccgagtgaccctttccgcgggagacatactcacagcgcatttcattgatttcaataacgctgacagcacggatttcaaaataaccgatacggctgtaagaacagagaagagtaccggacttcgcttcacggtacagctgagcaacagactctgcgaagcccttccctctgccgcagaatacggtgcggcggtacttccttcggatattttgaacgagaacagctggtcggagcttgagcttgacaaagcctacccctacggcgacggcagctttaccgccgcaaaggttccggcagaacggctttttgattcggaaaacggcagcaaaagctacactgtctgcattacggatattaccgatgaaaagctcacccgtcagtatactgtaagaggctacattaaatataccgatattaacggtatcgcaagggtgctttataccgattatgcctcggcaaatatgtattcacaagcaagagcggagcttgaaggcggcgagctttccgtttccgcccgcagcgttttgacaggtataaccgaaacggtcaaaggaatccaaaccggaaaatatgcgggagcagacaaaataaccgtcaccggcaatgcaaacaacccgaattattatatttataagctcggtgaaaacggcatttccgttcgcgatgtggtaattgacctcggtcttgacaatcagcttgaaatcgttcagctttccgatatgcatttcaattatctcaacgcaacggattacaaggcaaagaaccccacggtgctttccaccaacgatgtacgcaccttcggcaaaaacgcttcctccgtcgttaaagcgcgcaaggcgcttgactttgcaagaaccgccgacgcagtggtcttaacaggcgacaccatcgattacttaagctacggcggcatagagctgctctataaggaaatatgggatgttatacccgatgccatggttactatgggtaatcacgaatatctgcagagaatgcagggtgtaatgcccgaaagcctctccgccgagagaagatgggagatactcagaagcgtttggaagcatgatatcgattatacctcaaaggtaataggcggcaaggtcatgcttatccagctcaacaacggcgagggcaaattctatgcaagccaaaaagcaatgctcgaagccgatatagcgctcgcaagagcgaacggctacgcagttcttgcgttcatgcacgagcctatcagtaccggaaatgcatcggataccaatattaccgcaatccgcaaggatgacggcagtgcaagcggaaattactattccggtcaggtcggagggccgaaagccgatgccgccacaaaggcgatatgcgatattatagccgcaaacggcgatataatcaaaggcgttttcaacggtcaacatttgcttcacagaccgcgtgaatctgccgattccgagctatgagaccccggttgcaatactgaacgaacagtgccgcattgaaatggagactctgctctatcttgcagagcaggagcttcatttaaacgattcagtatccgacagcattgtgaaccattgcatcgactggatgctgctcctttttcagagaaacaataccaccctgtccaaaacaaattcaaattggaacaggcttatctgcaaaattacagaggactacagcacgataacgcttgaagaagcggcggacatcatgggtgtttcggtcagccacttctgcaggaaattcaaaaaggatttctcggttacctttcataattatcttaacgaaataaggattcgtcaggccagaaatcttttgctctattccgacgattcggtttcgcttattgccgaaaaggtagggtatcagaacaatccctgccgtttctactctaatttcaaaaatgttgtgggcatgaccccaaacgaataccgccgttccttcaagaaaaatctttacggttccaaagctccgcttcggtcctttatacccgagcctacggatatgtatcccgacagattttccgcatataacgacgaaaaaagaagcaaagacaaatcataaatatcggcaggcatataaaaacgccttaaagcctgcctgccgttcttcagcggacagagtctatttttgtccgttttaaagtggtgaggaatttgaacatttcatttgacgattacatgaaaaagcttgtatcctgctataaaggaaaagcaataggcggcacgctcggaatgccgtttgaaggatacacaaacacaaacagtattgaattttacgaaactctgcccgataaaatgcacggaaatgacgatttggatctgcaggtggtgtggcttgagacattgctgcagaacggctttccgataaacggttaccatttatccgcggcatggcggcatttgaatttcggacccgatgaatacggagtcgcgctgcacaattttaaaaacaagattttcgccccgctttccggtgtttacggaaacaagttcggcagcggaatgggcggcgccataagaagcgaaatttgggcggcattagcgccgggagatcccgcgcttgcggtaagctttgcaaaaatcgacgcctccgcagaccattgcggcagcggaatttcgggcagtgtttttctgaccgccgtcgaaagcgccgcctatacggaggatgataccgaaaggctgattgaaacggggctttcctttgtcaataaggatattcgcttttcctctgcaataaggaacaccgttaaatggtggcacgatacaggcgatttatttacggtgcgtaaaaaaattctcgaaaattacggtgccgataactggagcgacgtcacaataaatgtaagctttattgttttggcttggcttgcgggaggcggcgatttcgggaaaaccgtttgcagcgccgtaaactgtggatacgacgccgactgcaccgctgcgtccgtaggctcgatactcggcatattaaatcccgacggcattgaaaagcggtggtctgaccctataggcgataagcttgttttgtcccgtcagatactcggggtgagaacctcggaaaccatgatcggtctgtgtgaaaaaaccgctgcagctgcagtcaaatgcggagaattctataattcgtgtgcacggcttacgggcgtaccgcagcatattgcggaaaaatcggctgaaatacccgtttggactgacccctcccttgcggaaatgctcttcgcccgttctaagcgggatagtcttttaagcatacttccgctcggaataatacttacataccccgaggtgccatcccttgcaatgggtgaggaaaaggagttttcggcgcggatacttaacccttcaagaacttcggcaatgacacacctaaaattgagcgtccccgaatgctttgagcttagcgtcgatgaattctcctttgaagtgccgccgctttcggagcatgaaatacattttaaaatcaagagcaataccgattataaatcggcatttgattttttgcatttcctgtttgatataaacggaatgcgttatgaagcggaagccggcatcatctctgcgtatccatggaccgaaaaggacggctgtgatgacatttcatcgcttgaaagcgcccgctattcccctgccgaaagctttataaagccgatttcgcgcggagcaaaggagcttgcaatcgaggttcgccccgcaatgccgatgaccgcggcgataacctgccagggcacaagaccgctgaaattatggtttaacggcgaaaaaatacttgaatacaatgccaaggtatatgtccccggactgcacagagggcaatccgtactggcgaatctaaagccctgctggaacagaatcatcctgcagaccgaggacggaaacgacggcgagatattttttgcaatcggtaacccggttgattggatatggctcaacacgcttgaatggcgcaaaccgaaggaggagtaaaattgattaaaccggtaggactgtcggtcggcgacctgcagcggaaatacggcgatataaaggcacttgaaattgccgcgaacgcaggggcggattctgtggatcttgatttgtgtaccgacataaacgattacagaaacaaggactctctttacagcaaggggtttgaagcaacggcggaatactataccgccgttaagaaacgagcggatgagcttggaattattataggtcaaacacacggcaaaattaagggctttgtgaataataaggcggaggatgacgcccttgttaaaaacagcgaatatgactgctttgcaacggcgatactcggcgcgggtgtttgcgtggtgcacaatgcaacctcgatttttttgggacctgatcccgagcctgcacttatgcaccacttaagctttgatatgttcagcagaataataccgtatgccgcaaggaacggaattaaaattgcaactgaaaccttcggcgacgcggtgcgcttttccgcctgcgatttctttggaaatataggtgaatttgaaaaggcatataatgcgatcgccgcgtgtgacgaattgaaggatcactttaccgtatgcgttgatacgggtcattcaaacaaggctatgcgttacggtaatccgactccggcagatgttatacgccgtctcggaaaaagcgttacgctgcttcaccttaacgataacgatacgctgaccgatcagcataaaatacccaaaaccggctgcattgactggaacggcgttatggacgcgcttgatgagatcggctacggcggtatatataacatggagcttaatctgcgtcatttcggtgataatttcctgattgagaccgccgagtttgccgttaaggtaatgcgcaatatgctgacagaaagatacggcaaaaacgcagtatccgaaaaaaagctgtaaaacaggtgattaaaaatgcttgaaacaaggcttgtatcctcccttgcaaaaatatttcccgacgaaatatccggcagcacactcgaaaacgcaaccgccctttcaaacgaaccgttttcctttcaggtcgcatttaaaaatgccgatttaaaaagcaatgctgtgcagatatatgtgcgtatagaaacggatatcggcctccgaaatatatccgaatataaggtaggctttgttccggttttaagagccgcgccgcaaaatgccgacgattattttgagcggcggcagccgggtctttatcccgatatgctgcttgaaagaaatgtgcgttccgaaattgaaaacgacggcttttggtacgataaatactgcgagcagaatgaaaacaatcagcttaattccatagcagaagcataccaggggctgtggtttaccgtgaatgaggcgggagaaaatatcaagccgggtaaatataagattgcagttgttttttacagctcgcgggaaaataccgaaatcggcagaagcgagctttcactggaaatcaaaaacgcgcgtatcacagccgaagcgcctttatacacctgctggttacactgcgactgccttgcggatatatacaaaaccgaaatgttttcagacgagcacttccgcattattgaatcctttgcaaaaaaagcagcggaaaccggtatgaacacggtgctgctgccggcgtttactccgccgctcgatacccctgtgggcaaggagcgcccaaccacgcagctggtgggggtcacccttaaaaacggcggctattccttcaatttttcacttatggaaaggtacatccgcataatgcttaaatgcggaataaaatattttgagcattcgcatctattcacacagtggggtgcaaaggcgtcaccgaaaataattgcggataccgaaagcggcaaaaaacggatattcggctgggaaaccgattcaaggagcgaagaatacaagcgatttttgaaggaatatcttaaagcgcttatgccgttccttaagcggctcggtataaaaagcaatacctttttccatatttcggacgagccgcagaaaaaggatatagattattataaaagcgcctttaaaaccgtaaagccggaaatcggggactgcaaaatcacggacgccctttcaaattacgatttttttgaaaacggatgtatcgacattcccgtggttgaggtctgctcatcggatattgaccgctttataaacagctgtgaaaacttttgggtttattataccggtgaaataatgaccggcggttaccccaaccgcaacataactgtcacaggcgcccgcaacagaataataggcatacaaatgtattataccggagctaaaggctttctgcactggggcttaaattattattatgatgttttaagtcatgggctgttcaaccccgcagaaaaccccggcggatattttcaggtgcccggcagctcgtttatagtttacccgggctgcggcggagaagcgataccgtctgcacggatgaaggtattttcagaaggtcttaacgactacagggcgctttgcacccttgaaaaattcatcgggcgcgagaagacccgtaagtttattgccgactttttcggcaaggtcgattatcacctctgccccgataacgacagtctgctttgcttccgtgaaaggcttaatgaagctttggagagtgcatacaaagcactttgagtgtgaaaaccaccgacatactgtaacatttaatattaagcgccataaactgtattaacagcctatggcgtttattttgttttcaggcagggaaaaaacatgaaaaaaattacagttctcggcggcgacagccgccttaaaatcgccgcagagcagctccgcggctacggttacacggtaaatactcccgatttccccgaagccggggacttaagcggctgcgatgtactgctgctgcccgtgccgaccacgcgtgacggagagactctgtttgccccggagtgccgcaaagaaatatatctttccgatattgcaaggcttgtacctgacagcacgcttatactgtcctgcggctacatgtttgaagggaaaaactgcatagattacggaaaaaacgacgcttattgcctgctcaacgccgttccgacagccgagggcgcgattgctttggcaatagaaaaaactccttttaccctatggggaagccgcgttttggtaatcggctgcggcagggtcggcagaatactggcgggacggctaaaatcgctcggctgccgagttacggtgagtgcaaggaaagcgtcggatttcgcactgatttcggcaatgggctgttacgccgcaaaaacctccgaaataaaaaagcatcttaactgcgatatcatattcaacaccgttgacgttaaggtgatagaggacggggattttgaagactgcaccgccgagcttattatggatctgtcaagccgcggcggatacgattccgccgctgccgaagctgccggcattacagcgcttaaggctcccggtctgccgggaaagaccgcgccgcaaaccgcaggagaaattttggcaagaagcgtgcgtgaaattataacgactactatttaaagaggagaacgatatgagaaacataaccgtggggtatgcgttctgcggctctttctgcactattaaaaaatctctggaggcactgaaggagcttgcaaagaatgatattaaaattatacctataatgtcacagacagtgtattcgaccgacacccgcttcggctctgccgcatttcttcgcgaggaggtggaggatatctgcaaggcaaagatcatacacgatatcgccgccgcagagccgataggcccgaaaaatctgcttgatatcgcagtggtgtcgccctgcacgggaaatacaattgccaaaactgccctaggcatcaccgatacaccggtcacaatggcggtaaaggcgcatttgcgtaacaacaagcccgtagtgctggcgatagccacaaatgacgcgctcggcgcttcggcaaagaatatcgggcttctgcacaatatgaacaacatttatttcgtcccctaccgtcaggatgatcccttcggtaaaaacaattctctggtctgtgatttttcgctcttgaccgaaacggtcgaaaaggcgctttcgggcgagcaattgcagccggtcatactttagcaataaaggactctataataaatgttggggtaagcaagcagagcctacgaataaaaaataaaaaagtagagcatatttggagaaaatccgttaaaatggaaataagtagataccataaacggagactccaatatgctctataatcattttacagaagaattgcttggattgcaaggggtaaaaataacaaatgttgaacaagaagaaaatttaattaatgcctgctgaacaattcaaaagtaccttaaccaagcatgtaggtgtaaacttttgaattgttcaggtgcaaggtttttgcgcaattttgcgaaaaacc

SEQ ID NO: 3777 - DNA, 23784 bp, Unknown
  16S sequences of unknown bacteria
tgcgcactgcgtgtgctcgcgcctccagccgcttcgcggcctccaacggccagcggtcggggcgggaatgcatttttacccacagttcgcaatcgtcgatccacatcgcacgcaaagcgtgcttgtggctcttgttgctcactgggcttacttcggcctgtttcgcgcacagcgcgcggccttcgtgcgccccgcaaaaaatgccagaaatgacgtacacgccgtcatttctgattagagcctcgttcttccgatactttgtcaatactctgggctcccctgattccaggggagctgtcggcgctagccgactgaggggttagaaacccaaaaaacgcaaaatcatgcaatctggagcggcgtccatatgctctgctcctccccggagtctgggcattttttcggccgttttacgctttgcgcgtaaaacagccgaaaaatacgcattcgccggtttttgcgcggcgctcagctatcgcccacgcacttgccgcgcagcttattgatggcgcgctccaccgcatcctggctgttgccccagggcttatccttgttgcggtaatcgaatttgagggtgaaccactccaggtctttttccacgcgcgcgaggttttcgcgctccacgcgcatggcggtctgcgagaattcctccagcgttttgccggaaaggtggcggggcgcgtcctgcatcacctggaaatagtgcggcaggcacaggcctttggaggcggcgaaggcctcgcggaaggctttttcgtgctcgtacatgtacaaaagcgtgtaaacatagcgctccatggtgtgatccaggcgctcgcaaaggatgcagctttccacggcggcctgcccgtcatttttgggcgcgggcgcgttgcggcggaacaggccgcccttttggggcgcagtttcgcttttttgcaaccgcgccatcgtctctttcatataagtatgcgtcatcagggccaagcccaggcggttgctcgccacgaacatctgcgcgaagtggcgctggcaaaagcccttttggttcacttccacgcgcgtgtccggctccatcaccgacgcgcccaggaaattgtcgatgtacatggcctcgttcttttgccggatttcgcacagcgggcattcgcaaccggcgcggtatgcctcccaaatgggcatggtatcgaggtgttctctcatggttcctcccctttcggttccggcgcggcgtcgtcgccgggcgcgtggttttgcgcgtcgagggacacgctgggcagttgcgacaggtcttcgatgccgaagtggcgcaaaaaagcgtccgtggttccatagagcatgggccgccccagcgtttcgcggcggccaagctcctggatcagccccttgttgagcagggattgcacggaataatcgcactttaccccgcgcacggcctcgatttcggatttggtgatgggttggcggtaggcgatgatggaaagcgtttccatcacggcggcggtcagcggcatgcgctgcaccgggttgagcagcgcttccacagccgcggcgtattgcggctggatggatagctgcacctgggagccgaaataattgagcttgaggccgctgttcgcgtccaaatactcgcgcatttcctccagggccgcgctcatctccatggccgtcaaattcagcgcgtgcgccaggtcgccgacggccacgggctccccggccacgaacaaaatggcttcgatttttgcgcgcaagtcgtccattgcgtcgatccttccatacaaacgatttttcccattataccataagaacgaagaaaaatccacctcgcgccaaagagaaatcgtccaccgctgtctttagcggcggacgaagcgcggcattgggttttgcctatttgcgcgtgcggatctccgccgcgccgttcaacatggttcgcgtgcccaggcggatttccgcccccgcgcccatctcctcgtagaggcgcaggaaatgcgccgggccgtcgatgagcgttccattgaacgtcacgacggcggtgttttcccgcagaccatccacataccaggggcaatgcggcggcaaagcgagaatgagcacgccatgatgcccgggcgtggcgaaggcgctcatttccccatcgttgtcgatgcctttgaaaacgatgtcatttaagcgccaggtttttcctttgtcccaatccggcaggggcgtgggcgcatccacggggcaagccgcggccagggcgcgcagatgggcggaggtcacgccatacgcgccgttttgcgaaaagcgcccgtccaggggccgcaaattttcatcgaacgcaacggggcgcgcgatggaggattcgtcctgcccgctcaggcgcgcaagttccgccgcgggccgctcggggccggaagcgacggccagcaggttgccgtccacgcgctcgccccagcgctctggcatgccaatgggcaaatagggccgcatgacgaggtttccctcgaacacatcgccgctgttttcaaaccacacatgggggtggaaggtgttgttgatcaggcggttgccgcgcgctatgcggcaaaagccttcgcggaatttcagcccgcccgcgagacagaggttgtcctccaccaggtaattgctgcagccgtcgtccaggtcgatgtcccagccgtggtcgcagcgcacgcggttttgccgcagcaccgtggtttccaccgcgtcgcgcagcgccaaatcgcgcatttgcgcgctattgagcccgtgcgcgtgccagaagcggtcgcgcccccagccgttgacgctgccgtggtcgccggtttcgcgcacggtatcgaagatgtcgttgccttcgatgcaatgcccgccgaaggtgccgtcgccaatgttgatggccgcgcgggggcaggtgtgcagggtgcagcgcgcaacgcggatgcgcgcgctcatggcgatttccacgcaggcggtctgcttttccgcccggccaatgtcgcgaatcaggcaattttccaccgtgcagtcgcgcgcgtactcctgcaatgtgctgagcgcgcttttgagcaatgaggacatgagtagcctggtgtatggccgcaatcccattgcggaatcccgctatacctgcaccgtgctcaatgcccgccggaatctttatacaatctctttgggcagccctctgtacgaggatattctgttttaccataaagaggagggctttgtcatttccaaagatgtgatatacctgcggatggaattgtttcccgaggggtatgagtaccgtcatcccggctatgcctgggatgaacgttttttcgcgctgttcgacgcggaacatccctattcgcaaaaatggatcctgtatccttctttggacaacgcttcttccaagctgctatgcgcttcggtgattgtgggcgacacctatgaagtatacgtggtgattcccgtagacattgccgcgctgctggaaatgctgatgccgcagtattccggcagcatcatcgcgctggacgcggaggggcgctgcatgagtggcaacggggaaatgtaccagcaactggttttcgacgagaagagcgcgatcgccacggacgccgcgggccggcaatatctttatagcgtggcggacagcttttgcggcgtccacctgctcgtgctcaagccctattccgcggcggaaggcgcgggagcgggcctgcgcatgagttttgtggtcatgctggttttcgtcatcctttccacgctggcgctttccctgctgatgacctttttgcaaagccggccgctgagcgggattttgcgcttgctctttggcgcttcccagagcgtgctcagcgcctatgactggacggtgatttcggggaaaatcgaacaattgctcagcgacaatcacgcgctgcacgaaaaacgcctggggcagatccgcgaaaccaaaaaatacatgatggacgcgctcttcgcgcacacggaggatccggacgccatcgttgcgcgcatggaacgcctgggcatgaagccgcgcgacagctttttcctgctgacctttttctttgccagcacagaggattgcgcgcgggcgaccaacggcatcacggcgcgtttcccggaggcgttcagctgctccatcgtggatgggcgcagcctggtgatcctcgtgcgctgcggcgacatctgcgaaacggacgcgcaggagcggctcttatccctacggaacgcctgcgcgcggcagggggtgcaaaagccctgcgtggcgctggacgcgattcccgagctggggtgcgccgatattttttaccgcgaacagttgatgaccatggaaatcgcggaggaagacgcgcgcgaacgggtgatgcacatcagcaacgatatcttcggcgagcaggacatcttctatcccacggctctggagcaacaaatcgtttcgggcgtgctctccggcagcgaagcgcaggtggccagcgcgtttgaaattctctgccaggagaatttcaccctgcgccgcatcacggacatgaagagccgcctattggtcgagcggctcgccatgaccatttccgcgccccttttgcgcatgacttctctgccggatgagatcaagctcaataccctgcgcgccatccgtccctttcgcgaatcccctgcgatttaaccgttatgcgtattgaagaaacgcgcgcaatatgatacaatacataaaattgacgaatatcaaccgggagggacggcgcattgatcgtcatagaggatgcttataaaacctttgaaagcggcgcgcgcaaggtggacgccgtgcgcggcgtgagcctcacgatccaggatggggaaatcttcggcgtgatcggctacagcggcgcgggcaaatccacgctgatccgcctgatcaacctgttggagcggcccacctccgggcgaatctttgtgaacggccaggagctcaccgccctcgcgcccaaagaactgcgccaggcgcggcgcaagatcggcatgattttccagcacttcaacctgatgaaatcgcgcaccgtgtattccaacgtggcctatcccctgcgcggctcccctctctccaaagaagaacggcgcgacaaagtgatgaacctgctcaagctcgtgggcctggaggaaaaggcgctggcctatccgtcgcagctttccggcgggcaaaagcagcgcgtggccatcgcccgcgcgctggcgaatgatcccacggtgctcttgtgcgacgaggccaccagcgcgctggatccgcaaaccacgcaggacattttgcgcctgctgcgcgatgtgaaccgcaagctgggcatcaccatcgtgctcatcacgcacgaaatcgccgtggtgaaggaaatctgcacgcgcctggcggtgatggacgcgggccgcgtggtggaagagggcgcgatttacgacgtgttctcccagcccaaggcggagctcacccagcggttcattcgcaccacgaacaacctcgcccgcttcgaggaattgctcgccaccgcgccggattcgctgaatctcaagccgggggacgtgatcgcgcagatggaattccacggcggctcggccgggcacgcgctggtctccacgctttcgcgcgaatacggcgtcgacatcagcatcgtgtttggcaacatcgatattttgcaagccacgccgctgggcacgctgattgtgatcttccgcggcccggtggatcagctgcaaaaggcgctgctcgcggcggaaaagagcgaagttcaggtggaggtgttgcgccgtgtatgaatttttgcaaaccatcatgcccaacgtggtgaagaccgcgccggagctgtgggaatgttttctggagaccatcaccatggtgggcgtttcggcgctgatcagcgcggcctttggcatcgtgttcggcgtggtgctggtggtaacgcagccgggcaacatcctggaaaaccgctggattttcggcatcctggataaaatcatcaacgtgttccgcgccatcccctttgtgattttgatcgcgctgttgatgccgctcacgcgcctgatcgtgggcacgtccatcggcacgaagggcgccattttcccgctggtggtgggcacggttcccttcttttcgcgccagatccacgccgcgctgtgcgaaatcgatcccggcacggtggaggcggcgaagtccatgggcagcagcccggtgggcatcatctgccgcgtgtacctgcgcgaaggcctgcccggcatgatccgcggcgcggccatcaccatcgtgaacctgttcgcgctctccgccatggcgggctgcgtgggcggcggcggcttgggagattatgccatccgctacggtttccagcgctaccagaccgacgcgaccatcgtcaccgtgattattcttcttgtgctgatcacgattgtgcaatccattggcaatctgctcacgcgcaagatgcaataatagattccactcaaggaggccattgttatgaaaaagattctcgcctgggttctcgccctttccctgctgctgtgcggcgcggcgttcgctgaagaggcggaggaagtgcatgtaaaagtcggcgtcgtgggcgaaaacaacgagcagtgggagcaggtgatcatccccacgctggccgaagaaggcatcatcatcgaactggtgaagttcagcgactacatcatccccaaccaggcgctggcgcagggcgaaattgacatgaacgccttccagcactacgaattcatgaacaactggaacgaggagaacagcgcggcctacggcgtcaccctggtgggcctgtgcgatacgctgatcgccccgctgtgcatctattccgataagatcacctcgctggacgagctgaaggaaggcgaccagatcgccatcatgaacgacgtggtgaacgaggcgcgcgcgctgcgcatgctggccagcaccggcctgatcacactctcggaaaatgctactgggctggccaccgtggcggacatcgtggaaaacccgctgggcctggagttcgtggagatggaggctgccctcacccccacggccatgaaggatccggccatcgccatcgctttcctgaacggcacccacgccaaggacgcaggcctcaccaacgaccaggctctgctggtggaagaattcgattttgacgacgagagcatgcacggcatcgtgaacaacatcgccgtgcgcgccgatgacatcgacaatccggtctaccagcgcatcgcggaagtctatcagtccgatgaagtgcgcgccctgttcgataccgtgtacgcgggcgtgtatctcccggcctgggaagcggcggacgaagccacggacgaggcgaccgaagctgcggatgaagcggcggacgaagccgaaaccgaggagcccgcggcggaataacgcattcctttcgcacttctaaaaaatggccccggccccagggtgatcaacctggcggccggggccatttctgtagtccattctcaattgtaatagtaagcgggggttcccgtgtagggcgtggtggacgggcccatcagggcttccaccactttttcatccgcaatgcccaggctggcggtggaaaccgaaacgtccaccagagcgtggtccagttgcaggcgcttcaccgcctcataggtcaggcggttgtaaatcccgctggtcgtcaccttgttcgaaaggtagttcaggctgatcaggcgctgctgcagcagggagatgatatcgtaatccgaccaatcgcccgccagcatggcgcgcacgcagcccagcatggtgtttttctgcgcgtcggtgaggaaggagggcgcggaagatacgccgctggcgaacagcgcggcctgcgtgttcgcccccaggattccatccacgctcaagccgttttcatattggaaatcgcggatggcctgtgcggtcaaatcgtcgagcgtgccggtgagcgcgtccgggcgcaaatagcccagcgaggaaagctggagctgcgcgctgaggatgcgttcgtcggtttccccggcgaagtggtcggtgtagccctcgtactgcggcgcgtattccgaatagagctggcgttgcaattccgccgtggccacgcccgtttcgctcacgcccagttgccgctggaagcgcttcaccgccgccacggtatcgctattgtaattgctcgaggcgctggccgaggtgtaatagagttcgcgcaggcgcgcgttgagctttttcaccatcgtgccggaatcgccgtcgcgcagttcgatataggtgttgcaggtgggcgcggcgctggaatacaggtgcgtgagcatggcttcgtcggccacgccggtttcccggaacccgttttgcgcctggtacgccttcaccgcgtcttccgtgcgcgcgccaaagatgccgtccgccgcgtcggccagatactgcttatcgcgcaggcgctgctgcatcttgcgcacgttggtaccccggtcgccgttttccagcgtatcgtacaggttgagcgcgggaatcgaagtggtgaaaattttcttctggaattccacgctggccacgccgtcttcctgcatgcccagatcgccctgcaagagctccacggcttcttcggtgagcgggccataaatcccgtccgcctcgtccaccagatacttcaaatcgatcagcctctgttgcaagcgcatcaccgccgccccttcgtcgccccgggatagctgggtatactcttccgcgctggcgggcgttgcgggcggcgcggccgtttcttccaccgccaccgccgtcacaaacaggcgcacgcccatctcttcatcatataccagcacattgcccgccgcgtatgccagcgaaggccgcgccaaatcgtatgccgccagggaggcgacttgctcctgctgcttggtggccacggtgtacgatttcagcacgccatcctgcccaatccaatacatcacgccgtcatgggccagcatgcgctccgaggaaatcgccaaaaacgggccctgttccatggccatgcgcaaaatgggatcgtattggtagagcatgtagacgctttcctgctgcgtcacgtaatagagcatatccgcggcttcgtcataggccagggcaaccgcctgctgcgccagaagcctcacatcgctttcgcccgcgtggcggacgagcaacatgccatccgggctttcgaggatttcaaagccatcgccgcacagcgtatacgtcatgccctgctccgtttccggcacgctgagcatgccgatgcccggaagatagagcgaatcggttccgccggcagtcaccaccaggccttcctgcgaagcctgcaagcgctccaccgccacatccaccgaatgccccgccagcgtagtgggaaccgcctggatttgcgtgggctgcgcctccgtcacatagaacacgccattttccccgggctgaaaaaccgcaaacagcacgttttccgccacgacggtcgcttccggcgcgctcacatccatttgcatcagcgtgtacgtaggcgtgccatcggccagcgcttccccgagcaacagataatacgctatgttgccgctggcccccagcacctgcgtggccagcgcggtttccagcggcgctacggcgccgtccaaggtcagttggttgttttccccaatgtatacctcgcccgcgtccgtttgcgccgccatatccgcgcacgcgccgttgaccaacatcatacccgcgcacaacagcgcccaaaattttcttcgcatatttttcgcccctttcctaagcgtagctaccctttagacgcggcgcgccgcacccatgttccagttttgggcaaaaaatccttcctccctccgcgtaaaattggcgcaaaccgcggcttatatggcccatttgccgctggaagtttgcccgttcgccgcgcaacctgttgccaagcccggcaaaatgtgttacactaatatccatgaaggaggtcgaattatgccaagcgatattgaaattgcccatagcgtaacgccgcgccccattgcggaaatcgccgccaaattggatataaacgaatctgcactggagctctacggcccatataaagccaaaattgcccagcctgccggcccggcgcgcggcaagctgatcctggtcacggccatcacgcccacgagcgcgggcgagggcaagaccaccacgtccatcggcctggcggacgccatggcccgcctaggcatgcgcgtttgcctggcgctgcgcgaaccgtcgctcgggccggtgttcggcatcaagggcggcgccgcgggcggcggctgggcgcaggtgattcccatggaggacatcaacctgcatttcaccggggatctgcacgccattggcgcggccaacaacctgctcgccgcgctggtcgacaaccacatcgcgcagggcaacgcgcttggcatcgacccccgccgcatcacctggcggcgttgcctggatatcaacgaccggcaactgcgcaacatcgtctccggcctgggcggcacggcgaacggcatgccgcgtgaagacgggttcgacatcaccgtggccagcgaaatcatggccgcgctgtgcctgagcctgaacctggctgacctcaaggcgcgcctggcgcgcatcgtggtgggatacaattttgcccaagaacccatcacggcgggtgatttgcgcgcgcagggcgcgctgtgcgccctgctgaaggacgccatcaagcccaacctggtgcaaaccctggaaggcacgcccgcgctgatccacggcggcccctttgccaacatcgcgcacggctgcaacagcctgatcgccaccaaaatggcgctttcgctcgccgattatgtggtgacggaggcgggcttcggcgcggatctgggcgcggaaaaattcctggatatcaagtgcccggcgggcgatctcgcgccaaacgcctgcgtgatcgtggccagcgtgcgcgcgctcaagcaccatggcgagggcgatctggccgcgggtctgcccaatctgctccgccacatcgaaaacatcgccaaatacggcgtgcccgccgtggtggccatcaaccgtttcccggacgacgcgccggaggaactcgcgctcattgaggaaaaatgccgcgaagcgggtgtgcgggccattctcagcgaagtgtgggccaagggcggcgcgggcggcgcgcaactcgcgcagcacgtggccagcttgtgcgccgcacccagccattacgcgcccctgtatacgcccgacttgccgctgcgcaaaaagatcgaaaccatcgtgcgcgaaatctaccggggcgacggcgtggacttcgcgccaaacgccctcaagcagctacgccggctagaaaagctgggcttcggcgctttgcccgtgtgcctggcaaaaacgcaatactccttttccgacgacgccaaaaaactcggcgcgcccaccggcttccgcataaccgtgcgctccatcaagctttgcgcgggcgcgggattcgtggtggcgctcaccggcgatatcatgaccatgcccggcctgccgaaagttcccgccgccgaatccatcgatgtggatgaaaacggcgtgatcagcggcttgttctaaaaaaccctcgcggagccactggcaaaaaagtggctccgcgctttttagagagaggaaaagaaaaacagagaaccctgtgccaaaatagcgttgcaaggctacccaacacaacaggaggttctctgcaatgagaaatataacgtaagagctgacgtttcgtcaacggatgatgaaatacttacagcaccacggagcgagcgaaacggcccatcggttccacgtatgccggaaaaccgtctggaaataccaaaaacattgggatggaacgtccataagccttttagccttccagcgccagattcagcccttcttccagggctgcttgcagctccgcgcgcaattcttctggaacctcgggcaatgcggcggcgttttcccgcataacggctacggcggcgatgatgcgctggcgcacctccgcaggcctccggcggatgccaaacagcgccatggagatttgcgcgttgtgccgcaaaaacaaatcgatatactgcgccgccatggcggttaagtattcccggcggaaagcggcggcatccggcactttggccagcgcggccagatagggtgcattgtgcaaaagcaagcgcagcatctccgcgcgttgttcccgtttgtattcccggggctgaaacaggcaatccagcggccaggagggaatgcgggaaaaatccggcttgccgcctttttcgcccagacgaccgaggaaggccaactgtttccaggcttccaggcaattttcatccgcttccagcgcctgccggtaaagcgcgcgcttgcgggcatagtccgtttcccgctccgcgcggcgcaaaatttcttctgccgcgctttgcccctcttccgctgggaactccgccccacaaaattggcaaaaccgcgccgcttcccgtgcataccgcccgcgcttcccgcaatgggcgcaaactttttccaccatggcccaccttccatccatcagcccgcggcgcgggcggcttcctgccgggcgatgcggatcttctgcacgcgccggttttccacttccgttaccatgatgcggaacccttcgcaagtgaattcatcgcccacttctgccagcttgcccaacgcttcgttcacccagccgctcaccgtagccgaatcgctttcttcgtggatatcataatgcgcgaacagcttgcttaggcccatgctgccgctcacttcgcacgcgccgccgggcaagggtcggaactcttccacgatttcatcgtgctcatcccaaatttcgcccaccagttcttccacaatgtcctccagggaaacgaggccgctcacgccgccgtattcatccgtcaccacggccaagtgcaagcggttttcctgcaaatatttcagcagggcggaaatcttcatcgccggcgaaacaaacggaatggttttcaaatagcgctctatggtgaataccgcgcggttggcgaagaagtctttttcataaatcacgcccacaatatcgtcgatgtgctcgtggtatacgggcaggcgggaaaatcccgtttcccggaacacgcgggcgatttcctcgcaagtggcggtatcctccaccgccgcaatgtccacgcgcggcgtgaggatatccgaaacctccagatcgccaaagccaatggccgaatgaagcaactcgctttcgctcgcgttcaggccgccatctttcttcgcccggtctaccaggatgcgcaactccgtttccagcgtgcccgcatcctcggccattttcatttccaccggttctcccgcctgcgacggccgctgcacgcgcgctatcagcgcgttgagcgggcgaaaacacgccaccatcagattcgcaggccgcaaaaagcgcacggccagcgtttccgcgcgcccgcgcacccaaatttctggcagcataacgccaaaaagcagcgccatcaccgccatcaccacggccgccaccagcacgccaaggccccccagccatcccgcgaacaggaacaccgccagggctaccgcgcctatattcacaatgttgtatcccatccgaagcgaagaaatgagcgcgctcctgcgctccacgagcgcgagcacgcgcgcggcctgcgcatccccctcatccgccatagccttcaggcgaagcggattcagccgggaaaacgccgcgtccatcacagaaaagcaggcggaaaccgccacaagcaccagcaccgctgccgcaatccataagctactatcgccgtccatacggaccatccacactctctttcctggaattttactttagtatagcggatgcctccccacttgtcaaggggaaaatcgcaaaggattgccagaccgccagcatgccttcgatttaccgccattctgaaactggcaaactttttcggcaacctgcgcaaatcgcattgacaaattgccttccctatgatactgtatgtatatgcgtgaacaacggcgttttgttgggtatcatgcgctgtactaagcggcgttttttgttttgccaggaagcgcgagaggagggtttttatggcaggctttaccatccgccccatgggcgaccgggcgctggtggcggaattcggcgcgtccatcgatgaggcgaccaaccgccgggtacacgcgctcgccgcgtggatcggcgcgcgccgcgtgcccggcatcgtcgaactggcgcccacctaccgctccttgctggtttgttacgatccggccgtcatttcctttgcgcggctcaagcgacggctggagcggttccatccggatgtggtggccgcaaccgccgcgcggcggcgcatcctcaaggtgccctgttgctatggcggcgcgttcggcccggaccttgccggcatggaagaaatcacggggctgtccgcgcaggaaatcgtgcgcatccattccgcggtcgattaccgcatctatatgctcggcttcctgccagggtttccctacctcggcgggctggataagcgcatcgaagcgtcgcgcctgcccagcccgcgcaaggcgattcccgcgggttcggtgggcatcggcggcaaccaaaccggcgtgtatcccatggaatcgcccggcggctggcggctcattgggcgaacgccgcttcctttctatgatcccgcggcggcgcggccggttctgtgccaagcgggggaattcatccgctttgtgcccatttccgccgaagaattcgcggatatccagcgccgcgttgccgaaggcggttatctgcctcagtacattgaggaagaaggaggcgaagacgcatgccgctgaccatcctctcccccgggcccttgactaccgtacaggatgagggccggtttggccacctgcacgcgggcattgggcgctccggcgccatggacgcgcgggcgtaccgggcggccaacgcgctggtgggaaacgcgcggggcgaagcggtgctggaagccacgctgatgggccccaccgtccgctttgaacaggcgtgctccattgccctgaccggcgcggacatgagcgcccgtctggatggtcagcccattccgcgctatgcctgcgtacccgtgcgagcggggcaggtgctggaaatgggctttgccgctgcgggcgtgcgcgggtatctggcggtgcggggcggcattgacgtgccgctggcgctgggcagccgttccaccaatctcaagtgccaactgggcggctggcagggccgccgcctggccgcgggggacgtattgcccattggcgctcaaaccccttgccagcctccggccgcacccatggagccgccggaataccccgcatcaatcaccgtgcgcgcggtggcgggcccgcaggcggaaatgttcccgcccgaaagcctggccgccttcttctcccaggcgtttaccatttctcccgatagcgaccgcatgggcatccgcctgcaaggggaaccgctcgcttccctggcggggacggacatcgtgtccgatggcatcgtctttggcgccgtgcaggtgccgggcaacggtttgcccatcgtgctgatggcggatcaccagaccaccggcggctatgccaagatcgccaccgtcgtcgcggacgacttgccgttgctcgcgcaggcgcggcccggcacggcggtgcgcttttccccggtgcgcgtggaggaaatccaagccgccgctcaaaccaaccttttgcgcaaatggaaggaggcgctgctctatgccattcgccgctgatacgcccgcccaggtgcggctgaaaattcgccagggccagatccagggccccacagccggcctgtgtccgggctatgcccaggccaacctggtggttttgccccaggcgctggcctatgattttctgctctttgcccagcgcaatccgcgcgcgtgcccgctgctggaggtgagcgacacgggttcccgcctgttaacggatatcgcgcccggcgcggacatcgccacagacctgcccaaataccgcgtttacgagcacggcgcgatggtgtgcgaacgcaccgacgtatcttcgctctggcgggacgatctggtgagcttcctcatcggttgcagcttctcttttgaagcggacttgctggaggccggaattcccgtgcggcacatcgaagaggggcgcaacgtgcccatgtacatcaccaacattccctgcgcgcccgccggggcgttccatgggaacatggtggtgagcatgcgccccatgtcctatagcgacgccatccgcagcattcagatcaccggcgccatgccccgggtgcacggcgcgcccgtacactttggcgatcctgcggtcatcggcatacgcgacatcgaccggccggattttggcgacgcggtgaccatccgccccggcgaaattccggtgttctggccctgcggcgtaacaccgcaagcggcgctgatgcaatcgaagcccgcgtttgccatcacgcacgcgcccggccatatgctgattacggacgtgaaaaacatctgcctgaaatactgataggaggcggccaccatgctcaaaattgatttgaattgcgatctgggcgagagtttcggccattacaccctggggatggatgaagagattctcccctacatttcctccgccaacgtggcctgcggctttcacgccgccgatcccatggtgatggccgcaaccgtggcccgcgcggcggaaatgggggttgccatcggcgcgcatccaggatatccggatctggtggggttcggacgcagaaacatgagcgtctccccggcggaggccaaagccatggtgcaataccagattggcgcgcttatggccttttgccaggcgcgcggagtgcgcatgcagcacgtaaaaccccacggcgcgatgtacaacatggcaggcaaggacgcggctctggcgcgggccatttgcgagggcattcgggaaatcgatccccatctcattttgctgggtctttccggcagcgagttgatccgcgccgcccaggcggtgggcttgccctatgcctgtgaagtgttcgcggaccgcgcctatgaggacgacggttccctggtggcgcggagcaagcctggcgctatgatcgcggatgaagaagaagccattcgccgggtgatcggcatggtgagcgaaggaaaagtcacttccatcacaggcaaagagatccccgtgcaggcggattccgtgtgcctgcatggggatggcccgcgagcgttggcgtttgcccgccggatcagcaccgcgctgaaagaccgcggcatcgccattgttcccctggcgagcggaatcgcctgagcggaggaaacgcgtatggagagcgttgaagacatcatcctgcggcattcgcgccgcggcatggaccggctgcgccccctgctggctgcggatttttgccacgccgcggccagggccattttcgcctgtccccaaggaaatgtgttcttgaccaccggtttttgcgtgaagggctttgcggaaacggatgggcccgcgggcacctgggccatcgcgcgggcgctgcgcttgctgggctataccccgatcatcgtcacggacgccctttgccagggctatttcgaacccgaaggtttccccgtgctctacctgccgctggacgcggacgaagcgctgtacgaatccctgctggaccagtaccgccctgtgctgttcctagcgctggaacgttgcggcatcaatgcggaaggcgactaccagaatatgtccggcgccagcatacgggcatataccgcgccagtggatcagatgttcgcccgcgcgcaggggcgcatgctcaccattggcgtgggcgatggcggcaacgaaattggcatgggcaatctagcggcggccatttccgctacgctcgacctggttccctgccgcgtgggcgcagatcatctcgtgatcgccacggtatccaactggggcggatatggccttgccgcctgcctggggcaattgagcgggcgggatttgctgccgtccttcgcggaagtatacgcgtttctccagcgcacggtggcgctgggcagcgtggatggcgtcacctgccaatgccagcccacggaagacggccacgatatcgccaccacgcgcgaaatcctcgaggcgctttcccgggcgcagtaatcgcgatttttccatgattttttggggctgcctcattcaaagaggcagccccaaaaagtttttcaatctcccagatattccccaatggcgtcgatggcgccccactgcgattgcgcggcagcctgctctgccagcgcggtcagcgtggtctcatccagatattcataaaagccatccagcaccgtccaattcccttgctccgccaggcgcagggcgagttttgccagatcatcgccctgcagggattcgacgatgtcttccagtccgtccgccatgccgcaatcgagcatccggttggccatatccgcgacgcccgccgcgtccatatattccgcccattcgcatggggcaatctgccgtcccaggccgcggtcaaacgccgcacgcatggcatggcgcgtttcctccggcgacagagcttccagcagcgcggaaacgtctatctgggaaattttgcccgcgtccagcgccttttcccacagggagagagcgatttccccgggaatctcctcaaaatcccattcggcgagcaaaacatcgctgcgcgcaatcgcctccaaaaggcgctctcgctcctcgcccgccgtttcggccaacaggcccgccatcatgtccatatgctccgcggcccaggaatcgtttccttcttccagcgctttgcgcaagacgccacgcatcaccgcccgtttgccgcccccagcctttttctccccagcgggagaaggcggcgcggacggcgcgggctcctgtttctccccaaagctcagctgcagcaccaggcgatccacggttttgcgatcgagaaacggcgcgagtttttgcaccatgtcccaatccacctggccatccgccttttgaatcagcttttccagcgagtctttgcccaaaaacggcgcgagtttttgcaccaccgcataatccacatgccccgccaggcacatatcgcacaacgcgtccagcgtttcccggcccaagaatggcgccagcgcgcaaacggcgtcccaatccacccgctctttcgtacaccactggcgcacgagctgatccagcgcgcccttgctcataaagggcgcgagtttcttgagccgcgcgaagttcacatcttccgtgggcttgccgcgccgcacagcatgcaccactgccttgccggcgttttctagcgcgtccgaagccgcgttcatggcttcgtcaatcatcggccccaatccttccagcgcgcgcgccacgcgcgtgccaacgctctcctccccattttgcgcggaggaattcgcctgcccggcggattgctcttcttcctgcgccgcttgctccgtctcctcctgcgcatccatctcaggttccatttcttctgcctctgcggcctccgcgtcctgctcctcggcctgcggctccaccggttggacaggttctgcttcctcaaaagcatttccctgtgcgggcgcgttccggccgccaaacgcatccaaaatccgcttgcggatggatggtcgatcttcctccccggcttcgcccgtcaaaatctgttccatggtcacgccaaaaagcttgctcatggaatagaacgtctgcatatccggcaaagccgcgcccgtttcccacttggataccgcctggtgcgaaacattcagcgccgccgccaaaccctgctgtgtcatccccttggccacgcgcagccgggcgatgcaccggcccaccgtgcgattgtctatcataaaattcatctccttatcccatttggatgggtacagtataccacattcaactttcatttgcaagcaactattggttgaattcaaccgcaaaaaaaaacatgccagaccgccacaaaagcgatccggcatgcgctataggcgaaatctccaccccaaaggcgcgtttagtgttcctttacctgctcagcttgctgcaccagggcgcttacgctttccaccgtttcatttgcgcgcagcctgcgggcaaacagcaggaagcggccattgtcctgatagtaactgcacgtgaccagcgtaaggagttcatcctcgtaatttacatcgatcgggatatcgaacatggagcgctcgcgcacctcggcgatatagctatcaaaatccgcctgcgtatcaaaatcgtaccgctccacattgaaatacgagctatcgtccgtattcatagaagcgttgaaagcagcataaatcacatacgtgccgtcttcataaatcgtgtcgaactcgacaatgggatgttcctttagattgctttccttgcgcatatcgtccagcgaaccaaagatggtcttgtccttctgattgtgcccatggatgacaatctgctgggagcgcggccacaggctgcagcgcgcgtccataaacgccgcgccggccacatcctcttccatcaaaaagttgtgcgtaagataatattcgttatcgcggctgtagggcaccggctcgctcaccgatacgcccgacgtgagatagcccacaaaatcggggttggcgtagtaatattcattggtcataaatttctgctgcagcgccggcggattgcccgcgtatttggcctcgcgcgaagtggcgggagcggccgtggccggcgtcgactgcgtggaatcagcgggcgccgtagtggaaccggattcaaagaaagaaccgaacgaaccctctccctgcgaattctgctccgcctggccgccttgctccgcctgctgggtctgctcctccgtattgttcgtgccgaagaaatccgagaacaaatcgctgccctcttccgccgcggcatacaccggggcaaatcccttgtaacccaaattgtccgcggcgccaaacatcgtacccaccaccgcggcgcacagaacggcgcttcccacgcgcagcaacgcgcgcttgcggttccccgcctcgctctttgcattctttgcagcatcgttgcgattgtatttcatcctgaaatcctccaaaattctcttattgcgtgtcgcaccactctttggacggcaactatttcctttttgttccaatcgcaagagtatttcgcgccaaatttctttcaacccttcatccaacatcccagtccgccttgcgagtgcaacatcggttcaaagtatagcaaaatatttgtgccaaatcaataccaaattcgtaaaaaatggatccgcccatcaatcccttccaaacaaatctcgggtgtacaccttttcccgcacgtcctccaaatccgcgccaaagcgattggcaatgatgcaatcgctctccgccttgaagcgcgccaggtcgtttaccacgttgctgccaaaaaacgtagccccatcttccagcgtgggttcataaacgatcacccgcgcgcctttggccttgatgcgtttcatcacgccctgcacgctgctgtgcctaaaattgtcgctgccggttttcatcgtgagccggtatacgccaatggtcaccgttcgctctttccgcgcgtcgtaatcgccgctggcttcgtaataccctgccatgcgcaaaacgcggtcggcaataaaatctttgcgcgtacggttggcctccacgatggcatgaaccaaattttccggcacatcccgataattggccaaaagctgcttggtatccttgggcaggcaatatccgccatagccaaaggaaggattgttataatgcgtgccaatgcgcggatccaagcacacgccctcgataatgcggcgcgcatccagtcccttgagttccgcataggtatccagctcattgaaaaagctcacccgcaacgccagataggtgttggcaaacagctttaccgcttcggcttcggtgtaccccataatcaaggtatccacttctttttttcgagcgccctcgcgcaaaaggccggcgaattcccgcgctttctccacgaggcgcgcatcctccatgtccgtgcccacaatgatccggctgggatacaaattgtcgtacagcgcgcggctctcgcgcaaaaattccgggctgaacaacaaattgcgcacgcccatctgcgcgcggatgtgctgggaaaatcccacgggaaccgtggatttgatcaccagcatggcctccgggttcgcctccatggccaggccaatcacgttctccacggctgaagtatcaaaatagtttctctgcggatcataattcgtaggcgcggcgatcaccacagaatccgccgcgcgataagccgcgcgcgcatccaacgtagcgcgcaaacgcagcttgccggaggcgagcagttcctcgatttcccgatcctggatgggcgaacggcccgcgttgattttttccactttttccggcagaacatccacggccaccacatcgcagtgctgcgcaagcagtaccgcaagagagaggccgacatagcccattccggcgacggcaattttcattggtttccctcccccacccggtaaaactccttgtaccagcgcgcaaaccggcgcaatcccacgcgcaagctggtggcgggccggaaaccaaaatcgcgctccagcgcgctggtatccgcatatgtcaccggcacatcgcccggctgcatgggcgccaaccgcatatgcgcggcaaaatcgtagtcctccggcaacacgcctgcgcgcatcaattcctgctgcaaagtctccacaaaatcctttaggttttccggatggctgttcccgatgttgtacagacggtagggcggtatgggcaagccatcctcccccgtttgtttctccggcgcgcaggccatcacgcgctttacgccttccacaatatcgtcgatatacgtaaaatcgcgctcgcaatggccataattgaaaatttgaatggtttcaccccgcaaaagctgattggtgaagccaaaatacgccatatccggccgccccgccgggccatacaccgtgaaaaagcgcaggcccgtgctgggaatgttatacagcttggcataggcatgcgccatcaattcgttgctcttcttggtggccgcgtacaggctcacgggctgatccaccttgtcgtccgtgctgtagggcaccttggcgttggcgccatacaccgaagaggaagaggcgtacaccaagtgttccaccggatgctggcggcacgcttccaggatgcgataaaaccctaccaaattgctttccacatacgcatccgggttggtgatcgaatagcgcacgcccgcctgcgccgccaagttgacgacgatgccaaagccatgccgtgcaaagagcgcctcgagcagcgccgcatccgcaatgttgccccgcacgaattcccagcggctaccgggcttttgcgccgcgagcgcttcaatctgccgcaagcggtgttccttgagcgccacatcgtaataatcattcatgctgtccacgcccacaatccgcacgttgtcaacgcttcttaaaagttccatcgccaaaaagctgccaataaaacctgcggcccccgtaatgagaatgggcttcgcgcaaaagtccacgtttggcgtccgcataaaagtcccttcctttcctgatcgttgacaaacctctggtttgccaacgagtctgcccgcccgcttgtcttcgcaccgctctcgccttacggcggcgcggtgttccgtggctgtgcactgcgcttcgctccgtgtgctcgccacttcagcccttcgggcctccgacggccagcgttcggggcgggaatgcatttttacgtttcgcaccgccctgcgcttcgcttgcgcgg

SEQ ID NO: 3778 - DNA, 27032 bp, Unknown
  16S sequences of unknown bacteria
ggcggtttaaaaccgcccggcttttcgttgaaaaaacaagggcgaaaatttgactcccgcgatataaatccccccatagccgaaacgcttttacttcgggaatccgtaacgctatcccgatgaatcgggaaaactctatcgaagaaggcaaagagggagaaacaaaaagacgttacaattaaagacaaaatcgagaaagagaaaagttgtttttttaagcaagtggggaataagcgtcgtacaatgagttgtatcccgtcgcgccgggaaagagcggcgttcgctctatgaaagatgtaagggcgagtgcggactcgatagaaagtataaaaaacagcgaggtaaaaagaaaaggctttttcgggcgcgggaaacttacttgtaagagcgcgatgaagagcctgaggcactgtcctttaaagtttatataaaagttccgatttagcgggaaagcgttgatgccgagcgagggaaattctttaagtttcctctttttgtgaggaaagaaaaggtttatagggcatttaaaagcgaaaaaagcgcggcgatcggcgcaggcggcggattgacttgcgagcgcatttatgatataattaaaaaaagcaattttcgcggcgcggacaaaaggggcgggaacaaaaatgagcgagtatagcgaactgataaaaaattacgcaaagatacgcgactatatccgcgatttttacatatacggttttcgttcccgcgacgattacagcggcaaaagcaatcggagctacgacaacgaaaagcgcagaatagaaagttatttgggcgatattctgtatttccgtcaggaagaagacggaaaaaaggtattcctgacggcggacagcgcggagcttttgtccaatcccttctataaatcttttaagacaaagagcttcaccaaaaacgatatttccctgcattttgcgattctctatgtgctgaaaaagcacggcgcgctgacgctcaaagagatgttgggacgcattttaaaagaagtcctggattttttcgagggcgacgagatatgggacgaagcgacgcttcgcaataagctgaaagagtatctcgcgctgggtatcttaaagtcggaaaaagtcaaggggaaattatatttttccctttcggaaacgcctgatctcgacggtttgttcgacgcgataaactttttttccgaaaatttcccgctcggagtggtcggcagctttcttctcgatcgtttcgaggaaaagaaccgcatttttacttccaaacataaatatcttctggaagccgtggacagcgaggttatctgtgcgctgctttcggcgattagagaacaaaaaaaggtggtattgacttcttacggctatcggcggggaaagaaacaaagggaagtcctgcctttgaaggtcgcgctgacgacgcagagcggaagaaattatctgatgtgttacgagttttccgcaaagcgctttttatcctgtcggatagacagtatcgaaaatgtgcgggtatcggaaaccccgtatgcgtctttccgggataaaaaacaggcgttagaggaaagactgaaaaagacatggggcgtttatgtggattcgtctgaaaagcccgaatggctcaaagtttacatttccgtccgcgaaggcgaggactatatcgtgcacaggctgcaaaaagaaaagcgaacgggcgttttggaaaaggcgggggaaaatctgtactgtctgagcttggaaacgtacgatctcgaagaaatccgaccgtggctgagaacttttatcggcagaatagaaaagctggaatgttctcaaaagagttatgttcggcgattttttgccgatatagaggaaatgaaaaagctttacggaggcgagaaactatgattttttccgaaatttacggtctgtattttcgtaccatggaaaaattgatagcggaggcgtcgtcggggacgctcgacagggaatctttttgtaggatcgtcagggaaaccgccttttcggagagcgaattgtttatcgaatccgcaataaaaagcggagaatggaaagtaatcgacgaaagctataacacgccttacgaattttcgccccgtatgcccttgaccgaaacggaaaaacgctggataaaaaccgtcagcctcgataaaaagtttaagttgtttatcgacgaggttccgtcctggctggaagaaacagagcctctgttttcgcccgacgacattctttatcccgatcgtttttcaggcggcgacgattacgagtcggaggactatcggaaaatttttaaaacgatcttgaaagctctgaaagaggacagaaagctccatatcgcctataagtcgggaaaaggatattttcacgaaggggactttgttccccggcgtctggaatattccccgaaagaagataaatttcgcctctatacgggcaatatctttaaaaacaacatcctcaacctcggaaggatcgtaaaatgctgtccgggggatcccttccgaagagaaagccttttgcctctgaaaataaagaaactggaagtgcgatttgaattgacaaacgaaagaaactgtttggaacgagcgctcattcatttttcatcctttgaaaaggaaacggtgagattggagagaaagaagtttctggtgacgctccgatacaatgaaaacgacgagtcggaaatcttgatcaggctgctgcaattcggtcagtttgtcaaagtcgtcgcgcccgagtatatggtcaatttaatcaaggagagaattttcaatcaaaaaagttgctgaacgggtaagttcgcagcttttttttcatgactttttttcgcttacggaataaaatggtatcataaaccgattgagaaaaaacgaagacagcgaggtgaaagtatgttagagataaagggaaaattcaacgcggcaaaagtatttacgaataacttggagccggaggcggaggagcagatcaaggcgatctgcgacatggaatttttgtcggacgtaaaaatcagaatcatgcccgacgttcacgcgggggcgggctgcaccatcggcaccaccatgacgattgaaaaatccgtcattcccaatcttgtcggcgtggatatcggctgcggcatggaagtggtaaggctggaagagaaggcgctggatcttccccggctggacgaggtcatcagggcaaatatccccgcgggcaaagaggtgcacgagggcaggctcgtgcggttccctcaattgcaggagctttgcgcctatcgcgagcttaaagacaccaagagaatagagcgttccatcggtacgctgggcggcggcaatcactttatcgaggcggataaagacggggagggcaatctctatatcgtcatccactcgggcagccgcaatctcggcaagcagatcgccgagcattatcagaaattggcgatcgatctggccaagggcaaggaagagctttttgcagagcgggagagaattatccgcgagtataaagaacagggcaggaggacggagattcaggcggcacttaaacagatagagaaagagtatcgggaaaaggtccccgatattcccgaggatctggcgtatttgcagggaaagtatttcgatatgtatatccacgatatgcgtatttgtcaggagtttgcgacgttgaatcgcaagacgatgatggccattctcttggataaaatgggattgcacgccgcggaacagttcacgacgatccataattatatcgacatggatacgatgattttgcgcaaaggcgccgtttcgtcgaaaaaaggcgagaaactgatcgttcccatgaatatgcgcgacgggagcctcatttgtataggaaaggggaatcccgactggaattattccgctccgcacggggcggggcgcgtgatgtcgcgcagcgccgcccgcgcgcgattggcgatgtcggagtatgaaaaatctatggaggggatctatacgacgagcgtcaacgaaaacaccatcgacgaggctcccgcggtctataagcctatggaggagatcctcgcaaacatcggggataccgtggaagtgtccgcagtcatcaaacccctctacaattttaaggcgagcgactaaaaaaaggcgcgagcgaaaaaggcaaccttcggggcgccttttttttacgcaaagaaatccgacggcttattttaccgcgaatataggaggacgcaggcgattttatttcaggaggaacgacttttgcgcaaagatcccgagcgtttggatatagagaagacgattgattttttctgcaataaagcgtttttaacgcaggaacgcattgtttttttctgctgcttcgcaggcgttgcggtattttgtttttgcgggatcgcaaataaaaagaaagcgattttttcgtatttccgcaatcgtttctctgttgattagatgccgttaaaattttatttgcaaggctataagcgattgtattaaaggggggcgactacaacgccgccgcttgcggcttgatttgagaggaagaaaaaagcgaaaaaagcggaaatcccttttcgattttacttctacgacataaataaaaaacagaatcggtctatttcgccgcggggtgttgacaattttttcgagatgacttataataataaaaatagaaaaaagagcggaaaatggaaaagagggaaaaaataaattttaaaatacaggcgtatttggcgctcattccctatttgggatttttgatagtcatgttgacgagtttttataatatatataaagtaaaaaatcggctgtggacggctatctattatcttctcgttttgcctcccgctcttttcttttcgggaataggcatccttgcggtaaaattttttattctcggaaaatcccctcaaacgatggcgattgcctattcggtgctatttttctttttaacgctctgtattgctttttgctgtcttggaatcgaaattgcgctgataaaaagattgcggcggaaggaaaatgaaaaatacctttcctgaaacgggacgcaagggactgtttttcgcggaaagttcttttttagacaatatttcggccgtttggcggaaattatacttttttgtaaaattttcaaaaaaacttcgttctctccgttgacaaacgcgtgcgtattttgtataataacggcggactacaaaaaggggaaacacattgacggaaaaatcaaagggacattcccttaaaaagaataaaggggaaatcgtgcgcatcacgattatcgtcctgttatgcgcggcgatggcggtcttggattttctccccgtcacctatacgaaaaacgaggtgaataatcgcctgctgtctaatacggttcccctgatgatcggttccgtagccgtcgtgtggctgatgatccgcgggaaaacaaagcttttcggcaaaccgacgaaactgttgtttttaattccctgccttttgatcgccgtggacaattttccctttcacgcctattttgcgggtaagggagagatcctccatacgggattggataattggctgctcttcgcgctgtactgtgcgtgcgtgggaattttcgaggaatttgtctttcgcggcattctcttcccgttgatggcgggctgctttacgcccgataaaaagggatttttaaagactttctttttctcctccatcgtgttcggaggaatgcacatctttaatattttcgtcggcggaggcatcggtcctacgcttttgcaggtctgctattccacgctgatcggcggattgtgcgcgtttgctctcgtcaagacaaaaaacattcttttgtgcgcattcgtgcacggattatacgatttctgcggtatgctgctctccgaaagccccggactcggcggcggcgtgccttacgattggcagaccgtgatcatcatggcagtcatagggattgcggtggggcttttcgtactgtactttgtttggaaatatcccgaaagcgagcgtaaagagctgtatgacaaactcggcttcggcgtccgcgcggaccctgcggcttccgcggacgtaacggcgggcggcgatgcatcccgtgtgaaatcggattcggaaaaagtttcgcccgaaaacggcgataaaaataaataaaataaaaaacggcaagcgagtctaatcatggaaagaaaagacaaggagcctcccgcggaaaagccgcgaagcgagactaagtcggagaaggaaaccgaacggctggaaagggagcgtctgaaaaagatcaacaagctccccgattacgaatctctgttcagagaggaaggcggctcaaagaagcacgggggatttttaaaaaagatcttccgcagagattgggggaagctcgtttattcctctctggtttacatactcaaagcttctcccgtctggatcatgcctctcgtcacaggcgacgtcatcgacatgatcaccgttcgccccgaagggtatctcttccgcattctcatggacgcggtgattttcgccgtcatggtggcgcagaacgtaccgacgcatatgtggtattccgccattacgaacaagatgatacgaaacacgacggcgggaatcaagagcagcgttatcagaaagctccaagggctatccatcacttatcacaaggagatggagggcggcaaaattcagtcgaagttcctgcgcgatatcgacagcgtggatatgtactaccgaaacgtcgttcaggtggtcatccccaatatcatcggcgcggtgatttcggtggggatttccctctataagagccgctgggtgactttgttttttatcgccatcattccgctcaatatcgccaatgcgatgatctttcgtaaaaaaatgcgttcgacgaattccgccttccgcatggaaaacgaaaagatgtcgtccaaattgacgacgatgctgcaaatgctgacgctcaccaaatctcacggtctggaaacggtggaaacggtggaaatgcagaagcgcatcgattcggtgacgcaggcgggactgaaattggataaaaccaatgcctatttcggctcgctcacgtgggtcatcagcaatcttttgagcggtctttgcctgttcttttgcgtattcctcgccataaaggacgtcatttctcccgggtcggtggtgctctttcaatccctgttcggctcgataaacggctccgtgctgacgctcatcaacgcctatcccgctttgatgtcgggcaaggaggctgtcagctccctttcggagatcatgcgcgccgaggatatggaaagcacgggcgggggcagagtgctccccgccatcgaaggccgggtggatttcgagaacgtttcctatcgctatcccgacggcgaaaaggacgtcatcaaggattttacgatccatgtgaaaatgggcgaatgtatcgccgtggtcggctcttccgggtcgggcaagagtacgattatcaatcttctcatcgggcttttggagcctaccgaggggatgatcctcatcgacggcgttccgctcaacgagatgtcccgtcagacctatcgccattttatttccgtcgtgccgcagaacagcattctctttgcgggcaccattcgggaaaatatcacctacggcttggattcttacagcgaagaggaattccaaaaagcggtggaggatgcggacatccccgaattcctgccctcgctccccgacggcatcgacacgcaggtgggcgaacacggcgacaagctttcgggcggacaaaagcagcgaatctgcatcgcgcgcgccctcatccgtaacccgcgcctcctcattatggacgaagcgacatccgcgctcgacaacgtggcggaatatcacgtgcaaaaagcggtcaatcggctcgtcaaagcgcgcacgacgtttatcgtcgcgcatagactgtccaccatacgcaacgcggatcgaatcgtcgtcatggaaaacggcaaagcggtggagataggaacgtacgatcagctgatgatgctcaacggcagattcagcgaattggaaaggctgagccgcatcagagaggagagcgtttccgaaaattgaggtttataggttgatgcggcgcctcgcggaaggaatttcccggggcgacgcatgataacttgacgggcgacgcggatcgttaaaaaaacggcgcgttttgcgagaaatagagagcggacgccaaaagaaagggcacgtggttttgaggttttatcaaactttttggaaggtgttttccctttttttcctcgcaaaaaaggggaaagaacatagatccctcgccgcgagaacagcgcagagtatctcgtcttcatagggtttacctatgcgtataacgcgcagctataatcgccgcgcccatagcgctgtctattcatgtccttacagggattgtgcagactacgccttaaacgcgcggttaagacggtggggcatggtttttgcctacggcgcaacacaaatgcgtgtgctccctgatgtgccctcaacggcttttccgtcgtcttttttctttgccaaatcatacggatattaacgctcttcttgatgcctcatttctgcccgttctttttcacggctttttatttgtgttcgccgattcactccttactcagttatgcggctatcgcgcgattttttgaataaaattgtttgtaatgattccgctttataatacaaaacaggcttttaaaaagcctgttttttacttggaaaaatcggaaagggaagagcgtttattttacgatcatgacgatcgcctgcggataatctccgaaatttttaccgaagagattgatgccgcccttgtgttcggcgtcctctttgatgccgatgtctagctttatcgcactcccttcgtacagcttcaaatcgtcgaattttacgcggtcgtgcatgaagatattatcgacgtacacgccgttttcgttcacggtgattttctttaaaatgccgaattgcgtactggtgatgggccaatattcgggcgtatattttccccgtctgccgccgaaatcgccgggagaggtgaatgtgaccacttcgatgccgtttaccgaaatggtgatatcggagggccatttattgttgtaatagatggtttccgaacagatctcgaaagaaaaggagatctcgcggcatttatggtgtttcaacggctgagaaggaaaattgtaactgatgaagccggtatcgaaccacaggcattccgcctggcttctcgcgggggaaaaaaagacgcccggattgtcgaaagattctattttttcttcctttcccaccatgccgcagggcgcgttgatgtgacagtgcgaaaacataccgatgggcatttccacggaatattcctgtctggaattttccgaacttctctccgccaccagcgacaccgtataacttaaaatcgcctgcgagcagaatttggtgtgccctttgagtccgggctgataattgatgaaaatcagccctgccgccgccagaacgtcgatgtggcgcgcgacgctggatacgggcatatccaactcctgcgagatggcggaaaggctcttggagctgtttaaaaggctgcgcagaattttgattcgttcgggcacggagagagcatggcttagcttggcgatcatttcgtggtcgttttcgctgtcgatattgaggacgaagttttttttcgggtttagtatatcgctcatacttttctcctttacagaacgagtggcgcttttcgtgtacgttttgccaggcgggaaacgatgttttgcgcgcgatttaaaaatgggggcgcttccgctctgccgcgaaaacgcccgtcttttcaaaatacaacggacaaagtcttacgagtacccgtcagggcgccggataaagcgcaaaaagccgtataaaaaaggcgggaaaacgtaaaaacttatttttttcattatagtacggggggggggtaatgtcaactgattttcagtattatttccgaaaagtggaaaatataaaagccgaaacagtccgaaatcggaaagcttcctgctattgacaaacggaaaatgtgtgttaaaataaaaacgcagatgagaaatacgggaggatgcccgaggtaggtatcgggcaaataaaaagtgctatatgctgagaacagaacatccgaatccgcaattcaagagaaagtcttacgagtgtttaaacggcgcctggggatttgaaacgggaaagggcgaaggaaagaagaacgcggagctgtcgtccgtcattcaggttcccttttgtcccgaatccgccctttcgggaatcggaaatacggattttatcacagactgcgtctatacgaggctgatagacgtttctccttccgacttggaaggacggctggcggtgcacttcaatgcggtggatcataccgccgaggtgtatctgaacggggaaaaagcgggcgtccacgagggcggctatacgccttttgaatgcgacctcgcgccctttgcccgcgtcgggaaaaaccgccttaccgtctgcgttcacgacgacgtgcgggaaaacgtgcccagcggcaaacaatcgaaaagacgggagtcgttcgggtgtttctatacgcggacgacgggaatctggcagacggtctggctggaacgcacgccgaaaaagtatatccgttcggtgcgctttttccccaaccccgacagcggaagcgtcagggtggaaacgacggtggaagggggcggagagatgaaaatccgcattctttacgaaggcagggaagtggggcgcgcctgcggggaaatttattaccgccacatttttgacgttccgctctccgagatccatttgtgggaagcgggaaagggaaggctttacgacgtcgaatttacatacggcgaagacgaggtggaaagctatttcggacttcggagcgcaaaattcgagggcagaaagtttctgctcaacggcaaaagcgtctttcagcgtttggtgctcgatcaaggctattatccgcaaggcgtgtatacggctccgagcgcggcggcattggaaaaggatattcgtctgtccctcgcgctcggcttcaacggcgcgcggctgcatcaaaaactattcgagccgctgtttttatactattgcgacaaaatgggctacatggtctggggcgaatatggcagctgggggatcgaatacgaagatttggaagcgctcgggcagtttacttccgaatggacggaagcggtgcagcgggatttcaatcatccttccgtcgtcgtatggtgccccctgaacgaagtttgggaaaacctcgaagactccaaaaaaattcgggacgtgcggtttgtggaagcgatctataaactgacgaaaacgcttgaccccacacgcccctgcgtggatacgagcggcggctatcacggcagatataccgatcttttcgattttcactgttatcacgaacccgaaaggctcgcggagcatcttcgcgccatcgaagagcgggacgtattgacgatggataagacgtacgcgccgcccgccgcgcaggaggagattccctatgacggtctgctgcccataaacgccagcgaatacgggggcgtcgcctacggggtaaacgggaacggctgggggtatcggacgggaagctcggaagaggaattcgtggacgggtacgtgaaattgacagaactgctcctccgttgcggaaaactcagcggattctgctatacgcagctttacgacgtcgaacaggaacagaacggactgtatacctttgaccgcgagccgaagctgagcgagagcgccatgaaaagaattgcggcgtgcaacgggcagacggcggaaatcgagaaggaaaagacaaaagaaagctcggacagagaagcctggaaggataagcgggaagtccgggaaaatatattttgacagtaaggaggcagagaatgaaaaatacgatcaagaaattgatggctttggcgctggcggcgcttatatgctgtcccatggcggcttgcggggaccctgacgacgaaaacggggcaaacgagaagatcgatcctcaccgcacacagctgtatgtctacaacttttacggcggttacggctccgattggctttccgccgccaagctccgttacgaagaactgcataaggacgacatttacgaggacggcaaaaaggggatacaaatttatatcaataatcaaaagaccgctatcatggggcttagcggacagatcctcgacaaccgcgacgaggtgtatttcaccgaatacgcttattattacacgttaaaaaacgagggcgttctcggggacatttccgaagccgtgacgaagccgttggaagagtacggggaatcgcgcagcatcaaggacaaaatgagccgggatcagcaggcgtattacggagtcggagagggggacgaggcaaaatactatgcggtgccccattatgcggggtacagcggactcatttacaatatcgatctgttcgaagaggaggggtattattttgcaaagaccccctcggacaatacccgtgagggcagattcatcgataaattcaacacggtgcgcagcgcggggcctgacggggagttcggaacgagcgacgacggtctgcccgccacctacgaggaattcttcgtcctgtgcgactttatcgccgacaacggtcagactcccatcatctggaacggcgccaattataaggactatctcaacaatctcacgcaggcgctcatcgccgactacgagggcttggatcagatgatgctcaattatacgctgaacgggacggcgacttccctctccaaaatttcggggggcaatctggtggcggacgaagcgcccaccgccgtcaaggaaacggacgcctggcagctggcgaggcaggcggggaaatattacgggcttagttttctcgaaaaactcgtgacgacggacggctatcataataaactcgcctttaacggcggctattctcacatgaacgcgcaggaggatttcctttacgcgggctacgacggaaagaccaaacccgcggcgatgctttgcgacggttgctggtgggaaatggaggcaaaggacaccttcaccgcgatggaggcgtcaaagggagaaaaattcagcaaatacgaacggaatttcggctttatgccccttcccaaagcgactgccgaaaaggcggcggaaaacgtttcgaaagaaaagaagaacactctttatgacgagatctattcgatctgctttatgaaggcaaacgtagcggattggaaaaagccgctggcgctcgatttcattcgcttcgtcaacagcgacgaatccctgcgggaatttacgtccgtcaccaacacggtgaaagcgctcgattacaccatgagcaaagaggagaaagaaaaactcactcccttcggaaaatcgttgatggaacttaaagaaaagtcggacgtcgtctatccgtattccaccaattcggtatacgcaaacaatcaggcgtttttcgggacgcacgaatctttccgctccaccgtttccaccaattatcagtggcccgccgaggcgctgcacgaaaacggaatcaccgccgcacagtactttgcgggaatggaaacttattatcgcaacaattgggcttctctgcttaaataaggaacaagggtgaaagatggaacgttcgaagaaaaaacgcgggcttaacggaaactccaaagaggatttgatcttttacgctttttttatggcgtttcccgtcctgcaattcagtattttctatctcggtgtcaacttcaattccttattattgaccttcgagaaatacgacgtgatgacgaacgcgacgacgtgggtcggctttcgcaacctcaaagacgccttcgtgaaaatgacgtcttcccccgatttagtgcgggctgcggggacttctttcctcgcttactttatcgggcttctgatcggcacgccgctggcgcttctgttctcgtattatatctataaaaagatgcccgcgtcgggtttttttcgggtgcttctgtttatgcccagcatcatctccgccatcgtcatggtcacgatttttcagttctttgtcgaacgggctattcccgaaatcgccgccaagttctttcacgcggaaatacaggggctgatcgaaaataaggcgacgcgctttgccaccgtcatgttttataacatctgggtgagcttcggcgtttccatcctcatgtattcggacgcgatgagcggcatttcccccgaactcgtggaagccgcgcgtctggaaggggtggtgggactgaaagagtttcgctacataacctttcccttgatttatcccacgttttccactttttttgtggtgggagtggcgggaatattcacaaatcagctgaatttatacagctttttcggcgcaagcgcttccgaatcggtcatcacttacggctattggctgtacgtgaggacgcaaagcgcggcgtccaaagcggaatatcccgagcttgcggcaatcggcgtctggctcaccgtcgtcgccgtgccgatgactctgctcgttaaaaaactactggaacgcttgggaccttcggcggaatagggggacaaagatgaaaaaagaaaaaacgcttcgcgcttccgcgacgaaacccagattttcgcccgttacgatagcccttctcgtctttctcgttctctactccgtttccctcgcggtgccccttctctgggcgttgatgacctcttttaaaaatcaggcggactttcgcctcaacgtcatcggattgcccgaaaaatgggtgtggaactactcgttcgtgtttgaaaaattcgtcgtgcgcgttccgacggcggacgggacggtggcgatcggaatggggaggatgtttctcaattcctttttatacgcgcttggctgcgcctttgccgggacgctcgttccctgcgtcacctcttatctctgcgcgagatttccctataagttcagcaaggtgatctattatatcgtcatcgtgacgatgattctgcccatcgtgggaaacctgccttcggagatactcgtcgcaaaatttttcggattgttcgaccatatctggggcttatggattatgaaggcgaactttctgggaatgtattttctcgtattttataacgtgttcaaagcggctcccaaggaattcaccgaggctgcgaagatagacggcgcgggaaatctttccattcttcttcgcattatgctcccgcttgcccgcaacaccttttttaccgtcatgctcatcaattttataggtttttggaacgattatcaaataccgcttatctatctgccccattctcccaccgtagctctcgggatgctgcatatggcgtccacgacggaaaacagtttgagcaccgttcccatgcgcatgacgggcgccatgctgatgctgctgcccattctcgtcgtgtttctcgcctttcaaaaaagactgatcggaaatcttgccatcggcggcatcaagggatagcggaaaacggcgatcggcggacagagcggcgccgctttgcggaagccgaatcgcagggaaaagaagcgacttttttgcagtaacaaccaattatgcttgcggacgtcgtccgcacgggaaaaacggagctccgtttttcggaaaacataccaaaaagggaaggtaaaaatgatcaagagaaacaaacttatctgcgcgtttgccgcgatcggggggacggcggtattgtccgcggggattttttccgcgccgacgcccgcttccgccgcggaatggaacgacatcgctttgcaggcggagtattcttacggggagaaactcaacgtccccgcgcggacgctctccgcgggcggacagacggcaaaagcgtcttccgtcctctcgtatcccgacggctcttcgacgctgaaaacggaaacgacgctggatatgacgggcgtctatacgctcgcctatacggcggagatcggcggcagaatctataagacggaggaaagtttccgcgtttacgacgacatggcgcgggtgggggaaggctcgtgcgtatcgtacgggcggcacccgctctcttcgcgcgacgggctttcggtgagccttgcgcagggggacaccctccgcttttcgccgctcatcgatttaaacgcttccacaaaagacgatccgatcgtggagatgttcgtgacgccgaaaaagcagggaacgctcgattttgaaaagatcgttttcacgctgacggatgcggagaatcccgactgtttcttaaaaatttccgggcggcagtcctcggacggcatccgctatccgtatacgtattttctcgccggaggcaacggtcagcccatggaggggtgggagcagagccacaataaactgcacgtcgacaacgaatggggctcgcccgccgaacacagcttttacggatattaccccgaaagaccctccgcctcgctcgacgaaacgcgtatcagcatacgctacgacgcagaaacccgttctgtctatgcgggcaataatttcgtcatcgatctcgacagctccaaatattacaccaagctttgggacggctttacgagcggcaaggtgcgtctgtccgtatccgcggacgtatattccgctgccaccgcggattttgtcgtcacgtatgtgaaagacgtggatctcgccgcggaaaaactggtggattccgccgcgcccgaaatctctttaaatatgccctatgaaacggcgcccgttgccaaggtcggtctgacttaccccgttcccgccgcgtccgcgaaggacgaatattcgggcgattgcgaggtggaagtgggcgtttggtatgacttttcttccgaaaacgcgcttaccgtgcccatcgaagacgggaagttcaaggcggaacgcgaagggaaatacgccgtcgtctataagagctgcgacaggcagggaaacgaggcgaagcgaatcgtatgggtggacgcgaaaaaggacgttcccgccgtttcgctcgacgtgcccgaagccggcagagtgacggaagcctccgccggggaatttgtgcccctggccgaagcgaccgcgacaggcggaagcggcgatgtgaaaatttatgtcagggcgatcttcgacagcgaagagatcttcgtggaaaaagagggattccgtccgcaggaagcgggcacgtatactatcgaatattccgcggtcgattatatcggacagacggcgaaaaaaagttatacgctgaccgtgaaaaacggcaacgtgccgatctttgccgaggcccccgttttgcccctttactatatctcgggcagcgagtatgcggcacccaaagtatacgcctacgactattcctcgggaacgccggaaaaggtcgaagcgaagctcaccgttacggacgccaacggcacccgcgaggcaggggaacgcttcacgcccgccgtgcttaaaagcggcgacgaggtgacgctcgttttccgcgcggggaaagcggaactcgtgaagaagatcaaggcgatccgcccgtatgaagcggacggggagagaatgcgccttaaactcgaaaactatctcgtgtccgacgatgcttcctacgccaagtacgacgactgcatccgagtgtcggcaggctcggcggacacttcctggacgtttgcgcacgaacttctcgcggaaggattttccatggagcttcgttcccttcccgataaagcgtttttcgacggattgaaaatcgtgctcgcggacagcggggatccgtccgtgtcgataacgatagaacttctctatacggggaaaaagacgcaggcgagaatcggcgggacgacgatggatctcgaatcgagctttcatgtctccgcggcgaataagaatttcgagatcggctacggagcgggaagagtaaagataggaacggcgtctattgccgttgcggaaaacggctttacagattttccttccggctttgcctatctttccgtcgcgtttacgggcgcgagggaaggagcggcttacgagattacgaacatcaacgatcagcccgtttccaatacttcgacggacaggatcaagcctaaaatcgtcctcttcggaagctatggcggcacagcggcggtcggctcgcccgtcacggtgccgaaaggacttgcgggggatgtgctcgatcccgaggtgactttctctgtcagcgtcacggatcccgccgggaaagctgtcacttcttcggacggcatccttttggagaacgtcagtcccgacagggaatatgtctttacggcggaagaatacgggcagtatcagatcaattatacggcggaagatacgttcaacgccaagccgtatacgttcggatacgccgttacggtggaggacagagagccgcccgcagtggaattcaagagcgaatttcccgccgagatcaggaaaggggaagtcatcgtcattcccgatttcacggtttccgacaatgtgacggcgacggaaaatctcgtcgtcaacaaatacattctgacttcgggcggagttctcgttcctttgtcttctgattccaattctttccggccgacgaaagagggcgtttatcagatccgcatcgtcgttacggacgaggcggggaatgtgactctaatacgcagaaacgttacggtgacggcataaggagaaagaaaaatgaaattgaaaaaaatattttctgtggggatcgccgctttgttgctctgcgcgtctttcgccgcctgttcgacgaaaaaagacgaggacaaggcgccgacgcccgtagggactgtgaccgaatcggaggaacataaagtgacgacgggacttcataaaatcaacgtttccgcgacggataaggactttatcgccaagggcaaaacggaatatacgctcgtgattccttccgacgccgacacgcgcacgagaaaggcgtccgcactcgtccgttcccatttggctacggcgacaggcgtttccttggaagtaaaagaggacgaaaaactctcttattcttcggacaaaaaatggatcgtactgggaagcgacaaattgttcgacggggcggggctgtccatgcctaaggacgacatcgggcagacgggatattatatcgtttcaaaggacaacagcatattcatcgccgttgagtcgacgttcggcatcatcaacggcgcgctcgaatttcttaaacatacgataggatatgaaatgtacgccgacgatacggtggtatacaccgcgggcgaagtcgtcaaaatgcccgctttcgacgtcgtggataaacccgattttgaatttttcgtaccgagcaaccgcatttccgtggacggcgcgacgggaatgaggtttatgggaacgggggatatctttgttcccgtcgagggacaactttggcataactcctttaactatctcgatccgaacgactatcccgatcatcccgaatggtttgcgacggatagatcgcagctttgctatacggcgcgcggcaacgcggagtattacgacgccatgctgggcgagttcatgaagagcatgataaaggcggtgaacgccgtcaccgacgtaaagaacatcaccatcaccattcaggacacctcgacggcgtgtacctgcgaagcgtgcacggcggaaaggaacaaatacggcacggacgccgccgcggtaatcaaattctgtaattccgtttccgagcgtttagaaagctatttcgaggcggaagccgaaaagaacggcggcgagccgagagaattgaacatactctttttcgcctataacaaaacgacgaagccgcccgtcaaaaaggcgaacggggagttcgtgcccatcgacgacagcgtagtgtgcagggacaacgtgggcgtatatatcgctcccatcacggcggcttacaacgcctccttctattcggaaacgaacgctacgaccgcggacgtcatcaagggctgggggacgctttccgacaagctgtatatgtggctgtacgaaacgaattattcccactatctctatccgctcaacacctacgacacgatgatagaaacctaccgtttctgcaaagaaaacaacgccgtattcatgatgaacgagggacagtacaatcaaggaaacgtcacttgtttcggcaagctgaaagagtatttcaattccaaggcgatgtgggacgtaaacgtcgattattccaaagtttgcgacgactttttctcgggctatttccgcgacgccgccgagccgatgcgcgcttatttcgacgagttgcaggcgcaccttaaatatctggaagaggcgtatcccgcggaaataaacggaaatatctataacaatatcgcgcagatccgtttttggcccaagcgcacgctcgaccattgggcggactatatcgaggaggcgtattccgcgattgaaaaatataaggcgtccgatcccgcactttacgaaacgctgaaaaaacatatcaagctggaaagcatctttatccgttatgcgcaggtgagtctgcacctcggctcctattccgcggatatgctgcaagaaatgcgccgctcttttaaggaggactgcgccgagctttccatcacaatgctcagcgaggcaaaatcgctggattccgttttttccggctgggatttatgaggcagaaaatcaggggaactttaaaatgattaaaataattggaaaggagatagaatgatgagaaaaacaaaagtatgggcatggctcacaatgctctgtatgttttttgtcatggcagtggcggtcgcgtgtacgaatggaaacaaagacgattcctcttcttctgccgccgcggaaatcacgcttgacaaaacgactttggaacttgacctgcacgaatcgatgcagcttacggcgacgaaaaagaacacggaggcggagattgtctggacgagttcggcgccctccgtcgccacggtcgagaacgggctggtcaagtctgtaaagaaaggcacggccacggtgacggcgtctgcgggcggcgcgtccgcggaatgcgccgttacggttatcgattcgcagacggcgcccgtccttaaaatcgaatatgacaaaatcgcggtcgataaggacggggaactcaccgtccatgcgcaaattctctataaaggcaatcccgtgacggaaaacataacttacgcctgggcgttttccgagggcgcggcggaaaatatcgtttcgctgacgcctgcggcggataccgcttccgcgctcgtcaaaggactcgcctacggagaaacgagctttgaagtttccgcgctcgtctggggcgttccgctgatgcaaaaggtggacgtgaaggtatgcaatacggatatcacctttgaggtgaagggcgtcgagcccgacgaaggcgggtatctcgcggaagtggcgctccttgaagtcggggaccacgtgacgagcgttgctcccgcggtgacggtgaaagaaaagggcgtggaaaaagcggacgcgaagctcgattggacttcggaaaacgcggaaatcgccagcgtttccgaacagggcgtcatcgcggcggtcggcgaaggagaaacgatcgttcgcggtacctatcagaacaacgtagtcaaaataagcgtaaaggtctatcgtcccgaaacgaacgcggcgaaaagagtggaaatagaaacttcaggcgatggaagctttatcgcggactcggaaattgtcggacggataaacaaagtgcttctcgcgggtgaaaatatatgcaacggctttgacgtcgacacccgcaaagtgacgctggataagagcaaacttccctccgctgccgccgatatgggcgaaacggagatgacgatagaaacggaaaaggcgatttataatgtcgacgctgcggtgtacacaaaagtcatccgcaccgccgaggatctcgacgaaatgggtgcgctttccaaagcggctgaaagtgccgcgaatctttggggcggttacttcgtactcggcaacgacatcgaatacaataaagaattcatttccttcatcaattacggcgtcctggaaggaaacagcggcaaaatctgggaaggcgaaatttggaacgacggcagagcaaacggctttaaaggcgtattcgacggcagaggatatgtcatcaaaggtttccacttggcggcgcgtgcgggcggcggattattcggaattatccatacggacggcgtggtaaagaacgtggctttcagcaatgccgttcacgacggttggagcggatttatcgccagcggaggaaacggaagaatcgagaacgtatatatttcctgcgatgtgcagtccggcggaaacaacatagataagagcggcttcttctattcgcaggattgtatgggagcggcgcgggtagtgaactgctttgtggaaatcaaaaaaattgcggagaacgcggagagtacctcttgggcgatcggcagcgcgcacgagggatacgggattttgcaaaatgtgtacgccgtcggcaataccaaagcggtgaacgtcatttctacgggcgacggcgagcgcaatgtgtacggcgcttatgccgattacagggagcttgtggctgcaggtgtggatttcagcggttgggaaggtgatttctggcaggtggtgaacggacttccttatccgaaaggactcgatctgcccgaagtgatcattgaagctcccgaaagcggaaatatcggctataatgcagaaattttgtttgagttaactccgtatgtgctcgttcaattggacgacgccgcaaaatcggtgggaattacgatggaggggaataagctttgtatccccgacgacgaaagcatcgcgggaaccagatttacggtcacgttcgtatctgttttcgacgatacggatttaaagacgactacttacacgatcgtttccagcaagacgataaacgtcgaaggtatgctggacgtagagatgacaaacgactcggaaactttcctcgtcgatctctctcaatatgccgattcccttgaaggaagcatcaaaagcgtcaaattgggcaccgaatctttcgttttcagcggaacgcccgcggcagtcacgctttccaaagctactttcggacgcgcgctcggagaacagtctgtcgtcatgactttggagcttgaaaaagacggagttgtcgcaaaactcacgacaatcaactttaaggtgtgcgtcgtcacaaaaataatcaatacggcggaagatctcgacggaatgggcgcgctttccaaagcggctgaaagcgccgcgaatctttggggcgggtattttgtgctcggtaaagatatcgaatacaataaggaatttacgtcctttatcaactgggaaacgttaaacgaagtcgccgtaggcggttggacgaacggaagagataacggcttcaaaggaactttcgacggacgcgggcacatcatcaaaggttttaaaaccgtaggcgccgcaggcggaatgttcggcgtcattcatcaggcgggcgtcgtaaagaacgtatcgtttgtagacgctacgcacgtcggttggggtggatttatctcgacgggcggcgacggactcatcgaaaacgtatatatttcctgtaactcacaaggtggcggcggcgacaacgataaaagtggattcttctatgccaacgattgtatggcagaagccagagtaatcaattgtttcgtcgatatcaaggctatggagcagggcgcggtagaagcctggggcatcggcagcgcccatgaaggatatgggattctcaaaaacgtctattccgtgggaaatcctaacggcgtgagagtgctctccacaggcgacggcacactgaatgtggcgacaggctatgccacacgtgcggatatgaagaccgcgggaattgcgattacggcggagaacgggtgggatatgacgttctggacgacggatgcagacggattgcctctcccgcgtgccttggccgcgtaatgaatgtaaagaggggttattgaaataaataaccaattaaaacaaaagaagctaattaaagacgggtcaaaacgcaagattttgacctgtcttttgtataacggaaaatagaaaaggattcctttttaaaatacgcaatcgttacggttccgcgtgaggaaaatgattaatcaaagaggccaaaggtagtgtttgcgaagaggcagatagcaacacgcagtattgtcgaactgagatttaagtaaatggtcgaaacattcggcgttatttcgtgtttatgtagaaattaaagtttggggacagataaaaacgatattaaagggaataaaaataagtatagttgctaaaaaattaaaaagataaaaaggaaccgattggcgagccaaaagttgactttcggtataattttcagcgcaggaaaagaaagcatagttgcaccctgataaaaggcgggactaagcctgaaaacgtaaaacggatcgcttactggcggacttatttcattggcttattaaaattcacgaatcctgcgaagcatacctgttattttaggaaagtttaaacagcacttttaggacaaagacgcattgatcgccttataatagatatttagcggagctttcttccatattcgcaaagcattggactgccgaaaaaattaccgatccccgttattcggcggcttcactattatattcgttgaaaatagcatggtaatttagatattatgtcaaacacagtaattatgactgacatagcacataaaaaacgggtatttatgtctgtcatagttattatgtgtgacataatacaaataaaaacaaggggtttatgtcagacataattatggacgagcgagagaaaacgggaaaggtaaatttttaaagcgggatactctataagtaaatacaggaatgtggacgacaataggacttaaaaatgccgagattttaaacgtccgcagaagtgtttatgcgattccctatttctcttctcaatttttacaagttgacaaagggaaaaatcttgacaaagagcctgaattgtaataaaatatagaagttgtacatttttaaagtaaactgacgataaaaaaatcgagaaaacgagtgcgtgacgaaagaaaaactgaaaagaggggaaaaactctttaagggataaaataaaatggattttctattgactgtgacatcggtgggaattttgcttttatatgcaattccgggattcctcttatccaagacaaaagccgtaacgacgagttcgctgcccgctttttccaaggtcttgatgtacgtgtgccaaccttgccttactctgtacactttcgactgcgtcgatttttcctggccgctgtttaaagatatgctgtggtttcttttggcgatcaccttagtacagttggcgatgatggggactttctatttactttttcgcaaaaaacaacaggatgtcaaatatcgcatatataccgtcgccagcacattcggcaattgtgcgttctttggagttcccattttagaggctcttttgccggggacaaatgccgtggtattttctaatatgtattttgtttccatgagtctgttgggatggacggtggcatccgccgttattacccatgacaggaaatatatttccgttaaaaaaatcctctttaatcccgccgttatcatcatggctgtggctctgcctctgtttatgctcaatataaagcttccgggacagctttacggcgctgtttccattgtcggaaaaatgaccacgccgctttgtatgatcatcatggggatacgattgggaagcatgaatttcaagaaaatttttgcgggaaagctgcaatacataattattcttgtcaaacaaatgatttttccgcttttggctctcggcgtcgcctatcttcttccctgggatgcgtatatcagacaggcgatgtttattatggcgtgttgtcctgtggcgagcgtggtactcaattttgcggaacttttaggcgaagggcaggaggaagccgccaatatgcttttgctgggtactatgctgtgtatcgtcacaatgcccgttatgctcttgatcctttgatagcggaaaggcggatagaaagtaaattgttattatgtcagacataatatatatgtctgacataatatgcgaaaacccttttgcgacaaggacttgcgcgtttaatccaatgctattttatgtctaacatagtataaaagacctttattaaaaaaggaaatatcgatttttgtggtgttgttgcccgctatgtaagcagaagaaagagggcttttgaatttagtaagagtggtacgaattcataggagcaaatgagaataagtcggtgctttgaggacaaaatattatatcgtttatttataaaaatcattaaatttaatttatgcaaaatccgttgctttaaaagggcgtaacgtataatgtatattgacagccgcggattggagagtcttaaaaaattaaaatctgttttttagcgcaaaagctgcctatttttgattgatagaataaataagtttcaaacgcagggtatattgagcgcgtagttttacaagtcctttaagagaatgagatgagaagtgttcttcgggcagggggaaatcggggagcgcttaattgaaaggaggcggaaaaatttgtttctatatactcgcccgttataacgaagcaataagggcgaggattaaatttttataggctttgaattgtctattccgcgcccatattacattttcattgataacgttttcgcttcttttctctcacctgctttgcgggtattatttttttaagaataaaaagtcctttgccactgttgcaaggggacttttttgtatagggaaacctcgcgatggtcggggaaaagaaggctgcctctataattttcgcataacagaactctgtttcatataaaaatgagatccgataacccaaaataaaaaatcaaaaggagaggacgttgaaaagtgagtgataatataaggtaagtgatatataaaattgagaaagggagaacggaagaagccgcagatagaagtatccgagagtgtgttttaggcgtaatatgcaaatggcaggtcttaatttttacgtagaggcggctggcagcacaagccttagcctgtatatgaatccccc

SEQ ID NO: 3779 - DNA, 19311 bp, Unknown
  16S sequences of unknown bacteria
taaagatcacctgatagccggcctgacgaagaagtgtgcccagatgctcggccactgtatagttgatctcgctttccacaaggcccatttctttattcacggtgccgctctccgagccgccgtggcccgggtccaccatcaccacgatatcgctccgatccaccgttgtgtcaggcgggggcaccggtgtggtgtccagaggggcgcactcaatgagcacccggcgctgggcgtcgtcatactgcacactgaaatccagggcatctcccagatcccgcagtttaaaatatgtatagccatcaatgttataggctgtcatctgcgcccggaccccgtcgatataaaccgcggcctggctgctcacggcctgcttgatggtatcgctgccctgcggggggctcagctcggtacccagagaagtatatctctggcctgtgctgatgtagatggaattggtatcgttgttgtattggatctcaaaggacttgtccccgccgctgagggcctgggccacatcccgcaatttgaaatagttgttgtcattgatgttataggcttccacaccaatggcttcgtcataaaccaacaccggcatgttgttcagctgcgctttctgtgccgcggccagccccacacaccccagcagagtgaaaagcaaagcagccaacagaaaaccgcctaagattcttcctctttttcccatggtctcctccaaaaaaaatcaggcacggcttcccatgccaggcgcgaagatgatggctgcggtctcattccccgccgcagcattttatcaatcagcgttattgcaccattaccgtgatgcaccggcgaaatggtatgttgaccatgtttttcctcggccccttgggagcagaaaagatggccgcaaaaatccgtacaataatcgctttgcggccattataacatcttttaccccctttcgtctaccgcaaaaccaattattttttggaaaaacgccttttttcccaagtaaaagttgatttttctttttttacaaataaaaattttggttattttgacaaataatttacagtagtaatgcatcgaaaaaaggggtatgataagaataagatatacattattgtatcgcttttttctcggaccgcggaaaggtctccctccctagctttccgctatggtccacatttctccctgcccgctcctttgcggggcgggcgcttttcccaaaaaaggtccggagccttacggccccggacctgagcgtgtcgaaaaagtggcttaggccactttttcgagtttttgcaaggggctgtatgcacgcctttggcgcacacttgccccttgagaagtgcaaaaagccacgcacaggtcgcggctttttgcggattgataggggtagggcggacgacccttttcgttatataggtttttcgacagtctgaggtccggagccttacggccccggaccttttttataggtatcccgttggttatgccttgtgcaaagtgaactcgggacgcatgcttcccacttcttcctgcttgtggttgcgcattttgggcgtgtgggtgtcggcaaattccgccagatcttcctgggagatgatccccagctgacggagcacttccaccaccacagcattgcgggcctggccattgccgctgtcgattttcacagcaatgccgatgccttcctttctatctcccacaatgtaatagccatcggctcccgatttacagaagagacgatcgtatttttccataagctgagcgtcaatccggccggtgcccgacatgataaggggatattttcccatggccgccgtaatgcgggccgcttccgctcccatcttttctcccaggctctctggatgagccatgcgggccacaccataggcaaactgccgcaagggcagagcgtgtaccggtacaccgcagccatcggtacccataatgatcttctgaggatcgtactcgcagatctccccgatcatatgaaggatgcgctgctgcaccggatgctccggtttataataggtatccagatcctctcccatcgcggcggccgtgaccagcatgcccgaatgtttgccgctgcagttgcaatggatctggctgggctgttctccggctgccttcatccggtcggcttccggctcatacaagggataatggacgccgcactggagcacgctctctgtcaacccggccttgcccaaagcccggcgcaccgcctggatgtgcataggctctccgttgtgggaggcgcagaacaaagcgatgtcctggtcgtccagaccgtatttttccacagcgccgctttccagcacgcacatggcctgcatgggcttggccgaagaacgggcataacagactctctccggatcgccgcaggaataaagcagcttaccggtataatccaccacagcgatatggccggtgtgcatcatatcctgcaacggcccacgataggtattcaccaaaacttccacaataatccctcacttctgcaagaatcccggcactgtttcaccggatagttgcagtatagcaccccgtctcttttttgccaaggcttcaccccagaaaacggcggaggagcttttcttttttcggtgtgtaggggtgatagcgcagtgggttttccacctttccccgggacagcacactgcgataatgggtaaaggtgtcaaaactcttctggccatggtacgcacccatgccgctttcccccactcccccaaagggcagatggctgctggccaggtggaccagggtgtcattgatgcagccgccgccaaattgcagccggtccatcacctgccgtgccgtctttcggctgcgggtgaacaaatagagagccaacggatggggacgctctgccacaaaatccaaggcctgggaaaaagtatcgtattccaccaccggcagaatgggcccgaagatttcctcctgcatcaccggcgactgctctgtcactcctgtaaggatggtaggctcaatccgcagcgtccgctcatctccccgccctccggtctctatccgggccccttccagcagtcccatcaaccggcgatagtgctttccattgacaatgcgggggtattccggattgttcagcggtgtgggccccaactgcatcagcagctgctttttcatttcttccaccagcgccggaacctttcctttcggtgccagcacataatcaggagccacacaggtctggccgcagttgaccaatttgccgaaaacgatccgccgggccgtcaaagaaagatcggcatcctccgccacgatacaggggctttttcctcccagttccagcgtcaccggcgtcagatgctgggcggccttctccagcaccaattttcccacttgggtgccgccggtaaaaaagatgtagtcaaaacgctgttccagcagcgcctggttttccgcccggcctccggtgatcacctgcacatggccttcctcaaacacttctgccaacagtgccgccagtgtttccgctgttttgggcgcataggccgatggcttgagcaccacgcaattccctgccgccaccgctcccaccagcggccccagactgagcagcaccggataattccagggcgccatcaccagcaccacaccataaggatgaggccagcgcaaacttttggctggtgcctgggtcataggggtgggcacccgctttaccgccatattctgcttcaggtgctttttctgccaacgaagctcttcccgcacctggcccagctcggtcatataggcctccatagacgctttgcccagatcttccgccagagcctgttccaaccggctgccccatctcttcagtccctgctccagcttctccagacttttccttcgggcctcaaagctctgggttcgtccttccccataataccggcgcatccctcccaaaatttctgcgtaattcatttcttcctccttagtgaatttttctatacttatagtatatcatatcactttctaaacaaatagaaagaaatatcttcattttttgtgccaatgcggcaatttcaccaaaagctgtctcccattcttggcaagtgccacgaagttttcaccttctcttgattttaccccatggagagtccataataaaacccggaagcaaattttctaccgattggagtgtcaatgatgagttatcaagtatctgccaacatccaggaaacactggacaagctgctggccctgccccaggtgcagaaagccctggaattcgcccagcaggatgccgaccagaccctggaaaatcagattgaactgtgcaaaatcgaagctcctactttccatgaggaaaagaaggcggcccgttatgctgagatgtataaagaactgggccttgagaatgtacatattgaccgccacggcaatgtggaaggtctgcgccccggcaagggcggcggcaaaaaagtgctgatggaaggacatatggacaccgttttccccatcggcaccaatccccagccccgcaaggaaggcacccgggtttatgctcctggcatcgtggatgacacccgtggcatggtagtgcctctgtctgtgatccgggccctggacgccgccggcatccagaccaagggtgatctggtgttcgtgggcactgtggaagaagagggcatcggctccttcggcggcatgctcaaatggctggatgacaaccaggtggacgccagcatcagcattgatggccccagcgctgaaggcatcacttatgaagccaccggccacatgacctgtgaggctactttccacggcatcggcggccatgcccacggcgctttcggcaaggtggccaatcccctcaacgccgcagcccgggccgtagccaagatcgctgaattccaggtgccgacagatcccaagacctctttctgcgtctccaacttccatgcgggtaacgacgccggcatccatgccatcgtccccgaagccaccatcaaattcaatctccgctccgactcccaggaagtgctggaggagctgtaccagcggatcctgaacgctttgcaggaggcctgcgatgaagagaccgcccgttggggcaaggacaccatcaccgtgacccacaagcgttattgcaatgtgccggccggtactcaggatgtccattctcccattgtggaagctacctatgccatcagcagctatctgggatatgagcccatcttcttccatggcggctccaccaactgcaacatggccatcggcaaaaacatccctgccgtttgcctgggcatgggcagcctggattgcggcgctcacaccctgcaggagttctttgaaaccaccgacgcccacaagggcgtacagcaggctctgctcctggccttgctcctggccggtgtagacggcgctaccgactctatcctggcctgattaagaaaaacatcatcttgagaaaaaagccctgtgaaggcctctcattgcctctcacagggcttttcatattccaaaatggatcacatagcatcccttttcccaggcactgtgcaaaacactccaaagaggatacagctgctcctgctgaggcaatcgatccagcagatttttagcagacgagggaggaatgagggtgatcccggtataggccagcccctgggcgggccgctgtaagctatgccaaaagcaggggatgcttccaaaatgctcccacaaagcatgcacctcatcgtcctccaccgccgctgtttccccacaaagagaaaggtcgtatttttcatacatttcttcccaagccggggcttttttcattacgccaaattcatgggaggccaagttttactcccttcattctgtccagttttccaggtgaacgcccaccaaagggaaggttcctgcaaaaggcacgcgacggacctcatagaccgttccttcagcatcgacccgctgaagcaaaaagctgccctgtacctccagaacgctttgccaggcctggattcctccggacataccgggaggaagggtcagagtccccatggacccttctcttgctgcaaagaccacttggtcttcggccacccaggccagctgggattcgatccactcctgcacttgctttcgcagggtcccgttatccaaaaggctcgtccattttccctcagtgatcaccgtttccttttgccggtacaggaggatctccggggatgcagtatggttctctcctaccactttgcccaaagtggcataggtttcatccagctgccatacatccacttgcaggtcggaaaaataagcatccaaaaatggagcggccccgggcgatctctcctcctccggctgcttacccgaatcggaaatctgctgcggcgattgccaatcagtaacaaaaccgtccgcccaggcacttccgcagagggtcagaatcaaaaacgccgccatacaaaatgttgcttttctcttcatagttacccctcctctctgtttaatctcataatacattaaaccattttttatgtcaagaaggcaaaaaaataacctgtgagaaagacctcacaggttattttgattgcttttagatatgatccatgggatcgtccgcatgttttccttcaggagggatctcctccgtgtgggaaggggtgttccgtacctcttcttccggctggtgggtatagcgggcgttatagtccacttccaccactttttccggcgcctgggcttcttccccgttgaataccttttcaaaggcttcaccgctcatggtctcatgctccagcagataggcggccacccggtccaggatgtccatatgctcctgcagcatttgttcgcagcggcgataggcctcgtcgatgatccgcttcacttcctcgtcgatgagggaagccacttcttcggagtagttcttggaggctgcaaaatcccggcccaggaacacttcgtcgtgatcactgccaaaggcgatggggcccagcttgtcgctcatgccgtagcgagtgaccatgcggcgggcaatgtcggaggcccgctcgatatcgttggaagcaccggtggaaatatcgtccatcaccagtttttcagcgacccgtccccccagcagagtgaccaactcgtcttccatctcatttttggaggaatagtatttatcctctttgggcaggctcagggtaaagccgccagcccggccgcggggcacaatggaaatctgatgcaccgggtcctgggtaggcatcagccgggtgacgatggcgtggcccgcctcgtgataggctgtgagcttcttttccttttcggaatagacccggctcttcttttcgttgcccatgataaccttcaggaaggcatcatcgatttcccggttgccgatcttctccttggaacgacgggcggccagcagagccgcttcgttcagcaggttctccagatcggcgccggtgaagccggcggtggttttggcgatggcgtcaaagtccacatcctcttcaaagggctttttccgggagtgaacctgcatgatggccttacggcctttcacatcgggcacaccgatatacacctgccggtcaaagcgtcccggacgcagcagagcactgtccagaatgtcaggacggttggtggccgccaggatgataaccccttcgttggctccgaagccgtccatctccaccagcagctggttgagggtctgttctctttcgtcatggccgccgcccagaccggctcctctctggcggcccacagcgtcgatctcatcgataaagacgatggaaggcgcatggcgcttggcctggtcaaacagatcccgcacacgggaggcgcccacgcccacatacagttctacaaagtccgaaccggaaatggagaagaaaggcacacccgcttctccggccaccgccttggcgatcagtgttttaccagtgcccggagggcccaccagcaaaacgcccttgggaatacgggcgcccagctgcaggaattttttaggagccttcaaaaactccaccacttcctgcaagtcgcttttttcctcatcggccccggccacatcctggaaagtcaccttctgatcttcgctgttgaccatcttggcccgggatttgccgaaattcatggcggattttccgccgccgtcctgcttgttcatcatataataccagaacaagccaaagaggacgataatgatcagatagggcaaaaaggccgtccaccaaggcatggtcatcttttccgcaaagtcctgggtcagcgttcccgccgcccgctgctgacggatggtttcgcccaaatcataatagaagatctccagcgaggggatctgataagtgaacttagagccatcccgcatggtcatggtcagttcattctcatcgatgacaaagctggccacatcctggttttcaaaagcctgggtcacatcggaataggtcagctgggcctccttacggggctccatcaaaaagccaatggttccgatgagcaccaccagcagcagcagatacaggccaatgcccttcattttgccgttattcaacgaatcattcacacctttcgtgaggcggagctttacgcctgatacacctcgggtttcaagatacacagatcgggcaggttgcggtatttttccgcatagtccaggccatagcccaccaaaaaggcgtccggcacctggaagccgcaataatcgatgtccacatgggcctggcggcgggccggtttgtccagaagggtcaccaggcgcaaggaggccggttcccgttccttcagcatcaccagcagacgactgagggtcacgccgctgtccacgatgtcctcaactactataacatgcctgttctggataattgtgtctaaatctttaataattttcacctttccgctggtctgggtgcttcttccatagctggacaccgccatgaaatccaccgagcagggaatggtgatggcgcggcacaggtcgcccatgaacacaaaagcccccttgagcacgctgaccagaatggggtctttcccctcatattcccgggagaggatctctcccaattcctgcaccttttcggcgatttgctctttggtcagcaaaacctccgccacatcgtcccgcatatttgccatggtctttttcctcctcacaaccaccgtccagccggggtctttttctctctcttttgtttccacccgcaccgggccgccgcacaccagcaccggcccttcttcatcgcacaccaggggaatcccttcccgcagatgcacggggatcttttcatcgatcatccattttttaatgcttttgtgcccgtttttcaaccggatcgcatcccccgtcctacggggacgcagctgcaccggttcccaaagtttctgaaagaaataggctttttcttccggcccggcctctttttttccccggtacaaggtgacctgaaagcccccttcctccaccggttccccctccttcaaaagacgaggagaaaaggtacgatgcaacggattttcttcctttttccggcacaccagctgtccatagacccgccgggcctctatccctcccggcaagctatacgccgacgaagggcctcttttgcaaagtacccacattccctggcgatgcttttcggaaagggttccctctccaccggcctgacggtagagcatgggaagcacccgaaaagccacagcatccggcgcttttgccaaagctccagcgtctatcgatccaggggccgaggagtgttccttcaaaaactgtgccgcacaggtttccaaaaactcctcgtctttccgggcccgttccccggcctggctgatgtgctcttccgcctgagaattgatggtcctcagcaaaggaagaacacgatggcgcaaacgattgcgagcataaatctcttcctcattggaggggtcactgcaatagggtatgtggttttccgtcagatatttttcgatctcttcccgggaggccgtcaaaagcggacggatcagatccccttccgatgccggaattcctcccaggccccgggcccccgtcccccggcacaaatgaaacaaaatggtctccacattgtccatctgatgatggccggtggcaattttccggcaaccggtttccctggccacccggcggagaaaggcatagcgcaacgcccgggccccttcctctgtgccgcagccttcccggcggcaatattccagggtgtctccctcttcgatccaaaggggaatcttccgctgccggcagaatgtttctgctaaaagccgctccctgggagcatcctccgggcgcagtccgtggataaaatgggccgcctccacctgaatgcccagccggggcgccagccgatggagcaaatgggtcagcgccatggaatctccgccgctggagagggcacagagcaccttgtctcccggcgccgtcatggccttttcctgcataaaggccagcactttgtcctcaagattcatgatgggttttgtcctggccggagaaacgggtatactgtcccagccattgcagctcgatggtacacacctcgccgtgacggtttttggcgatgatgcactccaccacatttttcttttcggtgtccgggttatagtaatcgtccctgtacaggaaaataacgatgtcggcgtcctgttcgatggctcccgattcccgcaggtcggaaagcataggccgcttgttgggccgctgctccgggccgcgggacagctgggacaggcagaccaccggcacattcagttcccgggccatcaccttcatggaacgggaaatctccgaaatctgctgcacccggttttccgagcttttggagccctgcatcaactggagatagtcgatgaccaccagccccaaccggcttcccatccggcggcacttggccttgatctccgacaccgtgatggccgaactgtcctcaatatagatattggttttggaaaggagggcagaggcatgggcgattttatcccagtcgttgtcgtccagggtgcccatgcgcaatttccggctgtccaccagtgcctcgctggagatcatccgggtggtcagctgcatatcgctcatttccagctggaaaatggccacatccttccccgatttctgggccgccgacaacaccagattcagagcgaaactggttttgcccatgcccggacgggcggcaatcaaaatcaggtcggatttgttcagtccgcccagggcgttgtccagatcggcaaaaccggtgggaatacccggcaattttccgggattggccgccagctcatccagctgatcatacacatccttgatcaccgacttgatatgccgcaaaccgttgatctcccgcccctggcggatggcatagatcttctgctcggccagttcggcaatggtgctggccgtctcctgctcgttgcgggtcagatcgaagatctcattgcagatctgctgaagatcccgcagcatcttcttttcccggacgatcttagcgtaatcctccacattggtggaagtgggtgtcacatcgatcagttgcagaaaataggccctgtcggctttgtccttatagcccagggccttcatttcctccagcactgtcaccgggtcgatccgctttcccccggtgaacatgctgctgatggtatcgaagatcatccgattggtttcaatataaaaatcatcgggctggagcagctccaccactttgggcacgcaagtgggatcaaacaaaattgctccgatgaccgcctgctcggcctccacactgtggggggtctgccgggccagaagctcatccatggtcaaaaccccctactgcatcagctctgctcttccacgaccactttcactgtgcccaccacttccgggtaaagcttaaccttcacctggtaggtgccgaaattcttgatggtctcttccagcacgatcttattcttctggatttccaccttatgctggcgctgcatctcctcggcgatctccttggcagtaacgctgccgaacaatctgccgccggctcccgatttggccttgatgtgcaccggcatatccttcagctcttccgccagcttctgggcggcttctttttccagcttcatccgacgggcagcggcctcatcggcgatcttcttggcattgagcacatcggctgtggccggagccgccagcttccgaggcatcagaaagttgcgggcgtagccgtcgctggcttcgatgatgtcgcccttttttccctgtccctttacatcctgcagcaaaatcaatttcatggtcattcactcccatctccgcgcgtacacaggatggaagagtcccgcgcggcaggctcttcccgctctgcttcaaaaatcaggccgacggggcgttggaactgttttccccatcctcctggtctccagccagatattcctcaatggccgcccgcagccgggctgccacctctcccacatcggcgtcctggaactgagcgcccgccatagtcaggctgccgcctcctcccagtttctccagcaccacctgcacattcatcttcccataggaacgggccgagatggccacatcgttctcatgctcccggaagaccacaaaggatgccttgatgtcgttgatgttgatcagctcgtcggcggcctgggatgcggtggcccgttcggtatcttcgtccatcaccgaaatggaaacccccggatagggctgctcggcgttgctgatgatctgatatttcttgatgtaggaatcgaaattgttgttgaacaggcggcggacttccactgtatcggcgccacactgcttcagataggcggcggcctcgaaggtacgcacgccggttttgacggtaaagctcttggtatccaggaaaataccggacaagagcgcctcggcctcctcttttttcagatcctgagaactggtgaggatgtactgcaaaagctctgtgaccagctcactggtagagctggcatagggctcatggaggctgataacatagttttcgatatagctggccgcccgccggtgatggtcgatgaccgccacccgctgaatggtctggagcacctcgggatagtccacaaaatccggccggttggtatccaccacaatgagcagcgaattggaatcggcaatgaaaatggcatcgtccggcttgatgaaggattcccggtattcctccagcccggccagtttgtcgatcaggtccttggcagaggtgcgttcgctgttgacgataaaatagggcttcttgccgcatttgcgcacggcggcacagatgccggccgcagcgcccaccgcatccagatcggaaagctggtggcccatgatgaacacataggaagaatccctgatgtactggcgcagggaattggccaccacacgggacttgaccttggtgcgtttttccacttccttggcgtgaccgccatagaattcaaaggcatatttgctcttgatgaccacctggtcgccgccccgggccaaagcggtatccgctgccagacgggcatattgatacagctcgttcagatcggtatcgcccttgccgatgcccatggagatggtggcgctgataccggtgctgcttttgatttcccggactttgtccagcagatcgaacttccgctccacaaattccagcagatctttctgctcaaacaaaaacaggtatttgtcccggtccagccgccgcaccacgccgtgcaccggctcggcccagttgctgatctcctcatccacctgggcagtgagtttggatttctcgctttctgaaacccctttgatcagttcctcatagctgtccagcaccaaaatggccagcaccgggcgggtgcgttcgtatttggtgcgcagctcgctgtaatcggtcacatccacccagtacatggtgaccagcaatgcgctggaagcgtccttccccgagcggacgatgttgccgtatacatcaaacttccggccattcaccgccacttcatagggacatttgctccgcccttccatgatccagcgggtatcaaagccttcgatcacatcggtgatatgcagattgaacatccgctcatgggcgccggtgatctcataaaagctgtcgttgctccacaccacttctccagtatccatgcggaggatggcggtgggcagcggaaaattcatcagggaatttttcgatgcgtcatccacctgaaacaaaagtgtttccacagtgcggcgaatatcggcccgccgccgcttggcccgggcccggtaaacaatataaagcaccaccacaacggccagctcacccaaagccagccagatgttggtgaaagccgatatggcgcagaacaccagaagcagtgcaaaggccagccgggttcccgactccatcatgcgggcgatcaatttctccatggggcacccccctttcccttcttcagagcctgctgccccaaagacaaaataattaaaaatagtataccaaaaaagccctcatcatgcaaggcatcttgcccgcaggaaggagccttcttctggaaattcaaaaagcggggaaaggaaaagagacgggagcgatcccgtctctttttaatacgatggaaaaacagcttacttcagctcgaccttggcgccggcttcttccagcttcttcttcatctcttcggcttcgtccttgccaacgccttccttgatggccttgggagcgttgtcgaccagctccttggcttccttcaggcccaggccggtgatctccttgacgatcttgatgacgcccatcttggaagcgccaacttcagccagaaccacatcgaactcgctcttctcgtcagcggcagcaccagcagcagcgccagcagcaggagcagcggcaacagcagcggcggcggaaacgccaaactcttcttccagggcatgtaccagttcgctcagctccagaacggagagaactttcacttcttcaatcagctgtgcaatcttttcgcttgccattatagtgtacctccaattagtttttaatgaaaatgattaagcctgtgtttcggcttcggcagcgggagcagcctctccgccttcgctcttcttgtcggccacggcctgcagaacccgggccagggcggccacaggagccatcatggtgcccagcacagtggacagcaggatatccttcggcgggatggcagccagggactcaacggtggcaacatccaccactttgccctccaggaagccggccttgatgttgaaatacttgtcgtggctcttggcaaactcggccagcagacgggcaggagcagtgggatcgtccatgctcacagccatggcggttgtgccatggagcacgccgtccagctcttcaaagccgatctggttggcagcaaagcgcaccagagtgtttttcacgacggtatattccacattggcttttctcagctcactgcgcagcttggtatcttcttcaacagtgatgcctttatagtccaccagcacaccggatgtggcgttcttcatcttttcagcgagctgggccaccatggcctgcttctcgctcagaacctttgcgttcggcactgttttcacctccgtttagaataagtgccctcacatccaaaggacatgagggcacagtaaatccatactacaaaatggaacaatgcatcctcggcaggcggcacagagccgttgggaaccgcagttcacctgctgtctttggaatgagcgctattattttatcaacaaaccaatggtttgtcaagaaagaacaggaaaaacctgattagtcggtcagacgagcctggttgatcttgatgccagggcccatggtggcagccaccacgcaggagcggatgtactggcccttggccgcggcgggcttcgccttgacgatggcacccagcagggcgttgaagttctcggtcagcttttcagtgccgaaggagaccttgcccagggggcagtgaatgatgttggtcttgtccaggcggtactcgatacggccggccttggactcgttgatggccttggtcacatccatggtgacggtgccggccttggggttgggcatcaggcccttggggcccagcactttacccagacggccaaccacgcccatcatgtcgggagtggcgatgaccacatcgaaatcaaagaagttctcgccggtgatgcgggccaccagatcttcagcgcccacataatcggctccggcggcctcggcctccttggccttgtcgcccttggcgaacaccagcacacggactttcttgccggtgccgtgaggcagcacgatggcgcctctcacctgctgatcagcatgacgggagtcaacgcccagcttcacatggacttccacagtctcgtcaaacttggccttggccgtctttatcacggtatccagcgcttcggcgggatcgtacagcttggcgcgatccaccagcttggcgctttctacatatttcttacctctgcgcactttttaatcctcctagtttgtggtatttcggaatcatcctcccacgccgcggattttccgcgggggcgtctcttactcttcgatggtgacgcccatagaacgcgctgtaccggcgatcatgctcatggcgctttccacgctggaagcattcagatcgggcattttcagctcggcgatcttgcgcagttcttccttcggcagcttggccaccttgttcttgttgggctcgccgctgccgctctccagcttgcaagccttcttgatcagaacggctgcagggggagtctttgtgataaacgagaaagaacggtcggcataaacggtgataacaacagggatcaccagatcgccgtcattctttgtacgctcgttgaattcctttgtaaacgccatgatgttgacgccgtgctgacccagggcaggacctaccgggggagccggagttgccttgcctgcggggatctgcagtttaatcaaacctactactttctgtgccactttcgttgcacctccttagcaaaaatgtggtaaaattggacgcttgggcgccctcccacccggaaacgaaccatcatttccggtatcaaaaaccagccagctggtttttggagctatttttccatagaagccacctggttgaacttcagttccaccggtgtctcccttcccagcatagagaccataacggtcaccagctgatcctgcagcgcaatctccttgacgatgccaacgaacccttccagcggcccgtcgatgatcttgacgctgtcgcccacctgataggaaagccggacttcccgcttttccacgcccagggctgccacctcatcctcggtgagaggaacgggcttggagccaggacccacaaagcttgtgacgccgcgggtattgcggaccacataccagctttcatcggtcatgagcattttgatgagcacatagccggggaacatcttccgctccacttcttttttgcctgtgtcccggatctcggtcaccgtttccataggcacgcggatatcgaagatcagatggcccagcttgcggttttccactgttttttgaatcgtggcggccactttgttttcgtagccggagtatgtgtgaatcacataccacttggcattttcagacataagacgctcccacctgccgaaccaatggattttacaggatgcctaccagcagatcgcggatggtggcaaaagcgatgtccagcacccacacaaaaacacctaccagcagaatgcagaggatgaccacccaggtgttgttgaccacctgtttgccagtgggccagaccactttttttccttcgctcaccagctcgcggaaccatttggcgatccgcttgccagcgcgggagaaaatgttgccttgtttctgctttttcttgccggcgctcttttgggtgtccaggttcttgttttcttcagccatgaagctgcacctccatccttttgcggcctatctggtttcccggtgtaaggtgtgcttcttgcagaaggggcaatacttcttcatttccagacgatccggatcgttcttcttgttctttttcgaatcgtagtttctctgcttgcattccgtacacgccagtgttaccttaacgcgcatttgcggcacctccttaaataaattgcctcccttttcggggtttacgcctgcaaggcataaaaaaagaccccgacaggtgttcctataataccatgccctgcggaaaaggtcaagctttttttctctgtttctcatcttctccagatacagcaaaagcgcacggggggaagccgtgcgcttttgcctgaaaagggaagatgttggtaatgatagaccggtggtttgtgtcccgggctttcattgctttagagtatactctaaggccctctttttgtcaatccggttctttaaaattttatatttatttcaatattttaaatttttcacccactttgttcattgtgttgtatatgacacatttcacctggaaaccccggagggtgtatgatatgataaatgtgattttgaatttttctccccttcccgcaggaaggggaagagacgaggaggcattgctgctatgattatggccttggatctgggggacacccgcaccggcgtggccttttccgacgccaccgagcttttggccgggcgggcttacagcatcactgaatatcacaaggaccggctgctggaaaccctgtgccagaccatcgcccaggaaaagccccggctggttttggtggggctgcccaccaatatggacggcacccagggagagcgggcccagagcagccaggaattcgcccgccgcctggaggaaaaatgccaggttccggtaaagctttgggatgagcggatgacttcagtgatggccaaccgcattctcagcgatgcagggaaaaagcggaaaaagcagcgtcagcgggtggatgccgtggctgcttccctgattctgcaaagctatctggacgcaggcccatcccaaaaaatttagttcttctttttcttcccccccagtagctgccacactcctacggctatcatcagaaagccgaacaggcggcgcagcagctgaggctcgatccacctggccaacaaagctccggctgcacagccaggtatgcccaaacacagggcaatggcccctccctttttctccaccagcccgtggcgcagatgaaaaagaagggaggggcttgctgcggccacataatagagcagattgatgccctgggccgtcagctgctccatttgcctcacctgaagaagatagagcagcagcaaagagccgccccctaccccagcgccggtcaacgccccggcggccaaggccgccaacagatccaacagcagcatccttctccctccttatcccagcaaactgcgcactgtctatttcacgaaaataaggatacacgcctctttccatata

SEQ ID NO: 3780 - DNA, 32759 bp, Unknown
  16S sequences of unknown bacteria
gaaataagaaaagccgaaaaccctgataaatcaaaggttttcggcgtgtttgctggcgtccctggcgggattcgaacccacggcctttcgcttaggaggcgaacgctctatcctgctgagctacagagacttatattaaattgagactggcaacgatcacttttccccgtaaggcagctggtagagcacaaccttaggaggcggtcgctctatccagctgagctacggaaacattgtttgcaatcctcattctacccgttaggggagattttgtcaacggaaaaagtttgggtaggggacttcccacaccggtggtaaagtgttataatctactcatatttgtgccgaagacaccggagcagctgcgatgctccgtcccattttagcgccctggcgggcgcagtaaggaagtataaatagaatatgatgaaacgagaaaaatcctgcggtgtgctggtactgcgccagcaggaggacgaactgtatgtagtactgctgcgccaccgctttggcgggcactggtccttccccaaaggccatgtggaggccggcgaaagcgagcgccagaccgccctgcgcgaggtgagggaagaaaccgggctgaccggcatcaaactgatggatggattccgggagagcgtggaatattccccgaagcccggggtaaaaaaacaggtggtgtatttcctgggcaccaccgagcaggaaaaactgattcggcaggaggaggagatcagcgagatcatgtgggcgccgctttcccgcgctgccgagctggtttcttttgccaatgacaagcggttgctgcgccatgcccagcgtcgtttggggctgctacctaccgaaccggaagaaaagccgaatatggaggaggcgacagaataaaatgttgccgaaaaaacaaacgcccctggtccgggcggaaacaatttgctgtactctggcggcagtgatcgtggcgatctgcctggcgcaccaccctgaaaccagctggccgctggcggtgacgctggcgttgctgatcgcggccaatgtgctgcagatcctgcgtgatcataaggaccgtaaggacgaaaaataaccgatgaaaaggcttcgcagatggcggagcctttttactgccctataaaggagaaattatatcggtttgcccataaagccgcctgaatacgacaccagcctgcggcaaaatacggcgtagggcagggggtaagataatagcggacaactattttaccccaaaggaagtgcaaaataccatgatggatcacatgacggaagtaagcgggctttcctggccgcgcaggatattaaacaccctgcaaaacgatgaccgccttttagcgggcggggcggcattcctaggcgggctaatgacggccatgggacgcatcaccggggaggtagcgccgtttggggtggcctatgcggcagcggctccctgcagaatgactgtaccggcgcttttgggagcggccctaggctacctgctgatggcagctcccccggcggcctggcagtacccgctggcggcactgctggcggtggggctgcgccagctgctggcggttattacccataaagcccgcccttggcagaatgtcataggggtacttattggtttggccgcggcggtcatcctgcccggagcataccgccacccactggtgtatgatgtgctgctgtggatgacctccctactgatggccggggctgcggcagtttttctgcaaaggggcctggccctgctggaacctgaccgtaaaaccccgcgggagcgcacccttacggcttcattggcggtagcggcggcgctgtgcttgatgggcctgtgcagtatcagtgctgccggggtatcgctggggcgggtggcggcctccgtgctgctgcttattgcggcggcgggtgcaggcagtcgtgccgggacactcatcggggtgatctgcgggctggtagtgggcttctccaccggggaatttaccctttccgtcacctgcttttcggttggggggctgctgtgcgggctgtttgcgccgctggggcggctgggcagcgtattggcgctggctatcagctatggcttttttgccatgctggcctcccgcagtgtaacaggctttttggaggtcctgctggcggcgggaatcttttggctgctgccggcggcggtgccgcgccgggcgggccagctcattgcccccgggcgggaacagaagatcgcgccactgatcctaagcgatcggttggaggccgcagccaccgcgctgcgggaggtttcctccaccaccagggaggtggcagaccacctgcaaaaaagcacggccgaaaatccggaaatgctttttgaccggctggccaaccgatactgcaaaggctgtctgtaccagatgatctgctggcagcagcactatggcgatacgatggaagcactgggtcgtgggctttcagcttaccgaaaagagaatcacatcccggcggagaccctggcggggctgaatgaccgatgccccagccgggaacgcctggccgcagcgctggaaaaggagtatgcaggctatctttcccgggaggagcagcgggtgcgaacggcgcgggtacgcagcatcgtcaccgatcagtttgatggactggccgggacattgaccggcctttcggagtactcttgcgggatcaccccatgcggggagggcctgacacagcgcattacggaagccctgctggcggtggagcgagagttgcgggaggtgttgtgttggacaacaaccgccggtcacttgacggtgcggttagcattcccggcagcgctgctgcagcgggtggatgccgaaaggctgcggaagattatcacgacggaagcagggctggaaatggccgggcctgcccgcagccagcagaatggtgccctgctgctgacctaccgagaaaagccctgctacacactgggtcaatggcaggttcagctccccgcagaggaaaacggtacctgcggcgatacactgcggctggtaaagggagaagagggtatacagtcgctcattctttccgatgggatgggcaccggcgcgcctgctgcgctggatagcgcaatgctgtgcaacctggtggggcggctgctggaggcgggaatcccctgcggcagtgccctgcggctggtaaacagcgccctgatggtgaagggtggccgggaatcactggcaacgctggatactacggtagtggattgctacaccggtacggcattattttataaggccggagcggcccccacttttttacggcggcaggggcgtgccatgcggctggaagccaccagcctgccggctggaatattggattgtgtggagccggtggaacggcgctttgccctgcgcgagggggatctcatcctgatggtaagcgacggcgttcctaccgaggagccctgggtggaggagcagctggctgcctgggagggggaggaccctgccgagctgtgccggcgtatcgcggaagccgcccgcctgcgctgccgagagttaaaaccggacgatattacggtggcggccctgcggctggaaaaagattaaatcatgccctgttaatatgtattaccaaaggagctgcccagtaaaagggtcggctcctttggcttggatgggaggttatcccatcatggtgcggcacacggtatcagccatgtggtccagtgccgcgctcatgcggctggcggtgcggtggatggcccgccggcgctgtgccggggtggtgtggttcattacataggctacggtgccggctgtggcggccgccatagcgatgccggtcatggcggcaggtattttgcttgtgaagtgcataattcataaccccttccggcagaactttttctctcttttcattgtctgcgtggttagtttgcaccgggccagggctgctacccgctgtaatgtttggaaatacaggttctactatttacacaacaaaagtgattttataataaaacaaactatgacaattgatatcaaacacaaaaaccgtcgttcaaaccggccaaaattctatggctaagatgttgtattttgcacggaaaatagttattatcatattatattttaaccaaaaacggaaaatttccagccgggcgctgccgccttgcgttttgcctgacggcggaatatgattgaatcacaaaaggagatcatccatgaaccgaactgaccgtcctgcccgctgtgccgctgtgcacgatctttccggactgggccgctgctccctttccgttattctgccggctatgtcggtaatgggggtgcaggtgtgcccgctgccgactgcggtattatccacccacaccgggggctttggcaccccggcccgtcgcgacctaaccgactacctgaccgaagcgctggcgcattaccgtacactgggtctgcccatggagtgcgtctacaccggctatttgggctcggtggcacaggttgcgctgtgccaggggctctttgcggaatggcccgcggccatgaaggtggtggaccccgtgatgggcgaccacggcaagctgtaccacggctttacgccggaactggtacagggtatccgggagctggccacccatgccgatgttatcacccccaacctgaccgaagcagcactgctgctgggtgaggagccgaatacggcccccctttcactggggcaggcccgcagcctgctggcacggctttcggccctggggccgggggtagtggttatcaccggggtagcgcttaccaccggggaatatgccaacctgtgttatgatcgggaacgcggcggctactggaaatcggtaagcgaatacctgccggtgcgttatcccggcacgggcgatctgtttgccgcagtgctgacagccggcctgatgcagggcgacagccctgctatggcgatggaccgggcaacgaggtatgtggagatcaccgtaaaaacgacctttggctacggcgccgattctcgcgagggagtaatgctggagcgcacactgggctggctgacccaaaaggagctgccgcgaggctaccgcacgctgtaagccgaggaatccccagagaggaagagagcttaccctatgaaaaattcccgttttaccctgtaccgcatcgttatcattggcctgatggctgctatggtgtttgtctgtaccatgttcctgggcattcgtattcccacccccaccggcaccacacagctcaagactgccaatgccatttgcctgctgaccgggctgctgttcggcggttggactggcggcctggcggcaggtattggctccgccctgttcgatttgacctatcctgaatgggccgccggcgcgtggctcaccttcatctttttctttgccatgggtgccatctgcggcggcatagcccacgcaggcggtgcagccggcaaaaataaagcccgcaactgggtcgctgctatctgtggtgccgtgggttactggctcctctatattggcaagagcattgtcgtgctgtgcctgggcggcagtgtcttttctgcggcattcattgccactgttcccaagatgcttaccggcggcatcaatgccgtatttgccattgtggtttccaacctgctggcagcgctgctgcgccccaagctggaatcggccggtatttatgaagcactgaagaagcactgacatttccccctctccagatataaaagatacgctgctcctggccgaaaggccaggggcagcgtatctttttgcggcaaaacgcacagaacctgcgccccagcgtgctgcattgtatgattattcactaaacttgaataattgcgaataattattcacaaaatcgcttgacttaatgcatatttagtgataaagtatgcaatatcaacaagagatgctcctcccggtgaaaaccaatcaacccaaaaggctcccgcacgggagagaatcaagaaaggatggaaatgaacatgaaaaaactgattgcgatgctgatggccctaatgatggtactggccctggcggcctgcggcagcaatgacaccccggccgcgaacaatggcggcaatgacggtgacaacgctgcccccacctatgccaacgcgctggaaaaaatcaagggagagggcgagctgcatgtggcgctcagccccgatttctccccgatggaatttgtggattccagcaagaccggccaggaacagtatgttggctttgatgtttccctcgccaagttcattgccgaggagctgggtgtttcccttgtcatcgagccaatgagctttgatgccagccagactgctgtttacacggcctccgttcccatgtccatctccggttacagctggacagagaccagagccgaaaactacgagatctccgattactactatgccggcgataacgagaccgagcaggtactgctcattaaggcagaggatgccgccaagtacaccaaggtagaggactttgccgggcaggatgtcggcgcgcagaatgcctccctgcagatgcagcttttgaccgagcagatcccggatgccaaccccatcaccatcggtgaccttgccgtgggcgtcatggagctgaaagccggcaacattgaggcactggcggtcgccaagggtaatgccgatatgatcatcggcgccaaccccgacctcgtcatctgcgagttccagttcgaggtcaaggccgaatacgaagccaatgttattctgatgaccaagggcgagaccgaactgctggaggctgttaatgcggcactggccaaggcgtatgaagccggtctgtacggcacctggtatgatgcggccgtcgagctgggcaagagcgagaacgccaaggagctgacgctggattgataagaagatagacattatcgattgactgccggagccgtttagggctccggcggccgtgctaaagggagaatgaccatatgacaggagctaaattttgcgattttgagaagatggcagccatcttcctcaaatattgggataagtacctcattgatggcgtcagctacacattgctgctttccgccattacggtgctgggcggcgtggtgtttgcttcgctgctggccctcatgaagatgtccaaggtagcgccgctgcgctggctttccaccatctacatcgaggtgatccgtggtacccccatgctgctgcagctgtatttcttctactttggattgcccatgctgatacccgccctcaataagcagaagttcctgtgtattgccattgctctcatctgcaatagtgccgcctatgtttcggaggttattcgttccggcattcaggcggtcgatcccggccagcgggaagcggcgcttagcctcggctttggcgaacggggcgctatgtggttcgttatcatgccgcaggcggtcaagaacattcttccggccttgggcaatgagttcatcatgatcatcaaggatacctcgctggcctccaccttcttcattggcgacctgatgacccaatatctccaaatccggggcgccacctacctgcccatcgagccgttggtcatcaccggtatcatctactttatcatgacctttgctctcagtaagctgtttgggcactttgagcacaagatgcagcgcagcgaccggcaaagcggtacggcgcggcagcgcaaattaaagcgggaaggagcggtggcgtaaatggcgcagaagattatcgaagtagcggatctgaaaaagtactataatggcggcgccgttcacgccatggatggcgtcacggtggatatctgtcggggcgatgtcattgcggttattggtccctccggcggcggcaaaagcaccttcctgcgcagtctcaacctgctggaggtaccaaccgccggctctatcaaggtggatggcgtggagatcaccggcaaaaaggtcgatctgccccgtcaccggcaaaagatgggcatggtgttccagcacttcaacctgttcccacacaaaacggtgttggagaatctcaccatggctcctatccgcatcaaaaaggtgcccaaggccgaagcagaacaaaaagccatgactctgctgggccgggttggcctagccgaccgtgctaatgactatccggcgcagctctccggcgggcagaagcagcgggtcgccattgtgcgggcgctggccatggaaccggaagtgatgctgtttgatgaacccacctccgccctggaccccgaaatggtgggcgaagtgctggaagtcatgcgggaactagcccatgaggggatgacaatggtcattgtcacccacgagatggcctttgcccgcgaagtagccagccgggtgctgtttatggaagagggcaagctgggcgaacagggaaccccggaagtcatctttaccaatccgcagagccctcgactgcaaaatttcctaaaaaaggtgctgtgataacatggaagaactaaaaaaagcgtcattggacaccattgaagagaataaagagctgattgcttccgttgccgatcagatttgggaatatgccgagctttccttgcaggaggtgcggtccgctgctctatactgcaaaatactgaaagaactaggcttcgccgtggaggagggagtttgtagcatctccaccgcctttgtggccagctacggcagcgggcgtcccatcattggcattctggcggagtatgatgccctttccgggctttcccagctgggcggcagtatcaaaaagcaggaactgacccccggtgggaccggccatggctgcggacataatctgctgggggccggcgctttggcggcggcactgggtatcaagcattatttgcagcaaagtggtgcccctggtacggtagtattgtatggttgccccggcgaagaaggcggtgcggccaaagcctttatggcgcgggaaaagctgtggtacggcttagatgctgctctgacctggcaccccgatgactgcaacgaggccgcgaccggctccagcaatgcctgcattcaggtgcagtatattttccacggggtggccgcccatgcggccgggaacccggagcggggccgcagtgccttggatgcggtaacattgatgaatgtgggggtgcagttcctgcgggagcacatggaaccgcaggcccgcatccactatgccgtgaccgatggcggcggctgcagccccaatgtggtgcagtccaaagcatcggtattgtatatggtgcgctccccgcaggtaaaaaaggcggtggagctgcaaaaacgggtggatgatatcgctgccggagctgccttaatgaccggcaccacctgcgaacggaagttcattgatggcgtggcggagaccatccccaaccatgtgctggaagctctgctgtatcagaattttgccgaagtgggcgtgccccaacataccccagaggaaatggcctttgctacagagctcgccactacttatgatgccggcaggcatatcccgggcagcggcagcgaaaatgccgattatgccgcccgggtaaaaacgctcctgcccggtaccgctatgaatgatgtgctgcttccgcttttcaccggggaagccttttgccctggctctaccgatgtgggggatgtcagctggcagtgccccacggcgcagctgcatgtggcatcttggcccaatggctgtcctggccacagctggcagaatgtttcctgcggaaaaacatccatcgggcataaggcggcaatcaccgccggtaaggtgctgtgcgccgcagccattgatctgctggaacagccggagctgattgctgcagccaaaacggaatttgcagggcgtaccgcggaaggctatacctgtcccatcccgccggaagccgtgcctaccatcccggattgattgtggaacttttcggttttctgcaaaccgaagcattgggccgcaggccaaaccgtccttcggacggtttcagcggtctgcgaccgctggcccgccttcggcgggcggcctgcggcccgttctctcccgctgaacaaagcgcaaaaagaaaaagcataccttccccaccatggggtaaggtgtgcttttgttttatattataagctttccgggtcaataccgaacttatcccgcaggaagtgttggtattctgggtgatcctccgcctggcgatactcttcccgtaccgtccgccggagccagtctgcttctctttcagtcatttcttcgtagcggcgcagtaccagcaatccctcttgctccgcctgcaaaatggcttcccacgcatccgggataaattcacagcctgtcgcttccaccgccccgcgggatgttacggtatcggggataggaacaggatgcccccgccggatcaccttttctgccgtatagatgtaaccggaaacgcctcgataggtttcttccaatgcgtttgggtagtattcctccagccgctgcctgccatcatcggtaaagccgtagggcccccactttttccatggaccgttgtatgcaaagccagtttcccggcagtacttttccacggcgttggaaaggtaaacaaaggtgttttctcgtttttgcgaaaagtacagcagtgggatgccatggttggaaatgtgtggccgcagctcggtcagcccgccaatgggcgaagcgtgatacagcatggttcctccttatccctgtcgctgcccgcggaaaaaatccgaaagcagagcggagcattcctccgctagtataccggcggtcagccgaggggcggcccccaggtcaaggtgtgcaagatttaaccgggagccaaggcagccgtattgtgggtcggcggcaccatacaccacctgccccacccgcgcattcaggatcactccactgcacatggggcagggttccagtgtgacatacagggtgcagttatccagccgccagtccccacgggcctggcaggccatctctatggcacgcacctcggcgtgtcccagtggagaatgggtcacttcccggtcattgcgggcagcggccagtactgtattgccacacaccaccaccgcacctactgggatctctccggcagcggcggctttttttgcctctattagggccaggcgcatgtacttttcgtggtccatcctttggctcccttcaacaggattattggggagagagcacatgggtctctgtggggtcctacccagctctccgtacgaatctaaacagcagggaacagtgcgttccccaacagcaataacagcgccaacaccagcggcagcgatacccccagccgggggttcccgcgtgccggagcccatcggggcatcctgcgcagacggagcagcgcaatgccgcctaaaatcagcagtccaaccggcagtagaatggctgtgagcggtgagggaaaataagtggtcacccatgcgatgatattattacacaggtggatcaagatagcccagcgcagcgttccggtataaaaggtcacgatccccagcgccaatccggctgccagtgcgggcagccattgggaaaggctgccgtgtgcccccataaataacagtgcggagagccatatcgccagcttttccccggccgggcgcagcgcgtgcagcactgccccgcggaacagcagctcctccatcaccgccggcagtagaacggatccaatcatcgaaaaaatgatcgctaggggttcttccggtagcggcgtgggggtggacatcccggatccggtcagcatattttgcagtaacagggtaagaaagttagcccccagtaataccgccaacccggcaggcaccaccagccataggctgccgttttgcccttctcgcagtgggcatggctgggcggcagagcgccgcagcagctctatggttaccaccagcgggattcccagcatgagaaattgcagcaccagccctattccctccgcagcagtttccgtcagcagggatagccactcctgccgcagccacgcattggcccgcatggtcagccacagcgtcagcattccgccgccgacggctgcgctcccgctgcggtatcgcttatcctgcggcacgggcgccgcccccttccttgcatgcttccctttccataaaaactggcgccctccctgccatagggggcgagcgccggcgcttcctcaaacattaaagcggaacagcaccacatcgccgtcctgcatcacatattccttgccctcactgcggatgagccctttctccttggccgcctgcagggagccgcacgcgatcagagtttcgtagggaacaacctccgcccgaatgaacccgcgctcaaagtcgctgtggatcttaccggctgcctgcggggcctttgtgcctttggtgatcgtccacgcgcgcacctccggtttgccggcggtgaggaagctgatcaatcccaaaagatcatagccggcggtcaccaaccggtccaggccggattgatgcagccccagctcctccaggaacatctgccggtcctccggctccatttgggaaagctcctcctcgatcttgccgcagatgggcaccacacggctgccctccgcctcggctatctccagcacctgccggtaaagcgggttctcattcaggtcgcccgcaaaatcggcttcgctgaggtttgccacatagatgaccggcttattggaaagcagcgggcaatcggcgatcagctccttttcctcctcggtgcaggggaagttgcgggcagatttgccctcgcccagccactcgttcagccgttcgaagagcgctgcctcggccagcggctttttgtcgccgcccttggctgcctttttgcagcggtcgatccgccgttccaccaggtcaatgtcggagagcaccagctccaggttgatggtctcaatatcccgcgccgggccaatctcgccgctgacatggatgatctcgccgtcattaaagcagcgcaccacatggatgatggcatccacctcgcgaatatgggaaaggaacttgttgcccaggccctcgccctgggaggcccccttcaccagccccgcgatatccacgaactcgatgaccgcgggagtcaccttatcgggggagtacatctcacacagcttatccagccggggatccggtaccggcacgatgcccacattcggttcgatggtgcagaagggatagttggcagccccagcgctgccgccggtcagggcgttgaatatggtgctcttgccaacattcggcaagccgacaatacctaatttcatatatctctacatctccttaaaaaatctttgttttatggggttttgcggcttttttgggcttatgccatttttacgccatttcctcatttggatttataggatttcatcagtctatactacaaaattataacagatagattcttttccctcaaggtgtttttttagaattttgtggtcatatgatctatcattatactgtatcctaagtcaaaacaggaggacacccattgggtatcctcccgcctcaaatatctattgggttttcatcgcctggtcatgatataacggtctttatactccaacacggctatttctccgtatattataccaagtgccgcttctatcgtcgcacggtcggtatttctcatatcaatttcggtcactatggcgccgtcttgcatcagcagcaggcggtcgcagtagcttagggcaaagttggggtcatgcagggtgataagccccgcctgctgccgctcatgcagcacctctcttattttccccagcaccatatgccggttgacaaaatccaatgcactgtccggctcgtccatcagcatcaccggcgtatcctgcgaaagggcgcgcgccagtatcaccagctgcttctgcccctcgcttaaggtggcatagtcccgccccgccagctctgccagtcccagatgggtcagatgctccatggcaattctgcggtgtgcctccccgggggaatccaaaagacgcagtcgggcgttgaaacccatcaggacgacctccagcacggtttttcccataataggactgccgcgctgcgggatatagctcatcaggcgggcgcggcttttttcgtccagatgggtggtctcagtctcccccaccatacaacggccctctttcatcggcagcagaccgcaggcggcgcgcagtagagtggtcttgccacagccgttcagccccagcagcgcacagaattccccgccttctaccgcaagggaagcaccgcggacaatttctctgctgccatatccggtgtggatattccgcaaagaaagcaatgcactcataccttgccctccttgcgcttacacataaagtacaccagcaccggcacaccaataatggtagtaagaatactgatgggcagcccaccggcatacaggctgcgggcaaaaatatctgccaccagcattatggcagcgcccaccatggcggaaagcaccatagtatcggtattttcccgctttatcatcatgcgggcgatgtgtggggcgatgagcccgataaaggagatcagccccgtaatgctgacgattgaggcgaccagcagggtagaaagggtaagcaccgtcagccttacccgatacagccgcactcccagtgttcggcattcctcttcattcaaagagagaagccccacctgacggtgcagcaaaaacagccccacaaaaccgatcagccagaacggcaggatagaaagcaccttggaggctgtgacgcccgcaaaggagcccattgtccaatattcaatggcggccaggttggattcgctgtcggcatagtacttcagcagcataatgaccgacttggcgaccgccgagataacgatacccgccagcacataggtggcggtggtattggcacgggtcgcccgcaccaacagcatcacaaacgccacggcaagcagcccgcccgcgaaggcgcccaacgcaatgccgcccacgccgatgccgacactgacgatggcaatggcggcgcccagattggcaccgctggaaacaccgatgatatcgggggacgccaacggattgcgaaagatcatctgataaacggagccggcaacacccaaccccgcacccgccatcacacccatgcaggtacggggcagccgcagtgtaaaaaataccttgcgggtcaaggcgctaacctccccgccggtcaggatagaaatgatctcccgtatcgaaatggggtaattgccgatgcagatggaggcaataaagcccacggcaatgcacgcccctaccagccagtaggagcggatcacgggttttcggttttgcagcatggtttcctgcatgttatctccctctaattccacagtgggcttattgtaccgcatacgccgttaaaaagcaaacaacgggcagaaaaaacgggataccgcacgcagcagtatcccgtaggtcattccaaagaggaatcaggctgcctgatccaacgcaacatggaagccgtagaaggtggagtagaactcatcggcatctgcggcaaactgttcggcggtgtacagctcggggtgcagggtctgcagcatccacagggtacccaggataccggagggaacgggggaatcccaagcctcaaagccgacaggcatctgataaacggcaccgttcttcacggcggtcacatcggcaaaggtggcgttgttcagcacatcctctgcggtgtagtcagggctgcttacggcaaagttatcggtggggatcacaattacatcggggttcatggtcaggaaggtctcgttatcgatatcggtccaggaggtgccctccagcacatcaccggcgttcttgccgcccgcggtggtgatgagggaagcctgatacatctccttgggggcggtgcgcaggatatcgctggtgctgccgatatacacgacaggcttctgctcatcggtcaggtccttggtcagctcggccactgccgccagcttggtgttgtagtactcgatcagcgcggtcgctttctccatgctgttggtggcggtgccgatgagagtgaacatctccatcagctgctcatggctttccggcaggaccagcagggtggcaatgcccatctcggaaagggcctgggcggtgtccttctgcttcatgggcaggataacgagatcggggttggcattgacgcaggcttccaggtcaaaagccttggcggagccgacattgggcaggtcgataagggcgggagccgccagcttgtaaatggggcgcttggcggatttatcctcgatgccgaccatcttatcggaaagtcccagcgcgatgcaggcggaggaggaaatgtagtagccggaaacgatgcgctcgggctctttctccagggtaacttcgcggccagccatatccgtcacggtaagggggtaggtaatggcgggagtgggatcgggagtgggctccggatcgggagtgggggtaggctcattgccacaggcggcaaaggaagccgccatgatgactgccagcagcagtgccagcagtttgttcatacgcttcataaatcttctttctccttttatctaattgtagaatagcgtaccgttattctacttcatgttaaaccgtttgtcaatatggaatgaaaggactgaatcgtttcgcggttcagcataataagcgctggatgtcccgcgcgcttatccgctggtcagcattccagcaaaatccgggataaacagaaaaccggtccggaacaccttgctttggtgttccggaccggcagctatttgcctattgcatatggggcaggacttacactctcgccatagcctcctggaagtccttctgatcgcagaagatctcctgcttgtaggggttcttcttctgggcctttgcccgcttgatgatggaagccaggatgaccacatttaccaccagcgcaataatagccacaacgccctgcgcagtggggttcgccgccgtgggacgaactgcggggttcataaagccatcggcgtagacagaagtgatggtggtaaatacgctattatcctggaacagcgggaatacctgggcaaacatgcaccacagggccagggtgttagcacggttctggatccagccacccttgttccagaagtggttggcaaaggtgggggccagcagcagcgccagaccgcagtaccaggagtgggtgggcaggcagttgtaggtgtactcaaagttccacaggtcataggccaggatgtagcaccaagtcatatcaggccacagcatgtctttcttgtccttggaagagtagatgccccaccaggcggtcatgcagaaaatgttaatgataccggcaatgccgttcacccagttccaccagccgccgtacagccacacattctcggaagagagccaccagcggtcgccgaattccatcatggccttggcgccgcggatgccggattcaaagtcactggccacagcgatgagaatattgatggcaacaatggcaaaggggaataccttgaaccagtcggtcttgccgatgctccacttatatttcagcatcataaagccgatgcagcccgcggtggcggcatacagcttggcatagtggaaccagctgttcatgttggtgtaggtctggttgttcagtgcccactcggcgccattggctgcgccgatatagatggcgataaaatacactgtcagcacagcaggcagcgccaggaagcagatgataccaccggtcttggtgcggcgggcaaattcattggccagcaccaagccggtgaacaccagcacgaaacccagcagctgatagccggcagtctcgccgtagagttggaataacatgttacattcctcctgttgattttttggaaaccctcatagtaacctcacgggccgcaaagcctggcctatctggccataccagatggaacagactttattactcgccccgaatatatcacgataattcataaatgtcaatcatttaacaagagaatttcgtataaaatggttgaaaaattcagcaaattatcctaaaatagagaaaaacgcctttgtggtatgtggccataccacagcgctgcttaaaaaggggaacctgtcatggaatttgaaaaactcatatctccctccctcaaggagctctttatcagtaatatcgaagccaagattctttccggtgaactaccggtgggacagcagctccccccggagcgccagctggctcagtcgatgggggtcagccgtgcggtggtcaatagcggcatcgtggagctggaaaaccgcggctttttggatgtccgtccccgggtgggcacctttgtcgccgattaccgccgggccggcacgatggaaactctcaaatccattatgacctataaccgcggccggctgcgtaacgaagagatccgctccattctggaggtgagggatgccctagataagctggccgtcgctgatatcatccctcatgtcaccgaattggataacatgctgctgctagaaaaagtggaagccattcgtcaggcaagggataaccgtcaggcggcggaggctgcatttgccttccagcacgagcttgccatgctcagcggcaataccctgctgccgctcatcttccgatcgttctattcctcggtgctggtcctgtgggagcgcttctgcgccttacatggtatcgatactctgtatcagaccagctgccgcctgtgcggccatattcgagataaggatatccccggcgccatcacctggattgactactgcacccgggagaccgtttccggcagccgccgcatctactactaaacacacatacaagcggcacagcccgcccccaaaaggagccatggctatgccgcttttctcattctcccgtttcttcggggatgtcattttctatcgttcggatcagcttggccggcaccccgcccacaaggctgttatccggcacatcctttgtcaccaccgcgcctgcggctactatcacattgttccctatggtcacgccgggcaggatggtcacattcccgccgatccacacatcattgccgatagtcaccggtttggccacgctcaggtgtttccgccgtcccataggggagatgggatggttgacggtggcaatcagggtgtgtggaccaatcataacatagtccccgatacgcaccggcgcacggtccagtatggaaacattatagttggccaaaaagttctttccaataaaaatgctttttccgtcatcgcagctgaaatagggcatcacggcggcgttttctcccacgctgccaaaaagctcccgcatcacagccgtccgctcctctttggcctccttgggcagcgcgttcagccggcggcacagcgtcattgcccgcagcttcagggcgtctatttccggtgcccacatgtcatattccagaccggcgtgcagcttttccggttccgtcatttcgtttcctccttctccttcaggctcgccgccaataggcaaaaccgccgccccgtttagggacggcggctctcttttcagaatacgcccgggcctgtgcgggcatggcctggcacagctttgcccttatcttagcccagcttctccagcgcggtacggatgcggcgcagtgtctcctcgcggcccagcaccaccgccagctctatgccgccgccgggggtaaactgcttgccggaaacggccacgcgcagcggatacagcagccagccgttcttcacacccagcttttctatctccgcaaagagggcggcatggatggcctcctggttccactccggcaggctctccaggatgggcaataccgcggtcagcgcttcccgggcggtctcgggggtggtcttcatctttttgctggtatacagctcaatgtcatagtccggcagcgcgtcaatgaagtccacctgctccgggatgtcactcagcgcctcgcagcgggtctgcagcacggtgcacagctcccgcaggtcggcggtctcgctcttcaccgtcttgcggatccagggcagcgccttctcgtagaattcctcaggggaaagcttgcggatatactcgccgttgatgtagcgcagcttctgcatgtcaaagatcgccgggctcttggtgatgccggagatatcaaagatctttaccagctcctccagcgagaagatctcctggtcacccttggggctccagcccagcagcgcaatgtagttgaggatggccggggtcaaaaagcccatctgcaccaggtcctcgtaggaggcgtcgccgtgccgcttggagagcttgtgggtggcgtcccgcatgacgggcgcgcagtgaatgtatttcggaatctcccagccgaacgcctcgtacagcaggttgtacttgggcgcggaggaaagatactcattgccgcggatcacatgggtgatgcccatggtgtggtcgtccaccacattggcaaagttataggttggcatgccatcgcccttgatgagaatctgatcgtccagcgtgctgcattccacggtcacatcgccgtacacctcatcatggaaggtcacggtcccctcagtgggcaccttctgccggatgacataggggatacccgccgccagcttctcggcgacctcctccttggaaagattgcggcagtgaccgtcatagcggggtgccatgccggaggcctcctgcaccttacgcacctcgtccagccgctccttatcacagaagcagtagtaggcgtgaccgctttccaccagctgctcggcgtatttcttaaacatgcccattcgctggctctggatataggggcccaccgggccgccgatatcgggaccttcgtcccactgcagaccggtttccttcagcgtcttatagatgatctccacggcgccttccacctggcgctcctggtcggtgtcctctatccgcagcaaaaagcgtccgttgttgctctttgctactagataggcaaacagcgccgtccgcaggttgcccacatgcatatagccggtggggctgggggcaaaacgggtccgtacatggtcaaattggaacataatacatcttcctttatcttcagtagtatctcataggagtttaccctatatttttacccatatatactaccgccaacagcccctcactgtcaaggaaaaactgtgctgttcgccccaatgggggagagacgccgcaggggaatggcaggcgccgctgccgcggggccgtcctcggccaaccggcggcccgcgccccagcccccgcgacccgttttcccgccggtaaattgcaaaaagggcggtcccgccttgcggcgggaccgccctttttctgttaccacttattatataccttttccgcaaagcccagcaggttctctatcttcaccaccctgccgtcatccagcctcgccgtgccattaaagtagccgaacacctgatgctggtcgctgcaaataatgcctacattggtgcagctcgcgcggtccagcaccggggtaaagtccatctcaaaccgcccatcgctgctggtgaatttccacgggctcataaagtcgtccttgccgtccttctgcgggatcaggaaggtcagctgctccagcttgtgcgccgtgccatcgtagaacagcatattctcgctggcggcactggtatcgccaaagccatacccgatattaaagccaaagggtctgccctccactgtgccgttgccgctgccccagtaccaggtgtttttgtaggtccatacgccgcggccccagtccagcgtggcatagctttcctcggggtcaaattcgatcacctgcccgtcaaattccacccggccggcagccttcatgcagttgatcttctggttgtagtaaaaggccttcttatcctccgcaaagggggtgacaatcaccatggaatcctccggctcttccgtcagggtaaattccgccgcgatcggctttttattcataaaattctgtacccaggccgtcagcttccgggtaccgtccggcagcaccttaaagcagaaatcagcgtttttgcgcttcaccgccacatctccctcggcgctgctggcagggaaaccggtctttccgccagggaaaggatagatgatattgcaggtgtgttcccacggccgactaaaatccagcagcgagaagcccagcagtcccatgtagctgttgtcgtctatggtcagcgccacaccccaccttccgttcatgatcaggtagtagtcccattccttgatgcggtgggccgccgccttgatcgcccggcggtcgtatgccttgatgagacggcgggcatagcccgcttcgcacagctcgccccgttcgttcagcagcgggccggcgttggtcagttctttctgcatggggtgcctccttcgttctgtcatcagttttagcggagaaccggtttttcgcgggggtgccttttcgcagaacctctgcagggagccggccccacccgccccctgcatcagctccagtcagatcttacaccttggcggcagccttgttcagcgcctccatcaaggcaggcacatcaatgccatgggccagggcgccctgttcaatgttttcaaagtgggcggcggcgcagccgatgcaccccatgccgaagcgctgcagtacctctacagtagcaggatatttctgtacgatctccatgatgcccatatcttttgtaatcagcataatttattatctccttgcagttaaattgggggaggcaaactcccctcccttagtatagttatttttcccctatttgtaaacagaatccgaacttttttgcaaagtcccccgttctgcccgcccgttcattgacaagcgccgccgccatggtgtaaaatgatgcggaacaaagcccccgccggggccaatttacaagaaaaggcacgaggaacattatgaaaacgacaacacgcctgctggccctgctgctggcactctgcatggtatttgcctttgccgcctgcggcaaagaccccagcgaccccaccgatccgaccgatcccagcaatcccactacccccaccgatcctgataaccccaatcccgatgagccctccaaggaggagatcctcaaggaactgcaaaagaccatgctggaaaatacgctggccatgcagcagaagaacaaggataccatcggctggctgtatattgatggcaccaccgtcaatgatgtggtggtcaaggtcaattataacgatgataacaagtactacctgcgccgcaatgccaatggtgagaacgataacgacggctgctactatgccgatttccgctgcaccagcggcaatcgctccaccatctcgaagaataccgtcatctacggccacaatctgggccgggccgaaaatgccctgctgaccgattatcagaaccacgcaaacggccccaagttcgctcagctactgaagtatcaggacgaggaatttgccaagacccatccttatatctactactccaccatcgaagaggacatggtctggcaggtatttgcggtattctacaccgatatcaagttcgactacatcaaccccaaccccgccgatgccaccttcaatagcctcatcaaaaaggcccaggatctttccttctacgattatgatgtggaagtgaccagcaacgataagatcctcaccctctccacctgcacctaccgtctggcggatgataccaagctgcactatcccaatgactaccgctatgttgtcatggccaagctgctgcccgccgatgccgtgctggaggataccgtttccctcaccgtcaccaagaacgccccggtaaaacccgccggcgaataatgccccatccaataaggcccctttcccaccgggaaaggggcctttcgcgttcccctaaagcctccccagtgtaaggagtgtgacactgcaccatccaaaagcctcccctgtgtaagggaaggtctcagccgatcggctgacggagggattgccggtacaaaatatggccaagtttcttttccccttcggcgtcgcattgtcaccacagggtaacagcctgtacgcctacccggcgggggcctacttttctatgaagaaaagtaggcaaaagtcattcagggctccgccctaaagacccgtacgctcgtcggacgcaacctccgcttgagtcggactgaccctgtgcttcactttgggcagtcctccccgctgcggtgcatcctcctctccccacaaggtctcgcgaccttgcgggggccccatttgccccgcccggaaacgctgcacattcccggagcgggattagacgacgctgataaggttgatttttaatttggtttctgcagaaactcacataaaatgcgccgcaggccccttgagagcgtatctgcggcgctgtacggacgatgcttcgcatcgttcgtatccagccgcagcttaagcgttagggggtcttggggcacagccccaagtgtgttttgcctacttttgtacacacaaaagtaggcccccgccgggtaggcgtacagactatgcctttgcaaaaggctccatgccgccgaaggcgactacaatcttgacccaaaaattcttttacacactttcatccgaaaaaagcagccccgccgggcaggcgcgcagattaaaaccttttataaaactatgcgacgccgccaggcgactacaatcatagcctaaatatcttttgcctgcttttcttcacagaaaagccctcgccgccgggccgccgcaaaaaagaaagcccccgccatatggcaggggccttgcttgtcttttgtggtttgggaattacagcttgcccagcttggtgcggcagctgcggcagacatacttgtcgtcataggtagccagctcttccttggagccgcagaaaatgcagcagggcaggtacttcttaagaatgacctgatcaccgtctacataaatttcaacatcactgtggatgtcgatgccgagggtgcggcgaagctctacagggagaacgatacggccgaggttgtcaacttttcttacgataccggtggatttcatggtacaggttcctccttaataaagttaggtggtttgctggcggtttacaatatcttctaatattctcgctttttctctaccttgctactaagtgtactattattttccatgaaattcaagaggtaattagcacaatttcgcaaatcttgtggataatttttgcccctaatttgccgcttttttggttattgttgctaaaattgataaaatgcgcacagattccgttattttacataattcgataaaacacatcaaaaaaggaaaacattagcgcaatacgctcccgtaaggagaaaaagatgttgataaatcatctctactccctaaaaaatgaagaaaggagctccgcccatgctgaatggtatccttaccgctctgcttattttttcggtcgtcaccgcggccttcaccggccggatggaagcgctctccgccgcggcgctttccggctgcggggaagccgtaagcctggtcattgccctaaccggcatgctgtgcctgtggagcggcctgatggaaattgcccgccgctgccgccttacggaagcattggcccggctgctgcatcccctcacccggtggctgttccccacggtgccgcagggcagccccgctatgcaggccatctgcatgaatctttccgccaatctgctgggtctgggcaatgccgccactcccttgggccttgccgccatgcgggagctgcaaaagttgaatccccataaggacagcgccagcaatgccatggtcacctttgtagcgatgaataccgcctccctccagctcatccccaccacctgcgccgcgctgcggcagcaggccggctccgccgcccctatggagatcctgccggcggtatggctcaccgggctttcgtccctggccgtggtcctgctgctggaccgcctgctgtgcgggaagtcccgccggccggaataaaggcaggcccttcaccccacccgcgaatttcatcaaaagggagggcattccatgtcattcagcgcctggttcatcccgctgctcatcaccggcctgttcagctggggcctctgctccggcgtggatgtgttcgattgctttttgcagggagccaaagaggggctcaaaaccgccgcctccatcaccccggccttggtctgcctgcttacggtggtcaccatgttctgccacagcggcgccctggatgtcctcaccggcttccttcgccccgtgactcagcttatcggcttcccggcggaggtactgccattggccctgctgcggccgatctccggcagcggcggtaccgccctgctgcaccagctgctgggggaatacggcccggatagcttcatcgggcgggtaggcagtgtgctggccgccgcctcagagaccaccttctacgctatcgcggtctactacggcgcggtggggatccgccgtacccgccacaccatggccgctgccctcaccggggatctgaccgcggcgctggtcagtgcccttgcggtccgcttgctgctgggggtgtgacctgcctcatcagagggaaacggtatccagataatgcaggaagaagctgccgtccggccgtgtcattacggagaaacgggtccggaagtccccaattttatagggattttcataatatacattgccgtgcagttcgtaactgacgcttacctcggatttttcccgatcaatttgaacctccgtgttcctgcactccggagtattcccccatccaaagccggaccaaaacacatactccccggtttcgggaacataggtatcttcaccaaactcataatccggaatatcaaacacctcctcggccatctgctgtatcttttcttttggaaagtggtaacacccctcatcatccatggtgacaaaatcatggtacaggtatttctcctcctccatgaacattaccgtactcaaaataaaaagatggatctgccggtcctccaacggataggcggagctccccaggatatctccagagtaaaaggcaaagttggtcagctgcgcggtcagaacctccgaggaggcctgcagttcctcctgcattgcgtcccagtccaatgcggactttccctgcggggcgttgccgacgcaggcgcaaaggctaaagcaaagtgccaaagcgattgcgagtgatagcatctttttcatggcgttttctcctgtatgtttttgccgctgcggcaggttttctatcattttaccatgggcgccgcaggtgggcaacggaaaattttagggcggtgacgcctgttccttgccagcgtccgccctcctcacaattttttaacaaaattgccacattcggcgctatgcaaaagactccgccggtgctataatataaattagaatactatgacctgtaaggaggaaatagcaatgatggacaagatcctggtagccgatgacgacctgaatatctgcgagctgctgcgcctgtacctggaaaaggagggcttcgaggtggtaatggcccacgatggcgaagaagccgtggccaagttcgagagcgaaaagccctctcttatcctcctggatatcatgatgcccaagctggatggctggcaggtttgccggcagatccgccaaaagagcgattgccccatcatcatgctcaccgccaagggcgaaaccttcgataaggtgttgggcctggagctgggcgccgatgactatgttgtcaagcccttcgataccaaggagatcgtggcccgcatcaaggccgtgctgcgccgcagcagccccgccggcaccgccgaaggtgaggtcaaggaggtcagctacgataagctcaccgtcaatatgacccgctacgagctcaaggtggatggcaaggtcgtggatgccccgcccaaggagctggagctcctgttccacctggccagccaccccaaccgcgtattcacccgcgatcagctgctggatgaggtctggggcttcgagtactacggcgacagccgcaccgtcgatgtccacatcaagcgcctgcgtgaaaagctggaaggcgtcagcgatcagtggagcctcaagaccgtttggggcgtcggctataagttcgaggtcaaggaataagaatgaaaacttcgcagaaaaccctgatgggcaagtactattcggtgtgctgcgccatcattctgctcagtatggtattggtcggctccatctttatggtgctggccaatgactacctgcgggaggaaaaaatcagcctgctggagaaaaatgtgacccaggccgcccgcctcaccatggaaaattacgccgcccacgagtaccgctatgtcagcagcgataccctgcagccggtgtatgccgtgctgggctccgccatcgaggccgacatctacctttccgataacaagggcaatatcctcattatggcccatactaccgagagcgccatcccccagtcggtgccgcaggctgtcctggatagcctctccaaaaccggcagctatcagggctccgtggtcatggccggcaccggggaagacccccagtacgccgtggccacccccgtggtggatgaaaacggccttctggtgggtgccgttatggccaccgcccgggctgccaaccgtgctctggccggcgatatgctccagatgttcctcattgcggccatcgtggtgctggtggtcagctttatcgtcatttattttgtcaccaccagcctggtaaaccccctgcggcagatggccgcggcgacccgtgcctttgccaagggcgacttttcggtccgggtgccggtggagggcgatgatgagatcgggcggctggcctccgccttcaataacatggccaccgagctggccctcaccgaatcggtgcgccgcagctttaccgccaatgtcagccatgaattaaaaacccccatgaccaccatcggcggctttgtcgatggtatcctggatggcaccatcccgccggagcggcagaaccactatctgcgcattgtctccagtgaggtccagcgcctttcccgcctggtgcgcaatatgctcaccctcagccagatcgaggccggcgagcgcaccatccagcccaccgaggtggagatcacctcccttgtcaccaatacgctgctgggcttcgagcagcggctggaggaaaagcacatcgaggtggaggggctggataccgaccgctactgggtgctggccgatgccgacctcatccagcaggtggtgtataatctcatcgataacgccgtcaaatttgtcaatgagggcggcaccctttccttcgacttttataccgagggcgagaatatcatggtagcggtgcgcaataccggctccggcgtcctgccggaggagatcccgcggctcttcgaccggttctataagaccgaccgcagccgcagcctggataaaaacggcgtgggcctggggctttccatctgccgcaccattatgaatgtccacgagggcgagattttcgtccgcagccagcccggggaatacaccgagtttgtattcggcctcaaggccgaccccgcccactacaaaaaaggcgtcaaccgcaaagcccctatggtagatgccagctttaccacattgccggcggcccccgctgccggccgggaggagaaacagcatgagaaaccgcagcaatgacagcaactaccactgggattaccaggattaccggggcaactacggccaaagccccgcccgcgcccggaaaagcagcggcctgaagtacttcctcatcgccatgggggtggtcatcctgctggtgggggcgctgtgcgtcggggcctccgtctggggcagcaagcctgccccgcagccggatcaggattcgtccatcggcaatgagctggagcacctgccggagatcgaccagcagaacaagccggaggataatgtgccggataccaccgaagacggccttttgactcccgccggcatctataaaaagtgcgccccctcggtggtgggcatcatcacctacggcagcagcgccaccgcgcagggcagcggcatcatcctttcggaaaacggctacatcatcaccaatgcccatgtggtcagcggcggcgaaaagttcgaggtcgtgctgcaaaatggcgatagctatgatgccaccgtcattggggcggataaccagagcgacctggctctgcttaaaatgcagaacccgcccgaggggctggtcgcggctaccttcggcaacagcgatgagctggaggtcggcgaaatggtggtcgccatcggcaatcccggcggtctggcgctggcctccacccaaaccgtcggctacatttcggcggtgcagcgcaccatcaccaccgagctgggctacaccatggtctgcatccaggcggatgccgccatcaatcccggcaacagcggcggccccctcatcaatacctacggccaggtggtgggcatcacctccagcaagctggtggaggaaggctacgagggcatcggcttctccatccccatcaataccgccctgcccattctggacgatttaatgcagcacggccgggtgaccggtcgggcacagctgggcatcaccgtggtggaagtaggcagcaatgaagccaattattacggcatcccggcgggtctgcgcatcatgtccatcaatgaggacagcgatgtaggccgtcagggcgccgaggtcggcgatatcatcacatccattgatggctgggccatcaccagccgtgccgattgcagcgatatcctggcacagcacaagcccggcgataccgtggaaataagcctgtaccgggccagccgtaccggccgcggccagaccttcaccatcacagtcaccctgctggggtcctaagcatcccccaaaagccgcccacgggcggcttttctgccccttgtgccatattgcccataaagccgtgtcatttccgggcaaacctgccaatggcatttcggtcgggagtgatgtataattaaaaagaggaggaaagcaacccgcatcgacacagtaaggaggtgccgaacaatgaaaaagaggatatcagccgtactgctggccctggccatgttgttcaccaccgcccatgccattccaatttatgtggatggcagcgccctgggctggcaagaaccgctgaccctggaggtggaaagcggcgacagcatcgataatgtcaagcagaagatccagaacacgggtgtttcggtagatgggaaatgcctgtattttggcagcagatttttggagaacggccgcactctagcagattataatatccagaaggaaagcaccttgcaactgactacctttttggaggtagccgattcaaaaaacctgtctgatgctctggcttccgatgccgcggtcattcgcttgactggggatattgagatcaccgcctttatggcggtgagtagaccggtgaccatcgatctgaacggccacttactgaaaacaaccagcggggtcagcaacttgatccatgtcacccaaaatggagagctgacgctgatcgacagcaatcccaatgccgttcacaagttcgataagagcaacgccctgtggaagctggcagatgaaaccaccgccgaagaaaatatcatagaggtaaagggcggcgccctcaccggcggcaccggcacaggagaagcaggaaatacctgcggcggcggtatctatgtgaggaaaggcggcacgctcctcatgcggggcggcaatatcgtgggctgcacggcgcgcgagggcggcggtgttcatgtggaagctggcggccggttcgagatgtccgccgggaccattaccggctgcgtggcacagaccgcgaataatgacaatacccgcggcggaggtctctgcaatttcggcacgaccgtcctctccggtgcggctgccatccgggattgccgcgcgatcctaagcggagaaagcacaaataagaacgagggcggcggcatttgcagcgtccgcaatctgaccatccgggataatgtaacggtaagcggctgcacggcgaatgaggagagcgacgccatgtccatcggcggcggcgatgcgaacaatagtcccaccgagatcatcggcggaacattcgatggctccgtgacgaatggcgggaccatcatcggcggtgcctttaccggcccggtgtggaataatggcatcatctccggcggccagtttaccggctcggtggtgaaccgcggtaccatcacaaacggtacctttggtggcgaagtgaccaacgagagcggtcgttctttcggcaccatctccggcggcaccttcaatgggaaggtaacaaataaaaacgatatcagcgattcaccagaagaaacaccggctaaaatttccggcggcacctttaacggggaagtcatcggggcctatacggtcaccttccagtcggagggtggaagcgaagtagcatcccagattcgtgccaacgcccctgccgcccgacctgccgaccccactaaagagggctataccttcatcggctggtacaaaggcgaaagcgaatgggactttgagacccccgtgacccccgtgacccccgatttgaccttgacggcaaagtggcagctcaaccagtacactatcacctttgataccgccggcggcagcgaggtcgctcccattacccaagattatggtactaccatcaccgccccggccaaccctaccaaaacaggctatacctttgccggctgggataagaccattcccgccaccatgccggccggggatatggccatcaccgcccggtggaccgaaaaccgggtcattgtcatcatccggccggatgacagcaaggatgagccggaccccggtaccatccatcagtggggcccctggcgctccaatggggatgggacccatacccgtcgctgcacagccagcggct

SEQ ID NO: 3781 - DNA, 25522 bp, Unknown
  16S sequences of unknown bacteria
gggcggctacgccgcgatgttcgtctgccgtcataaaacgagaaaatggtattttcacgcggtgaatctcttgggaattttgtggcaggcgcttgcgctcgtatttttgattcggctttcgtagcgtctttttctgcggcggggcgagagcggcgcgaagaaaaaggaatgccgcgtcggatcagggagtacgacgaaagagaaacggaaaaataatttgacgaagagagcagagaaaattccctcacgaaaaaacgcggaagagaattgcgcggcgaaaaacgagggaaaaaggcatgacgaaagagaaaaattgcgcggcgaaaagcggggagagaaaagagtgacgaaaagagagaactttgggaacaaaagcggggagaaaagagataatcaaaagcggagcaggttggcgggacgaaaagagagaattgcgtaaggaaaagaagccgacggttgcgtgacggaaaacctcgcaagcggagaaaacaggggaaaaaagaagacgaaagcggagagaaaatacgaaaaaaaggaagggaggaaagaggcgttggaatattcgccggaagaaaaggtatatatttggctggacagctttcctctggaagagagagaaaagcggcggctattgtccgaggcgggaagtccgcgcgctttgacgcgggagtttgcgctttttagggaaagtctgattaaatctgcgggagaaagcgtatataataatatgctgcgttccctttcggacgggggaaaatactttcgcgcggcgacggacgctctcaaaaaagagggaatcagcgccgtcacgagggtttctttgcaataccccgacgcgctgaaagcggaggcggatgcgccgctcgttctatatgcaaaaggggacgtttcgcttttgaagtcgcgaatgttcaccgtggtcgggtcccgcagaacgcccgccgcggcgatgaggatcggcgcggaaatatgcggggaactttcccgggagttcgccgtcgtgacgggcaccgcggacggcggggacagcgccgccgtcgagggcgctttgcaggcgggcggaaagatcgtttgcgtgctgcccggcggcttttccgcgatgccgcagggaaattacgcccttttgtcccgcgtggcggaaaagggactcttattgtccgcgcataccttcgatacgcccgtccgcgccttttcctttgaaagcagaaacaaactgctggcgcggctcggcgaaggggtgctggtgctgggcgcggcggaaaagagcggggcgttgatcaccgcccgctacgcggcgcaacaaaacaagccgatattcgctctgccttattttcccggcgcggctgcgggcgcgggttgtaatgctttaataaaaaaaggcgcctgcctgaccgaaaattcggttgacattttgggtcggtttggtataaacttgttgaaggaaaaaaatacgccttcgttatccgatacggaaacggcggcgcttaccgctctcagaacgctcgccgaggcgcacgttgcggagatcgcggcaaagtccggcatccccctttttaagctctacggcacgcttgcgtcgctggaaacgaaggggcttgtcatgaggctcggcggcaatcgtttcgcgcccgtataggcgctttaaacgctttacgaaagagagagccgcgcggaataagggaatattacgccgcactgcgccccgtgtggaaaggacggaaagggcggcgcaaggaatgcggagaaagcgaaaaaatatttcggggacttgcggcgaaagggtatccttccgcaaagagagaagggagaaaaatgaaattcgggattttcaaaggcgggaaaaaatagccgccgcttaaaatttataaagacatccaaaaaggaatagaaggacatataatggatttaatcatcgtagaatcgccctccaaggcgaaaaccatctcaaaatatctgaaaggcaagtacagagtggacgcctcggcgggacatatccgcgatttgcccgtgcatacgctgggcgtggacatcaagaacaactttgaaccgaaatacgtaaattcggaaggcaaagaggacatcatcaagcgcctcgcggaagaaaccaagaaggcgaataaagtctatctcgccaccgaccccgaccgagaaggcgaggcgatttcctggcacctgcaaaacgttttgggactcgatccggacagcgacaaccgcatagagttcaacgaagtgtccgccaaggccattgaaaaggctttggagcacccccgcaagatcgactacaatctcgtggacgcgcagcaggcgcgccgcgtgctcgacaggctggtgggctacaagctctccaccctcttaaatcacaagatagacgacagcaactcggcgggaaagcgtagcctttcggggggcagggtgcagtccgtggcgctccgcctgatcgtggagagggaacgggagattcaggcgttcaagccgcaggaatactggaacctgaccgcggagcttcgggatcagccgaaaaaatacgcctctttcaaggcgcttctcgaaaagaagggcacgaaaaagtataagccgtcgtccgccgaggaaacggaaaaggtattaaaggagctggaagggggcgaatacgtcgtttccaaagtgaaaaaagcggtggcgaagtcgcacgcgcccgcgccgttcaccactagctccatgcagcaggacgcgtctaacaagctgggattcacttcccccgaaacgatgagcctcgcgcagcatctgtacgagggcatcgaaacggaaagcggcgaccatatcgccttcatcacctatatgagaacggactccgtgcgtatttccgcggaggcgcaggcggacgcgctgagccgtatccgcacgatctacggcgcggagtacgcgcccgaaaagcccaatttttacgcgacgaaaaagggcgcgcaggacgcgcacgaggcggtgcggcccatcgatctcgaaatgacccccgaaaaggcgaaagggcttttggacagaaagcattacgcgctctataagctgatttacgagcgttttctcgcttcgcagatgacggaggcgagatacaacagcacgcagatggaaatagacaattcgggctatatcttcaaggcgagcggcagagtgctgctgtttgcgggctataccaagatctatgaagaaacggcgcagaagaaagaggacgaggacgaaccttcctccgccaaactgctgcccgatttgaaggaaggggataagctcgatctcctctccatgctcaaagagcagaagttcaccaagccgcccctgcgctataccgacgcttccctcgtcaaggcgatggaggaaaagggaatcggcagaccctccacttacgccaccatcatttccaagctcaatcagaaatacgttaagaaagacggcaaatatatgctgcccacccccgtcgcatataacgttgtggatatgctcgtcaaatgctttcaggacattatggacgtcgggtttacggcgggcatggaaaccaagctggacgatatagagggcggcggcgtggattggcacgcggtcatcggggatttctatcccggatttgccgaaaaattgaaaaacgcctcctcctacggggacgaaacgacggacatcgtctgtgaaaaatgcgggcatttcatgatccgccgcatgggaaaatacggcaagtatctcgcctgctccaattatcccgagtgccgcaatatcgtcagcgaaaccaaggaggagatctcctccgtccgctgtcccaaatgcggggaaaatatgatcgtcaagagcggaaaattcggaaaattcctcgcctgccccaattaccccgactgcaaatccaccatgtccatgccctcggacgaggagccgaagctcgtcggaaagtgccccgaatgcggcgcgccgatgacggtgagaaagtccaaaaaaggcaagatctattacagctgttcgggctatcccgactgcaagttcatgagctgggacattcccacgggagaaaaatgccctcagtgcgggcaggcgctcgtgcagacggcgcggggaaatatcaagtgctcgaataaggagtgcgattacaagatcaaagcggaaaaacctgaaaaggagggggaaaagacggcgcaaaagagcgttcgtcaaagccctgcccccgtatcttccgtttccgaaggcggattgccgcccttgatggaggagcctttgtacgacggctacgacgagggcggatacgtgacggaaggctttgacgacggcgagtaaagacagaggcgggcagcgaacaaaggcggcaagatcttttcgaaagagaacgattgcacgcggcggcgcccgcctgtgaaagaaaaaagagggggatttcccgactctttgcgccgcgtctttttggaaaaaagcggacttttctcgacttgccgcgtccgatagttttggctcgcgggagcgttccgccgaaaacggtttgccgtgcgcgggtttttaggaaaaaaggtgttcggagggattcactatggaaaattcgacttccgcgccctcggtgcgcgtcgtaggcggcgggctggcgggcagcgaagcggcgtattatctcgcgaaaaacggaatacggacgcagctcgtcgacatgaagccgaaaaagtttacgcccgcgcatcacagcgcggacttttgcgaactcgtctgctccaattctctaaaaagcaacgacgcgcattccaatgcctgcggtcttttgaaggaagagatgcgcattttaggctccctcgtcgtcgaagccgcggacaagacttccgtgcccgcgggcgcggcgctcgccgtggacagggacaaatttgcaaaatacgtcacggacaagctgcgcgcctgtccgaatctttccatcctcgaagaggaagtcgtcgcgctgcccgacgagagtacgggcgggaacgtctataccgtcatcgccacgggaccgctgacttcggacgccttggcggcggatatagaaaaaaagacggggggcgggctgcatttttacgacgcttccgcgcccatcgtcgccgcagacagcatcgatatggagcgggcgtttacgggggaccgttacggcaagggcacgggcgattacatcaattgtccgatgacgaaagaggaatacgaacgtttcgtggaagagcttttaagggcggaacgcgcgactttgcgggagtttgaaaagcgggacgtcttcgagggctgtatgcccgtagagatcatggcctcgcggggaaaggacaccctgcgcttcggcaccttgaagcccgtgggactgtgcggggaggacggaaggcgcccttacgccgttttgcagctccgcaaagaaaacgaagcgggcaccgcgtacaatctcgtggggtgtcagacaaatcttaaatttcccgaacaaaagcgggtgttctcgctcattcccgccctgcatcgcgccgagtatctgcgttacggcgtcatgcacagaaatacgtatatacagtcccccgatgttttaaacagggatttttcgtttaagaataatgagaggctctatttcgcggggcagatgacgggcgtcgagggatatgtggagagcgccgccagcgggctgctcgccgccgttcatctggcggataaaatatcgggacgaagggcgcgcgcgttcgacagtcggacggtgtgcggcgcgttggaaacatacatttctacgccgaacagggattttcagcccatgaacgccaatttcggaattctggcgccgctcggcgaaaagatcagggacaaaagggaacgctatcaagcgcttgcggagcgcgctctcgccgccatgcgggaactgtcgttttgaaggggagaaaaaatgcggacctcccgcgcacaaaacgccgtgcgtcggaagcaggactgcggtattcgcctaaaaaatattttgcgaagagcctaaaataaagaagaggtaattatgatagaattcagaggcacgacgatttgcgccgtgaaaaaggacggcgtcacggcaatagcgggcgacgggcaagtgacgatgggcgaatcggtgatattcaaaaactcggcggtgaaagtgcgccgcatttacggcggaaaggtcattctgggctttgcaggctcggtgacggacgccttttccctctccgaacgattcgagggaatgctgaataagtttgccggcaatctgatgcgttcggcggtggaactcgccgacctttggcgcagcgataaaatcggcagaaaactggacgccatgatgattacggcggacgaaaacaccctgctcattttatcgggcacgggcgaggtcatcgagccggacggcggcgtctgcgcgataggaagcggcggcaattacgccctcgccgcggcgcgcgcgctgtacgcggaaacggattacgacgcggaaacgatcgccaaaaaggcgctcaaaatcgcgtcggagatctgcgtgttcacaaacgacaatatccgctgcgaaacggtgggcagaaaagcggaagaaatttcggaaaacccgcccaaaaaatcccgcgcgaaaaaagcggacgaaaaaaaggaggataaatgatcatggatctgtcccccaaacagatagtcaatcaattggataaatacatcatcggtcaggacgacgcgaaaaaggcggtggcgatcgctttgagaaaccgctatcgccgcgctcagcttcccgccgaggtgcgcgaagagatcacgccgaaaaacatcatcatgaaaggacctacgggcgtgggcaaaacggaaatcgcaaggcggctcgccaagctcgtcaaggcgccgttcgtcaaggtggaagccaccaagtacacggaagtgggatacgtcggcaaggacgtcgagggcatgatccgggatctcgcggagtgcgcctatcgcctcgtcaaatccgaaaaggaagaggaggtccgggcgaaagcgacggacgccgccgaaaagcgtatcctgcgggtgcttaccgaaatcaagaaagaggacaggggcgaaacgcccaaggaaattttcgaggcaaaccttttggaaggattgagaaagggcacctacgacaacgtcgtcgtcgaaatggaggtcagcgatattccgcaggcgatggagttgattcccggcggcgcgtccatcagcatcggcagcattttcggggatatgttcaaggaaaagcgcaaaaagcgcaagctgaccgtcaaggaagcgatggagatagcgctcgaagaggaagcgtccaaactggtggacgacgattccgtaaaagccgaggcgctgtaccgcgcggaaaacgacggcatcgtatttatcgacgagatcgataaaatcgcggggaaaggaaaccaaaacggcgcggacgtttcgcgcgagggcgtacagagggacatcctgcctatcgtcgaaggctccaccgtggtgacgaaatacgggcccgtcaagacggatttcatcctctttatcgcggcgggcgccttccacgtgtcgtcgatagaggatctgatccccgaacttcaaggcagattccccgtttccgtggaattgagcagtctgaaaaaagaggatttcgtgagaattctgacggaaacggaaaattcgctcacctttcaatacgaaaaattgctgggcgtggataatatcgacctgcatttcactcccgaggcgatcgagcgtatcgcggagatttccgtggacctcaacgccaccagcgaggacatcggcgcgcgcaggctgcataccgtcatggaatacctgctcgaagatatttccttcaacgcgggcggcggggactatcctaccgtcaccctcaatatcaccgcgcaatacgtcgacgagcatttgagcaaactgacgggcgacagagatcttaaaaaatacgtgctataaagtcaaatcgcgtcgggtcggcttctttcttcgggcttaaaggggagcgaaaagggcggaaaagcgcgcggatttttgtcctatactccccgcgcctgtttcggacggaagataagcggagagggaacagaaaaactttgcgctttgcccgtcgttttcgggcgggatgtggagaattccgcaaaagaagctgaaaattttttttgttcttgctttttcctgccgtgccgagtccgggcggatagggcggcaagaggaagcggaaaaggtctgcggtctgcgcttttatccttcgtcggttttccgaattcgtatgagggattcttggtaataaaacggagaaaaattgacttcgccgcaaccctgccccgtcgattttataagatttacgaaaaaattgcaagagggcgtccgaagaaacggtttcggacgaatacagcacgattctgccgcagccgatttctgcggctcagagaatatacggaaaggacatcattatgataaacatacccaagggcacgaaagacgttctgcccgcagattcctataagtggcagtacgtggagggcgtcgcgcgcgaaacggcaaagctttttaacctcaaagaaatccgcactcccgtattcgaacacaccgagctttttctgcgcggcgtaggcgatacgacggacatcgtcaccaaagaaatgtataccttccgcgacaaaggggacaggtctatcaccttaaagcccgagggcacggcgggcgcggcgcggtcgtttatcgaaaacggcatgggaaacggcgttctgcccgcgaagatgtactatctcattcccgccttccgctacgagcgtccgcaggcggggcggctcagagagtttcaccagttcggcgtggaagtgttcggcgccaagggcgcggatacggacgcggaagtgatctccctcgccgattcgctcctgaaaaaattgggactgaacgtaaaactgcatatcaattccatcggctgtcccacgtgccgcgccgcgtataacaaggctttgaaagaatatttcgcgccgcgccttcacgagctttgccgcgattgtcaggcccgtttcgaaaagaatccgctccggcttctcgactgcaaggaagaaagctgccgcgccatcaacaaggatgcacccgtcattttggactatctctgccccgaatgcagggagcacttcgaaaatttgaaggagtgtcttgcgctcgcgggcatcgagtacgaaatcgatccccgcatcgtccgcggactggactattacacccgcaccgtgttcgagtttgtgtccgaggatatcggagcgcaggggacggtgtgcggcggcggcagatacgacggactgatcggggaaatcggcgggtcggctacgccggcggtcgggtttgcggtgggaatcgagaggctgcttctcgtcatggaggcgacgggcgtgaagattcccgaggccgattctcccgtcgtctatatcgcgggcatggattccgtctgccgcaaaaaggcgttcgagcttgccgtccggctccgcgaaaagggcgtctatacggaaatcgaccacatggaacgctctttgaaggcgcagttcaaatacgcggataagatcggcgcgaaatatgtggcggtcatcggcggcaacgaattggaaacgggcgtcatgaacgtcaagtgcatggcgacttcgacgagcgaatccgtgccttttgccgaagccgtaagctatttcgaaaaaagataattccgcgctgtttatcggcggaaaatgcgcaaaataaccataccgaataaagataaaggagaaaaatcatggtaaaatatgtaacttcacaggaactcgaagaactcatccaaggggacaaacccgtcgtgtgcgatttttgggcgacgtggtgcggaccgtgcagaatgctggcgcccgtattcgaggacgtttcggacaagctggaagacaaagctgtgttcgtgaaactggacgtggacgaaaacgaggatgccgccgtcaagtacggcattacgtccattcccaatatcattctcttcaaaaagggacagccggcggcgaatcatctcggcttcattcccgaggaaacgctgaaagattttatcgaaaagaatctctgacgcgcggcggtgctttttgtccgatttcgggcgaaaagcattttttttataaaaatacggcgaaaaatagaaatgatacaaaaagcggcaaactgtcattttctgcctttccgtccttgacgataagaatcgggaggggtataatggcgtaaaacgatttgaaaaggagaatttcccggaaaatgagttcccgtgaaaaagcggccgaacgccgcctgacgagggagatcccgccgcttaaaacgccgattgccgtaaacgccgtatttttggtctgtattctgtttttcggcgggctttatcttagttcgaaatattggtcgcagagcaagccgctgcaagattctttaaaatccgtcgccagtgtgctcttcttgctttgctgtgtgttcaacgtctgcttttccgaggcaagggacaaagaaaagcgcggcgtttcctatcgccgtctgctccttttggggcaggcgttcgcctgcacgggcgacattgtgctcaatttcgattttaccgtcggcgcggcgtttttcgctttgggacacgtcctgtttttcgcggcgttctgttctttggagggcttttctttccgaggcttcgcggcatttctcgccgtggcggcgctgtctttttgtctgctccgtttctatcgcggtttcgattttaagggcttggaagtcgtcgtatacgcctatgccgtcgtgatttcctgtatgctcggcaaagcgttttccgtcgccgcctctcctattctcgacaaacgggtgcggggcttcgtccttttcggagcgctgctcttctatctctccgatttgatgctggtctttcaccaattcggaggcgggggaaggcttttcgacgggctttgcctctctctttattatcccgcggagtttttgctggcggtttccgttttggcggtgtctgcctacgggctgacgaaggaggaaaagcccgtttctaaaatgccctttttgcggcggctgtattgccgttcctatcagaccgtgttcaggctcgccatcccgtttttgccttatcgacgtccgcagatcctgcataccgtttccgaaacggcagacgttctcaaaaaggcaggcgcggacaaagtgctgctcgttacggacgcggggatttacgccgcggggctgacgaaagagtttgaaagcgtatgcgcgaaagaaaacatagacgtattcatctataaggataccgtggcgaatcccaccgtttccgacgtggaaaaggcgcataccatgtatgagctgaacgaatgcaaagccatcgtcgcgttcggaggcggctccgcgatggactgtgcgaaggcggcgggggcgcgcgcggtgaatccgaaaaagccgctgtcgaagatgaagggcgtcctgcatattttccgtcggctgcctcttctcatcgccgttcccacgaccgccggcacgggaagcgaaacgacgctcgccgcggtcatcaccgacgacgcgactcggcacaaatacccgatcaacgctttttgcctgattccgaggtatgcgcttctcgatgagaaagtcacctttgccctgcctcccttttttacggcgacgacgggcatggacgccttgacgcacgccgtggaagcttatatcggcaattctaccacgcgggaaacgcgcgccgctgcggaggaagccgtgcggctgattttccgatatttgccccgcgcctatgcggacggaaaggacgcagaagcgcggaagggaatgcagcgcgccgcctatctcgcgggcgtcgcctttaccaagtcgtatgtgggctacgtgcacgccgtggcgcactcgctgggcggaaagtacaatattccgcacggcttggcaaacgccgtcattctgccttattttctcaaagaatacggtttgaacgccgcgctccgactcgccgcgctggcgataaaatcgggcgtcgcggatcccggcggggattttaaaggcgccgcggagaaatttatccgccgtatagaggagcttaacgaaagtatggggattccccgtacgctgagcgggattcgtgcggaagacgtccccgaacttgcggctttcgcggacgcggaggcaaacccgctctatcccgtacccaaattgatgacgaaaaaggagctggaagtgatgtatttcaaaatttccgaccacgagggctttcccgtggacaaagagggaaaacccgatttcgacgaagcgctgcaaagacaaaaaaggtttttccaaagcggcgttactctcaaccctgcctatcgcgtttgcgctttgaaggcgctctataacgccgttaaggacgcggaaggggagataaacgaggcgttgaaggcggaccttggaaaaagcgccttcgaaagctatatgtgcgaagtcggcatgacgctgagcgaaatttcctatatgatcgggcacgtcaggcgtttttccaaaaaaaagcgggtaaagaccccgctcgcgcaattcgcctcgaagagttttattcagaaatcgccctacggaacggtgcttatcatgagtccctggaactatccgtttatgttggcgatggagccgctggcagacgcgctcgccgcgggaaataccgcgatcgtcaagccctccgcgtattcccccaacgtttcccgcgttttgaaagatttgatcgcgcgcacctttccctccgaatatgtcaccgtggcgacgggcgggagagcggaaaacgccaaacttttggaaatgaaatttgataagatcttctttacgggaagcgtgggcgtcggaaaagaagtgatgaaaaaagcggcggaaaatctcgtgcccgtcactttggaattgggcggaaagagtccgtgtatcgtggatgaaacggcgaatctcgctttggcggcaaaacggatcgtcttcggaaagtatctcaatctcgggcaaacctgcgtggctcccgattatgtgtatgtcgccgcaaacataaaggacgcctttttgacggaagtcaaaaggcagatcacggcgcagtacggaaaagatccgctcaaagaggatacttacggaaaaatcgtcaaccgcaaacatttcgacaggatttccgcgctcatcgacgggaaaaaagtagtattcggcgggggcagggatgaggcgagcttacagatagagcctaccgtcctggacggcgtcacctgggcggacgaagtgatgggggaagaaattttcggccccgtgatgcccgtgctcacttttgaacgcatggacgaagtcattgaagaggtcaacgcccgtccgtcgccgcttgccctgtatctcttttcctcggacaaacgcacgatttcccgcgtattggagaggtgccgtttcggaggcggctgcgtcaacgacacgattatccatcttgcgacttccgagatggcgttcggcggattcggcgcgagcggtatgggcagctatcacgggaaaaaaggcttcgagtgtttcacccacgaaaagagtatcgtcgataaaaagacgtttatcgatctgcccatgcgctatcgtccctataaaaaattcaatgaaaaactgttgagatttttcctgaaatagagcgcgtttttcagcagttcagccggatagcggcgagccgttttccccaagaaaacgttttagggcagactctgtccctttgctattcgcagcgtcaggatgcgtgaacgcttcgccgaagttttccgacattcgtttggctcttgtcggtccgcaagccgccatgctttcgtatcccttacggacgaaaaagggtgttttgccctggctcctatactttccgacggcgtttagagcgtctgcattttgagaaccccgaaaaagagtttgagtaaaatcctcgggcgagtcgccggatcccgccgtgccgaaaaaagagtttcttttagcgaaggggtttcaaaaaggagtcgatagtttcgcctttatccccttgatttcatcaaaagccgccgaaaataatcttcgcttgcaaagcgatgggggacggcgcgacgaaatatacgaggtcttttcgggaatacgggaaaggattgcgtctgccggcatagccgtatttttcctgtcgttgggataaacgacggaatatttcatttttttctaaacgagagtcatgttgagttaagggagcggagaagagttttccgcttccttttttggataccttaaagtaaataaggatgcgcaggtttctatttgttgacgagagccttatcgttgagaaagatagtttttaaagaacgtttttcaaaattttttcgcggcggagatggactcggaatggaaacgggcgacgacgggagtaggaaaggatcgagcgtccgtcggtgaaaagtgttcgaaggaaaagaataaggagtaaaaaaggaacgtggcaaacgatagaaagaaaattcgaagagtagaaacagaaaagcgacaaaccgagaaaagaagcttggggagtggaaacagagagtcggcgaaacgatagaaaggaagcgcagggaataaaaacggaatccgaacagaaagacagaaaaaatgcggagagtaaaagcggggcggcgcataaaaaatcagatcggaaaacagccgacggagcaggagatgagataggtaagcgtattatttgtttttattaataattttccgctctgacctggaaatagctctggggatgcgcgcagacggggcagacttcgggcgcctttttgcccacgcagatatgtccgcagttggcgcactgccataccacgtcgccttccttagagaataccaaatcgcccttgacgttggcaaggagtttcaaatagcgtttttcgtgctccttttcgatggctgcaacgccgtcgaaaagtctggcgatttcgtcaaagccttcctcgcgcgccgtcttggcaaattccgcgtacatatccgtccattcgtaattttcgccctccgcggccatgcgcagattgtccatcgtgcccgaaacctgtccgccgttcaaaagcttataccacatttttgcgtgctcgcgttcgttattcgccgtttcttcaaagatggcggcaatctgcacgtatccgtctttcttcgctttgctcgcaaaataggtgtacttattcgtcgcctgcgattctcccgcgaacgccgcctgtaagttcgcctccgtcttgctccctttcaagggattgacttcctcaaacgcggaagcgggcgctttgcatttggggcaaacttcgggagctttgtccccttcgtgtacgtagccgcagactttacagataaattttttcatgtccttttacctctttgaatttttttaccgattttttaatagttcttaataggattaagttttattaatgtatttatagtataatacaaaatgtcgcatttgtcaatagttttcaggaaaatttttgaaaaaattttttcttttgacgaaaatttttgaaaagggcgaaaggatgaggagaaaagggaaaaaacgggaagaataagagggacgagccgcgaaaaaggcaagggaaggcggggagcggaaattataaaaaagggaaaagagaaaaaagggaggagaaaggcaaacaaaagagaatcgatgaagcgcggaaaaggaaaaacggaagcggggcgagaggagaagaaaggacgcgcggaaaaaaattattcaaaggcgcaggaggcggacagacgaacggaagcggcgatcggaaaaggaagaagaacgaagggaaaaaggtataaaggatgggaacgagaatacggaagcggagaaaggcgggaaaataaatttccatacagttatctgtcatgacgtaagttgacaaaaggcggaaaaactgatacaatcatagaaaactcgcagacagcaagaaaataaggtggtttgggcatgaaacgcatgaacgaaagacggaaaaaaagaatagaaaaaaatatactgaaaaaccgcagctataaagtactcatttataaccgctttctcctgactctgcttttagttctcttacagatcacgatatacggcgtgatgctcttccggttttataacggtttccgcgccgtgatgatcacgatggatatcctcgcgctggtgttcgtgctctacgtcatcaaccgcaacgaaaaaccttccgcgaagctgaactgggtgatcatgattctcgccatgccgatcttcggaatttccctctatctgcttttcggggaagggcgtcctacccgcaaaatgaacaggcgcatttccgccgccaagcgcgaaaacgcgggactgttgatacaggatgcggaggtaaagcggcgcgtggacgagggcgggcgcgaggcgcaggcttgccgctatctcatgaactatgctaattatcccgcctatgcggacggagaagtcacgtattatccctgcggccgggagatgttcaaggatatgctcgaagcgatggagggggcggagaagttcattttagccgaatatttcatcatcgcgggaggaaaaatgtgggacgctttccgcgagctgctgctccaaaaggcaaaggcgggggtgcaggtgcggttgattttcgacgacgtgggaagcttgtttttgctgccgcccaaatacgacaaatatttggaagcgctgcatcccaatatcaaatgctttacgttcaaccctgccgttcccgtttttacgatgcgcatgaataaccgggatcaccgcaaaattctcgtggtggacgggaaagtgggctttacgggcggaatcaacctcgccgacgagtatattgacgaaaaagtgaagtacggacagtggaaggatacgggcgtgcgcgtgacgggacgggcggtgagttcgtttacgatgatgtttttcaatatctggaacgcttttagaaaggataaggaaaagacggaagcttttatcgcgcccgagcatttgaaagagatgcaggcggcggacggagaaaaagcgcccgcgaaaatagaaaccgtgggcaaaaacggaacgcatattcccgtggaaaagatggggaaaacggatatcgcggagggcggctttttcgtacagccttacgacgattctcccctggatcgggagagcgtgggggaaacggtgtatctcgacatcatcaaccgcgcgtcaaaatacgtctatatttttacgccctatctcattttggacgattttgtgcgcacggcgctgtgcaacgcggcaaagcgcggcgtggacgtgcgcatcgtcacgcccgggattcccgataaaaagatggtctttcggctgactcgttccaactacgcgcctttgctcaaatcgggcgtaaaaatttacgagtacacgcccggtttcattcacgccaaaagcatggtatccgacgatacttgcgccgtggtgggcaccatcaatctcgattatcgcagcttatatctgcattttgagaacgcggtctatttttctcattgttctgccgtgatggacgtgaaaagggacggggaaaaagtgttcgacgtttcaaaatatatcaccatggaagatacaagacagaccttcgtcggcaagctggtggactccgttttgcgcgttttcgaaactctgctgtaagggatttccgtgaacagactttttaaaaaggtggatagggaatgttctttcgcccgacggactcgttcgaaggaggggtagacgggtttcaaggagaagatgaaagcacttaaacggcgtcgaagcgattatcgcaaagaacggatagaaaaaagcaagacgggtaagggaaaacgatgaaagaaaatcttgtggaagcctcggactggacaagggacgtggaagcaaaactgaaaaggaaaaatgaaatcttattttcccgtaaaagcaaatgtctgcaagagcttttggcactgattcgtgaacaaaaacacaggactttggtgttatgggcgttcgcctgcgtagaagttccgctgcaacgtttgaaagaacgttgcccgaacgaggaacgccccgcccgctccgtccgcctatgtcggcaatgggcggcgggagaagtgaaaatgccgacagccaaaagggctttgctggaagcgcacgccgcggcaaaggaggtcgaaggggcggaaaatgccgctttatgccatgcggtggggcaagcttgcgcggtcgttcatgtggaaacgcacgcgatcggccttcccttttacgaactgaccgccatcgttcgggaatgccggggcaaagactatcgcgcggctgtggaaaagaggatcgaggagtatatcgactgcttgaaggactgcgcggcgcgtatagagagctttggattttcatgggcggagtttttgctcgacgatagccgtccgaacaaggaaaaagaactttttatgaaagagagaaccgtttgaaaggcggttctttttttgcgcaaacctgggaatttaaaatcgcgcacaggacgaaagcggagagaaaattggaaagggactatgtggagcgagtaaaaggggggcagggctgcgatgaataaaaaaacttttcccgtttgaagcgggaaaagagaaaaatgtgcaaaagttacaggatgcttttaccgtatgttttttgaacgaaacgtcaaaaaagaataaggcgccgcggggaaaagggaaaaatccaagcgccttttgggggcgaacgcctaaaaagattttgagcaaggggcggaaaaaatcgctaaaaagccgaattgtattttcagctaaacattaaaaaactcagacgatgcggcggtaataataatacttttcgtcctcgccgattttttgcatgaccgaggagagcatctttgccgaagcgatattttctttcaggcattttccgtttatttggatgagttccagcgtataaatggcataattcgcaacgagtccgaaagcgtatctgccgattccctgcccgtccgcttcggggagtatccgcaccccgatttccgcgccgccccggaagtcgaaattgtagaggatggcttccccgacgaatttgcctccctgacgtatggcgaaattcatcgccatgcggttcataaaatcttttttctgatctttatagaaaaagtcgcgtttgggatgcgggcagtcctcccgatagtcgtatccccaccagcgattgcgttcgtcgtccagacataaacgattgtaggcggggatgtctttttccgtgataggggtcagggaaacgccgttttcgcccttgatgacggggacttttttcaggcggttgatagcggtcttgacgtgtatttcgtgctttctgagaatttccaagggctgatattgaagcttggaaatgcgcagtcccttgctgcccgcgtcgtcctcgcggttgatatatttgacgttttgcgcgaacgttttggcaaattcctgcaccgtggcgggataaatgccctcgtattcggtgagggccttttcgatatggtcgatgagcgtttcgccgcagatctcgctcagacagaaggagatgacctctccgtttaaagtgaatcctccggaaataaacatttccgagccgagatattccgtcatcgcgtgggcgaatttcagctccgttttggcgcccggaacgtcgttgcgatcgccaaattttttccaaaaagcgtggatgcgaggcttgtccgcggcgccgaacacttcgaatttcgcctcggggtacaaattatgaaatttgcggatatggtttctttgtcccgcatatttttttccctcgaacttgataaaatcgcccgccaaatagagataatcgtcgaaattcctctgcacccgtatctcgatattcggataacagctcaacacggtgcagacggcgcaggcgggcacgtcgcagagtcggaagggaataaaattttccgagcagtattttccgcaggcgttgagcgccccgacgacgtccgcttctttggacaggggaacgggatagtcaaaataatattgaccgttccatttcccgcgtacgagcaggcatccgcacgcttcggcgtattcgtagcccgcgttctgccacatgattttaatgcccgccgaatagtcgctgattttgtaggtgcaggttttgtaacaggcggaaattttggcaatgttggttttatcgatgggagtaaactgcatgatgtccttcttttttattttttttcgtgctctatttttgggaagcgaagccgcggaatcgcaaagccgatttccgtttctctgatcgcataaccggacgtcctgcttgaacagggcatcaaagtgccgatacatacttcgtttgtgcttccgcatttttgcttttattataacatcatcgcgctctgttgaaacgcaaaacggcgaattcttttcggcagactgatttcgggacagggcgctaaaataggggcaactgcgtcgtgcccgtatactttcgactatcattatagcaaatccccgtttggaattcaagctatttccgcccggattttttatgccgtccgcttcttttttaacagaggtttttgaatttgctttgcgcgtcgggaggatagggcgcaaagggcgggcagggttgagaggacggataaaaatgaagaaagcggcggtgaaaaaacgcatacttttaaaaagctgtgcgtccgaagaagagggaaaggatcctcttacttcggaaatttatccgtaaggcgaatccggcgccgcgagcgccggcgataaagggaccgtgggagatacgccgccttttcgtcccgtccgaaaaaagcgtttgttcaagagaaaagtggattttgggtgaaaatacccgccgtatgcttctattttgttgcggcggcggtaaatttatgctaaaatgaaaacagaagaaaacgggaagggatactatggcgaaaaagaaattgacgagagcggagcgaaaagcggaagaagagcgcgtcgtcgccgaaatggacgaggcgatgcgggcgtttcaggcggaaaaggcgaaagcggaggcgtccgctcctttacaagaggacgctgacaatgcaaaagaaaaggaaaattccccttcggagcaacaaggggatgcagggatttctcagtcggacgccgtatacggaccgagcagcgtgcccatgccgcagcagatacactgccgcaaatgcgggacggtgatggaaaacggggtgtgtcccaagtgcggatataaactgtacgtgccgatggacggcaaaaaactgaatcggatccgctggatcgtcggcggaatctgcgtagcggcgtttgtcgtttggctgattataaaaagcgtaaagggataggcaaaaatgctcggcgggggaaaatttacgcccgattgcgcaaatatccaaaaattcccgtcgtttacacgctccctttaacttgactttttcgttattttttgctatactatataaagaatcgagaagaaaaagcacgtagaccctccgacggattctacgtgcttttttgtatctttatttgaggttcgcggaacctgacgaaaaaggaggattttttatggaaaatgaaactgccgcgatgcaaagcgcagcggaggccgctgtggagaatcagactgccgtaaaacaaatgatcgaggataaaatcgttatacgcatgagaaaatgcggtcgttttttgctgcacgactgcgcgcaggaggaaaagaccgacagccgcgttttactgtcctgcctggacgaacgggaaaaaaaggagttgtccgtactgttgaaaaaatgcctcaacgaatggaaaaagtgattttttctgtccccctgttttttcgcagccgtcgcgttcacgcctaaaacgcggacgatcgacggctcagagaaaacgcccttactccctgtccaaaccaaagccgatcggcgggcgtattttgaattttcacgagaacgccgcccgtcgcttgaagagaagcgggaaaagtaagatcggacgattcccttctcgtctgccgaacagatcccctgtcttggcggaaacgagaattgagaaaacgacaatatttttcgtaagaaggcgggggcgggcgaatacaccgccgcagtgcgccgacaggcgacaaagcgttgcgaaatatttatcaaaagagagatcgtttgcgtcaaaacgcccgttgccgttctttgcaatcaattgctttcgacgttttcgtttcggtctgccgaacttcccggtttctctaaacggtgaaacaaaaataaggactgccgacggagcacgcctcaaccgcgtgccccgtcttttttggatttaaaaataggattttacgaaaagttgttgtgaaaagcgtttaaaaagaggggaaaaggtttaaaaatataacgaaaaaagagaacgaaaattccgtccgtttggggaaaggcaagctgctccctaaaaagcgtacagggcggagaggacggaacggacagccgaagaacggcaaggaggtagttatcatggatatgcggaaatttacggaaaaatcggtgaacgctttgcaggacgcgcagagcgtcgccaaagaatacggcaatcaggaaatcggacaggtgcatttgctctattctctcgtcagcgccgacgaggggctgattcctcagcttctgaaaaaaatggaaatcgacctgtccgctctgcaatcggcggcgcaggcggagattgcgcgcgctccgaaagtgagcggcggagaacaatatttatcctcggctttggcggaggcgctcgacgccgcggaaaaacaggcggcgaaaatgggggacagctatatctccgtcgaacatctcttttacgggctcaccgaaaagccggacgggacggtgaaaaagctgtttaaacagttccgtgtcgaacagaacgcctttatgcaggcggtggcttccgtgcgcggcaatcagcgcgtcaacagcgaaaaccccgaagatacttacgacgttctcaacaaatacggcaccgacctcgtggaaaaggcgcgtcagaacaagatagatcccgtgatcggcagggacgaggaaataagaaacgtcgtccgcattctttcgcgtaagacgaagaacaaccccgtgctgatcggcgaagcgggcgtcggcaaaacggcgatcgcggaaggtctggcgatccgtatcatgaggggggacgtccccgattccctcaaagaccgcaaggtgttttctttggatataggcgcgctgattgcgggggcgaaattccggggcgaattcgaggagcgtttgaaggcggtgctcgcggaagtgaaaaagagcgagggcggcatcattctgttcatcgacgagctgcacaccatcgtcggcgcgggcaagacggacggcgcgatggacgcgggaaatttgttgaaacccatgctcgcgcgcggcgaactccattgtatcggcgccacgacgctcgacgaatatcgtaaatatatcgaaaaggatcccgcgttggaaagacggtttcagcccgtcatggtgggcgagccgaccgtcgaggacaccgtttccattctccgcggcttgaaggagcgatacgaagtatatcatggcgtcaagattcaggacaacgccctgatcgccgcggcgaccctttccaatcggtatatcaccgaccgttttttgcccgataaagcgatcgatctcgtggacgaggcgtgcgcgatgatcaagacggaaatggaatccatgccgtcggaaatggacgaaatttcccgaaaaatcatgcagctggaaatcgaggagaacgcgctgaaaaaggaaacggacaatctttccgcggcgcacctcgacgaaatacaaaaagaactcgcggctcttcgcgccgattatgcggagatgaaagggaagtgggacaacgaaaaaaattctatcgggaaagttcagaagatccgcgaggaattggaacaggcgaacgcgcagctcgaaaaagcgcagagggaatacgatctcgaagcggcgtcgaaattgcaatacgggcgcattccgcagttgaaaaaagaactcgaagagagcgaaaaggcggcggcttccgccaaggattcgacgcttttaagagatcgcgtgacggaggaagaaatcgcgcggatcgtggcgcggtggacggggatccccgtttccaagctgatggaaggcgagcgcgaaaaattgctgcgcctgcccgaaacgctgcacgaaagagtcgtcggtcaggacgaggcggtggacgcggtttcggacgcgattttgcgctcgcgcgcgggcatcgccgatcccgacagaccgatcggttccttcctgtttttgggacctacgggcgtcggcaagacggagcttgccaagacgctggcgcgttccctcttcgacgacgagaaaaatatggtgcgaatcgacatgagcgagtatatggaaaaatactccgtgtcgcgtctgatcggcgcgcctccgggatacgtggggtacgacgaaggcggacagctcaccgaggcggtgcgcagaaagccttacagcgtcgttttgttcgacgaagtggaaaaggcgcacccggacgtgttcaacgtgcttttgcaggtgctggacgacgggcgaatcaccgacgggcagggcaggacggtggactttaaaaataccgtcattattctcacctccaatctcggctcgacggcgattctcgacggcattcaaagcgacggcggcatttccgaatcggcgcgtgcggaagtggataaactgctgaaagcgtctttccgacctgaatttttgaatcggcttgacgaaatcgtctttttcaagcccctgacgaagacggaagtgggaaagatcgtcgagttgctcgtggacgatttgaaaaaacgtctggaagaaaagcaattgtatctgtcgctgacggaaaacgccgtcgattatatcatcgacagcgggtacgatcccgtttacggcgcaagacctttaaagcggtatcttcaacatactttggaaacgatgctggcgaaagaaattctggcaaacaagttctccgcgggcgataaactgacggtggacgcgaacgcgaacggactgttcgtgaaaaaggagtaagtttgaaaaatataccgtgtatgcggcaaaatatggctttcccgaccgcgtcttttgcacggtcgggattttttgtcttttcttcctaccgatttggtaggttgagggactattttggaaaaaggtggtatacttacggtaattagaaaacaccgacggaaaaggagattttttatgaaagagagaaaggaattttcaaagatcataagagaattattaatcgagaattgtttaagccaaagctctttggctgagattttggagattcatcccaatacggtaagcaaatttgtgcacggaaaaatgaaaccgaattatgatgttttaaaaaagattgcccaaaattttgaggtttcgggagattatctattgggtctgaaagaatattgaaatatgcaagaggctttttgtgattttctatttttaatgttttttgaaagtagttgctttcgtaatacataattcgcttgatatcgtttgtgttttggtatataatatttattatcaaataaaattat

SEQ ID NO: 3782 - DNA, 6371 bp, Unknown
  16S sequences of unknown bacteria
gatcccgaccattgcgctgggggtgcgccggctgcacgacatcggaaaatccggcctgtggtatctgctgattctggttccgctggtggggccggttattctgctgatatggttctgccgccttggggactatggcgaaaacgcctatggccccgatcccaaagtggcagagatggcataacggcaaaacgccgccctcagggcggcgttttttgcatacgaaaaaacaggaggaaaggccactggcctttcctcctgtccataagcgatcaggtatcgattttttcctggaacacaccgcgttcctgggcgggatcatagttggtgtagctgggctttttgtgtttctgctcggcccagatttccttggccacaggcgcccatgcggcggcgtaatcgtcgcacttggcgcacaaatgatccacgctttcgggggactccatgtcggtggagtgggcgccgctttcttccaccattttgcgcagcatctgcggattttccagcatggggcaggggcgcagatggtcgcggttaaagggctgttcccggtgataagccatgaacagggggcttttaagcacttccagcagcgtgtgatccttgatgttcacgttggagtagtggatgaatacgcagggttcggcgtcgccgttggagttgatgtggaaatagttccgtccgccggcaatgcagccgcccacgaactcgccgtcgttctggaagtccatggtgtagatctgcttgccgccctcgttggcgcggatctcgcgaatgcgcttgatcatatacttgcgctgttccggcgtgggcatcagctcgggggaagcgccgttgccggtgggcatgaagtggaaataccaggagaacatgcagcccttttcgatttccagatccaggaactcgtcggatgtgaccacctcggcgttggcacgggtatagcacacggaggtgccatagatcaggccgtagcggttcatcagatccatagcgcgcatgacattgttaaaatgaccggcgccgcggcggccgtcgttggcttcttcaaagccctcgaggctcagggagaaagacagattgcccacccggacgcattccttgcagaactcctcgtcgatcagggtggagttggtgaaagagtggaactccacgtcgtagtgcttttcgcacaggcgcaggatatcctttttgcgcaccagcggctcgccgccggtgaacatatagaagtaaatgcccagctctttgccctgagtgatgatatcgtccatctgctcaaaggtcaggttgtggttatggccgtattcagcggcccagcagccggtgcagcgcatgttgcaggcggcggtgggatccatcaggatcagccaggggatgttgcagtggtgttcctggcgcattttgcggatggttttggtgccgcggaaagcagcttcgaagcccaggttcagcgcggtggttttgatcacgttggggtgcaggcggtgcaggtggcggttcacaaactgcatccatttgttttccgggttgctgatataggcgcggatcgcttcaaaggtttcttttttgaacgtatcgcccatgaacttctgggaaatatccagcacatccagaagacccttgctggtgtccttttcaatgtgcttaagcgccatgtccagcgccacgccgaacgcggcgcgctgggccttgtgcgaaagagtgtccattgtggttgccataattcaaactccctcatttctgaaatgttgtgtgttctatcggtcaacggggagcgcgcgtcgcttcccccaaatacagcattcggggctgcgcagccgttccggtaaaagtttttttacgccattggccatttattgtatcataaatcaaccttttgtgcaatctttttacgcacaaacaggaagaaaatcggaattttgttgtttttttgcggcaaagcggtgggatttcgttctctttttgccattccgacgaaaggcatgctgtgcaatttgtacatcaactgctttttgtccaaaaacgctgtgttcagaaagggtatgcaagcgcggaaaaggcgggaatgtaaagatcacaaagggcctgaatttcctgctgctgtgcggcttgggaggcgtcatacactgccgcgagtaaaaaaccggaggccttggcggtgcgcatggcaaagagcgcgtcctcaaacacccaggtctgggctttgggcgtgccgaggaaagcgcgggctgcttcatacacatcgggcttggctttgcctgcgccgacctctgtgcaggtgaagacggcggagaaaaagggggccaggccggtgtattccagcgccgcttccaccagcggccggtcggtggaggtggcgatcaccatgggcacgtcctgtttatgcagttgttccagccagctccgcgcaccgtctttgacgcgcacgcgctgagtgtaaaactgcttcatcagagcgttgatgccgtcgcggatttcgtcggcgccggcggaaagcccgtattcctggcgcacccagtcgcagccctggtgcagggtcatcacctttaggtgatccatcagatcgggttttggctctttgccatagatctggcgcaggcagtctgcgggaacctgattccaataaaacatggagtcaagcagtgtgccgtccatatcaaaaataacgccggcgggtgttgtcatgctcagcgctcctttcaaaaatccattgttacaggcgggggagccaggttcccgcgccgccgcagcgttgccggaaagatcggctgcggcttattttgtgcttagtatatactgttttctggaaaaagtaaagagaaacataatataatgtaattattaatacaatattcgggaaatgtaaatgatttcttccagaataaaaagaccgcgccggcggcgcaatgggaaatgcaacagttggcattttctccgaattatgctacaataaaacatctatattattgaaatccaaggaaaaccctttgcgtcggcgctctgcgcctggtgcggggcggagaacaggcatgtcgagagaaacaaagaatacacttttgctgcagggcagcattttggctgcggcgggtatctttaccaaattgatcgggtttttgtaccgtatccccatggccaacctgctgggcaatcagggcaacggcgtttattccgtggcctacggaatttatacgattacgctgacgctctcttccatgagcctgcccacggcggtgtccaaggtggtgtctgcccggctggcgcgggaagaagggcgaaacgcgtcaagggtgttggccatggcgctgttgtttgcgctggtcatgggcacgttttcttttagtttgctctatttcggtgcggatatgctcgaagaactgtacagcactgcgggactccaccgcccgctgcaggtgctggcccctacgtcctttctgttcgcgtttctgggcgtgatgcggggctatacccagggcagcggcgatatggtgcccacggccgtttcccagatagtggatcagtgctgccatgccatcatgagcattgtggcggcctgggcgctgctgcagatgtacggagagacggcccaggctgcctcctggggcgccatgggcggcacgttgggaacgctggccggcgcggtagcatcctttttgtttatgacggtgatcctcctgcggcgcctgccggagatccgcctgcgcgcccgccgggatcgaacgggacaggaagaatcctgggggctgattgcccgggcgctgatcctgacaatcctgcccattgtgttcagccagaccatctaccagatcagttatacgctggacgatctgcttttcagccgttttatgaatgccgcgggcatggcggaaaatgccattacttccgttcagggtgtatttaatacgcagtacaatcagatggtgaacctgcccgtttccattgccaccgccatggctatgacactgatgcccagtattgtggcctcctatgtcaaacgcgaaagacgggaggtgcgcaacaaaattaccagcaccgtgaagtttaatatggccattgcgtttccctgtgcggtaggactggcggtgctggcccggcccatgatgtccatcctgtttcccatgctgggggattatcatgcgctggcgtcgaatcttttggcggccggatcatcggcggcggtgttttatgcgctgtccaccattacgacatccatcctgcagggcaccaaccatatggccgttccggtgttccattcggctgtggcgctgtgcgtccatatagtggtggtggtggcgctgctgtatgcgggcctgggcatctgggcgcggcttatcggaaacgtcatttttccgttgattgtgtgcttgctgaactgccgcgcagtatccaggctgctgcgctaccgctggaatgtagcggccatttttgtaattccgctgctgtgtgcgctgatcatgggcgcggtgtgctggggcgtgtatgcgctggtgctgaaagtgaccggtgtaatgatcgctgcgttcgtgctggcctttgtctgtgcggtggcggtgtatgccctggcgctgctcaaatcccattgtttctctaaacgtgagctgcaggagctgcccatgggcgggaaaatcctgcgcctggccatccgcctgcatttgtaacggcgcgtatgatttgcgtccgtgcggcgcaaactgatcctgatcagaagggttttgcgaaaaaggaggttttttctatgaatacaacacttgcgcagcggcagcaggcgtatgcccagctgctgctgcaggaagggctgaacgtgcagaaagggcagctgctggccatcgactgcccggtggatcaggcatggttcgcccggctgtgcgcggcggcggcgtacgatatgggctgccgcgaggtggtcatgaactggaacgacgatgcgctgacgcgggaaaagtatctgcgcgcggcggatgaagtattcgattccgtgcattcttggacggcggatttttttgagaaggtgtccgccgaaggcggcgcctggctggccattcacgcggcggacccggagaatctcaaaggctgtgatccagaccgcatccagcgcgcgcagatcgcttcgggcaaagccctggagggcttccggcggcgggaaaccaataatgaattcccctggtgcgtctgctccgtgcccacggagcggtgggcgcggaaggtgttcccggagctggaaacggaggcggctatggagaagctgtgggaggcgattctgcaggcggcttatgtggacggcggcgacgccattgccaactggcgcgctcacagcgcggagctggcgcgccgcacggagcggctcaacgcctgcgcgttcagcacgctgcactatgaaaccggcctcggcactgatttgacggtggaactgcccgaaggccatttctgggccggcggcgcggaaacatgcgtcaccagcggcgtgcggttttccgccaatattcccacggaggaagtgttcaccctgccggtcaaaaccggcgtcaacggtgtggtgtacgcgtcccggcccctgtcgctgcaggggaatctgatcgaaggattcggcttcgagctgaaggaggggaaaatcgtccgcgcctttgccgaaaaaggggaagaagtgctgcgcaatgccatcgccgtggacgagggcgcatcctatctgggtgaggtggctctggtgccctgggactcgccgatctcccagtccggcgtgttgttctacaatacgcttttcgatgaaaatgcgtcttgccatttcgcgttcggcgaggcttatccctgcatccggggcgcggaacaaatgagccgtgcggagctggaagcgcggggaatgaacacgtccattacccatgtggattttatggtgggaaccagagacctgcgcatcaccggcaccactgcggccggcgagaccatgaccgtgtttgaaaacggcaattttgccctgtaaggggctgtcctgcccggatgctttgtccgtccgggcaggatgcaggaaagacgcggcggaaaagtaaaaaaatttgaaaaaagtgttgacatttctgcgccggtattgtactataatagagctgtttggagaattagctcagttggctagagcatttgcttgacgtgcagggggtcacaggttcgagtcctgtattctccaccagtattcggggatctgcgcaatcgtgcgggtctccgatcttttttgcgcgaaggtgggggacggaagtcctccacctttttttatgccgaagctgcgacgcagccccggagcaagcggcggccgaatggcgctttgcaggctcggcaaagaagaaaagcagccccttcccgggttactccgggaaggggctgctttctttttt

SEQ ID NO: 3783 - DNA, 2066 bp, Unknown
  16S sequences of unknown bacteria
ggggcttatcagggcgattccgacgctcggcgaaaggatgaaacgttttcaccagatacccggaaacgtcccgtctcccgccgcgaagccggacggatgctatttttcgaaccggtgcgatatatgtgacgcgaaatgtcacgagaagatgccgccgctcagagacatacagggcgagccggggcacagatcaagatgctggaggactgtggaatgagcgaaaccattgtcagaactcatgacctctgcgtcgatttcagaataaagagccgcgcgttcggaaagccggacattctcagtgccgtcagaaacgcgagccttgagatacgccgcggcgagaccttcgggcttgtcggtgagagcgggtgcggaaaatcgacgctcgcgggttcgctcgtccgtttcgttccgctgacaggcgggactatcgagatgaacggcgtgacactcgacaaaaacagcggaaagtcggattggaaatcggcacggaagggcgtccagatgatctttcaggacccgttcggctcgctgaatccgcgctttcaggtctggcagctgatcgctgaaccgatgctgctcgccggagaggacgacgataagctgatgcgtgagcgcgcttcggagctgcttgaacaggtgggactctcgtcaaaggacgcggagcggaacatcttcgagttcagcggcggtcagcggcagaggatagctatcgcgagagcgctctcggtgaatccggagttcataatctgtgacgagccgacctcggcgctcgatgtctcggtgcattcgcagatctgcaacctgcttctcgatcttcagcagaagtattcgctgacctatcttttcataacccataatctcgcgctcgtgagacacctcaccgaccggatggcggtcatgtatatgggacagattgttgagaccggcagcaccgatgagatattcgctaacgcgtcgggcgattcgctccatccttacacgaaagcgctgctgtcggcgataccggaggtttacccgacacccggcagaaatcggataattctcgagggagaggtttcgagcccgataaacgccgggaattcctgccgtttcgcgccgagatgccggcactgccgcgaagaatgcggaaagacggctatcagcccgcgcgttgtcggaaatgatcacacgacctgctgtccgtacttcggatgaacaaaagctgtcccgggcttccggggcagctgttatataatactgtagttgtccaaagctaactggaaaggaaaagaaagtagaatgttaaaagcacgccttttaaggattgtgccggagagccgcagatatatcgccgcgaatattatcttccaatggatatctctcgccgcgaacatcgcgatgatgacgtcgatagcgactcttctcgccgatctttattcgagccgcgagtccgaccgcgtcgttctgacgctggctgtcgcgctgacggctgtagtcgtcagattcgtatgtacgatactcgcgtcaaagatgagttttctgtcgtcgaaagccgtcaagaagacactccgcggggagatttatgaaaagctcctgcgtcttggcgcttcttacaatgagcgggtcaggacctcggagatcgttcaggtcgccgtcgagggcgttgatcagctcgagacctatttcggagcttatgtaccgcagtttttctacgcgctgcttgctccgctgacgctctttgcgtatctttcgcggataaacatgatgtcggcggtgatcctgctgatctgcgtaccgctgattccggtggcgatcgctgcggtgcagacctgggcgaagaagctgctctcgaaatactggggacagtataccgcgctcggcgacacgttcctcgagaatcttcagggtctgacaacgctgaagatttaccagtcggacgatttcaagaacgatgagatgaaccgcgaggcggagaaattcaggaagatcacgatgaaggtgctgacgatgcagctgaactcgatcacgataatggatttcatagcctacggcggcgcggcgctcgggatgatcatctcggtcagcca

SEQ ID NO: 3784 - DNA, 1679 bp, Unknown
  16S sequences of unknown bacteria
gagccttgaccaaggttgttttcgtcatgcctttttattcacattttcaaagatccatacaaaaccagctatcaaaaatcagttagtctacattttcaaactttttcatctgatttacttgatttttatatagttagctttctcttcatggcacagatgcgtcgccatcatgatctgttttctctgctgtacctcacctcgttttcccgcttcgcatccttgtacacatgtctgtgatccgcatggcctgaatggccaactgacagatcttatccatagtataaaggaaaaaaaataccactatcttgtcatttatcatacaatcttgccatttgtcccacggaatcatacggcagagaagactctctccttccggatttatctggtcttcctattttctcacaaagaaaaaaagatgtaatcctgtcatcatttgtcgtataatatggtcatctgggtctgcttgaccatatgaaacaactacatcatgagatccgcggacgaatcgaggtgaacatcccatgagcacgatcttattcatcgaagacgaccatacgctgaccgacaagatcgaccggctgatccgtgagcatctggatcatgtgcggctgcttttgcatgcggaaaacgaacaaaaggcttattcgctctgtcaggaccatcatccgcagctgatcatcttcgataccgatatctgtaatgaagaagagctgtatccggccatcgaccggatcaaagagatgctgcctgagagcatcctgatcctgcttctcgatgagagcgatacgctgaggctgcgcacgttcctgcggcagcgcaatgagcgtttcctgctcaagccggtgaatgagcataatttcatcgatatcatctcttcctgtctgcgggagatcaccacgatcgcggatgaccgcgatctgatcgaaaagctgaccgagcggatgcagcggttccgtccgcagctggaaaacatgctcatccacgacatcgcggtcaatgccccgccagagcggatcctgcagaatctgagcatactcggctatgtgttcacggaaggggtcatcgcggtcgttcccatcagtgagagagaaacgctcaagcagcaagtcaacgacctgtttgtccgatgcgggtatgatgtgatccgcagcgatttcttcgattatacggtgtatctgatcctcgctcatccttccttcgtctttgaagaagtcaaacggctggagaagcagatcgtgctgttgaacagcgagacattcttcctgggcaccggctatgtcaagcgcagcatcaaacagatgcacctgtgttataaggaagcggtggaggagatcctcgtcaaccgcagcatcgccctggaagagcgcttgtcctcggcagaccgggaacagatgaacgcgcaggtccgtcagcgggcgcagatcatcttctcgtatttcctgatgatgaacgaaagcctcatcaagctgcatctgcgcaccgcctcgcagctgatcttcatgcatggcacagatacgctcaaggcgctgatccatcagttctatgatgagctctcttccctgcttacctcatcttttcaggtcgaatgcaagccgatcatcgaatcccggcagaagttcgaggattccaaagatgtctacgccgtcctgctcgatctgtatcagcggctgagcgagccg

SEQ ID NO: 3785 - DNA, 6385 bp, Unknown
  16S sequences of unknown bacteria
ccgtacacgccgccggggacgatggaagtgcgatagggctttgcccctctctttggtttttcgacagtctgatacgggcggacatttctgcccgcccgcaggtatggaatggtaaaatttattcctcggtggattcttcggtggtttcctcagcagccgcgtcatccgccgcttcggtggcctcttcagcgttttcctcagcagcggcctcttcttccgtgccgtcgcccagggtgtacttgaggtacagttcttccacagtgccatcctcgatcagcttttcgaggatcgcgttcacctgctcgcacagctcggtgttgtccttggcgaaggcgatgctgtaggattcctcgtccatctcgatgccctcaaggatcacgaggccttcaatgttggaaacgatgctcgcggcgggagcggagtcgatcatcacggcgtccacacggccggcggccaggtccatggcggcgttggtgccagagctgtactggcgcacttccacgccttccatctcgctcacaaagaggtcgcccgtggtgctcatctgcacgccaacgattttgcccaccaggtcgtcgagcgtggcgatctcttcgtagccttcgcgcacgatcacggactgcacggccgtggcatacgggatggagaagagcacttcttcctcgcgctcgggggtgatggtgaggccggcgatggccgcatccgccttgccggtgacgaccatgttcaccacagagttgaagtccacattttcaatcaccagttccatgcccagctcttccgcgatcaggcgggcgagatccatatcaatgcccacatattcgccgccttcgccgaccatttcccacggagcgaattccgcgttggtggcgatggtgaaggtgttgtcttcctcggcaaaggccggggcgacgcacagcaggagcgcaagaagcaaactggtaaatttcacaaacttcatgagaatttcctcctctggatttttatgaatagattatacagcgcctccagcgattttgcaagtccattccgcgttaaatgaatattaaccagcataatccgctgtatatatgcatctttatacaacactcccccatttgacaagcgggcgctttttgggtacaataaaagctgttccattggggaaaaattgcaacatgggaggtggcaccgaatggacgacggcggtagaaacgcaatgaacgacggcgtgcccgaacgtgccgcccaagggatggcgcgctttgccgcgtaagcggcgaaggcaggcccgaattcatctatcccgccaaaaggttttgcccgaaaccgggcccggaaagcgttccgggaaccctttcgcgcaatgcctcgttttcttgcgcaaaaacggcatataaaagggaggatgagacccatggattgggaaaagatcactgcccggctgaacgaatttctggccaagggcaagcacaatgaactgcgcggcgcgctgatgatgctcaacccggtggacatcgccgaatacatgaaatcgctcaagggcgagcaactggtgatggttttccgcattttgcccaaggacatttccgccgacgtgttcgcctatatggacgacgacgcgcgcaaagcgctgatcgagtccatcggcgacggcgagatccgcgccctgatttccgatatgtttctggacgacgcggtggactttctggaagaaatgcccgccaacgtggtcaagcgtattttgcaaaacgccgatccgcacacgcgcgaggcgctcaaccagctattaaaatacccggaaaactccgcgggctcgatcatgacgatcgaatactgcgaattccacgcgggcaccaccgcccgccaggcgctggacgaggtgaagcgcacgggcattgataaggaaacgatctacacgctctacgtgatcgaccgcggccggcacctgctgggcacggtggccctgcgcaagctgatcctggcggcggacgacgcgcccgtggaaaccctgatggacgcttccgcctgcgtgagcgtaaagacgctcgacgaccaggaaaccgtggccgacaccgtgcgcaaatacgacctgctctccattcctgtggtagacaacgaaaaccgcctggtgggcatcatcacggcggacgacatcatggacgtcatcgaagaagagaacaccgaggacttcgagaaaatggccgccctgctgcccagcgacggcgaatatctcaaaacctccgcggtgcaaatggccatcaagcgcatgccctggctgatcgtgctgatgttttcggcgattctcacgggcagcatcattttgcactttgaaacgctgctggccggggccgtgggcctgaccgcctttatccccatgctgatggacacgggcggcaactgcggcgcgcaggcttccacgctggtgatccgcggcctggcgctcaaccaggtgcagttcagggatttcttcaaagtgctgtggaaggaattccgcgtgagcctgatggtgggcttcgtgctggcggggctcacgttcctgcggctattgttcttcagcgaatgggatgcgggcgtcgccgccgtggtggccaccagcttgtattgcacggtgatcctttccaaggccatcggctgctcgctgccgctgctggccaaaaaggtgcatctcgaccccgcgctgatggctagcccgctgatcaccaccattgtggacatgtgctcgctgatgatcttcttcagcatcgcctcgcactatctcttgtaacgaaaggagaacccattttgaaggaagtgctcggttgcatccggcgcgcagaccaggattttcacatgatcgcccccggcgaccgcgtggccgtgggggtatccggcggcaaggacagcctgctgttgctctatgccatggcgctgtaccgccggttttgcccccaccccttcgaattgaccgccgtcacgctcaccatgggcatggagcccttcgacctgagcggcgtgcgcgcgctgtgcgagcggctggaagtgccctacaccgtgcgggaaacgcagatcggcaaggtcatttttgaagagcgcaaggaaaagaacccctgttccctgtgcgccaaaatgcgccggggcgcgctttccgacctgtgtcgcgagctgggcgcgaacaaggtggccctgggccaccatcgcgacgacgcgattgaaaccctgctgctgagcatgttctacgagggccgcatgcacacgttccaccccgtgacctatctttcgcgctcgaacctcacgcagatccgccccatggtgtacctgagcgaaaagcacgtgatccacatggtgaaggagctggatctgcccgtggtgccctccccctgcccggccaacggctacaccaagcgggaggaaatgaaggagcttttgcgctacatctgcaagcgcattcccaacgccaaggagcagttgttgagcgcgctgcagaacgaggcgcaatacggcctgtggaacaagccgcaggatgtctaaacgtttgtccatcaaaaggaggcaaccatgcaatatacctggcgctacgcttccccgctgggcggcattttgctatcggcggacgatataggcctgaccggcctttggtttgaaggcgcgaagtactttgccctggggctagacgcccatcacgcggagcggcaaacgcccatcctgcaggaaaccgcgcgctggctcgacgcatatttcgccgggcaaaagcccgattttctgccgccgctccaccccatgggcacggattttcaaaaggatgtgtgggagcttctgcggcagatcccctatggccgcaccgccacctatggcgaaatcgccgcgcaactcgcccggcaaagggggcaggcccacctgtccgcgcaggcggtcggcggcgcggtgggccacaaccgcatttccctcctgatcccctgccaccgggtggtgggcgcgaacggcagcctcaccgggtacgctggcggcctcgaaaaaaagcgccgcctgctggcgctggaaggcgcggctttttcctgaccaacaggcgggaaccgtgacaagtgctcctggccaaatgccgtgcaccgcgctacaaagctcctcatattttcgcaatttcaccctcctttccattgacacgctcatggttatcgtgtaaaatatccctatcccataaagcacaaaggagtgataggatgccactgatcgatatgcctctggctcagttgcgcaccttccagggcctaaacccctgccccaaagacattgacgaatactgggatcgtgccatcgccgaaatggaggcgctgggcacggattgcacgctggtgcccgcgagtttccaggcgcccggcgcaaaatgctatgatctatatttcacgggcgtgggcggcgcgcgcgtacacgccaagctggtgaagcccacgaattacgagggcaagcgtcccgccgtgctggaattccacggctattcgggcaattgcggcggttttgccggcaagctcgcctatgcctgcgcgggatttgtggtggccgcgctcgatgctcgcggccagggcggctattcggaagaccccatccccgtcaaagggacgacgcagaacggccacatcattcgcggcctttcggatccggatcccgaaaagctgtatttccgcagcgtattcctcgataccgcgcagctcgcgcgcattgtgatggccatggacgatgtggacgaaacgcgcgtgggcgccaaaggcggctcccagggcggcgcgctcacgctggcctgcgcggcgctcacccccacgctcaaccgcgccgctccatcctgccccttcctgtgcgattaccggcgcgtgtgggagatggacttggcggcaaacgcctatgccgagctcaaaacctatttccgctatttcgacccgcgccacgagcgggaagacgaaattttcaccaagctcggctatatcgataacaaaaacctggcgcaccgcattcgcgcgcgcgttttgatgttcaccggcctgatggacaacatctgcccgccctcgacccaattcgccgcgtacaacaagatcaccgcgcccaaggacgtgaaaatttatccggatttcgcccacgaaggctatccggacagcgacgaaatgaccatgcaattcatgctggaaatgtaaggccgctccccttcgcataaaaaaacggtggcatggctattctacccaacaggaggtagtgtgcaatgctcaccgtttttttgcgcgccgcgattctctatgccctgatggtgctggtattgcgcgccatgggcaagcggcaaatggccggcctgcagccctttgagttggcgaccaccattgtgatcgccgatttgatttccacccccatgggagaagtttccacgcccctattgcacggcgtgttgcccgtggcggcgctctttgtgatgcagggaatcatgagcgtgctgtgcgtgaaattcgataaggtgcgctccatcctttccggcaggccctgcgtgctggtttccaagggcgtgatcaacgagcgcgagctggcaaagctgtgcattggcgtcaccgatctcatcgagggcatccgcgcggcgggcatcctcaaccccgccgagtgcggcaccgccgtgatggaatccaacggcacgatcacggccttccctcgctccagctgccgcccgcccaccaacgcggaaaccggcgtcgacgcgggctatgagggcctgcccatgattctgatcatggatggaaacgtgcagcgcgcgaacctcacgcaaaccggcaaggacgaagcctggctcggcggcctgctggcggaacatggcctggaacccacgggcgtgtttttcgcctgcgtggatacgcagggccgcatgaccatccagcccaaaaatggaggcagctttgtggcgcgcgccctggaccccggcgaggtgaactggtaatgcgccgcaccattgccggggtcgtcctcgtgctgtgcgcggtcgcctgcgtgtgcgcgtcctcgcttttcaccatcctgcacacagtggacggcatggaaaccctgcgcatgcaatcgctcgagcgcgcgggcgaaggcgacctcgagggcgcggaagaatacctcaccaagctggccgggcactggcgcgagatgaccccgcgcctagaaattctcaccgaccacaacgacctgcacaacgtggcggaagggatcacagacgcgcgcattagcctggagcgcggctttctggacgattactataaggccatggccctgctcggcgaaggcatcgcccacatccgcgcgcaggaagaattgtcgctggccaatctgctatagcagcgtgcagcttgtcaaaaaagtctttttgacaagctggtggacgggggggggaaaaaccccccccccccccccccccccc

SEQ ID NO: 3786 - DNA, 28694 bp, Unknown
  16S sequences of unknown bacteria
tatatgatataatataagaaatatatggtcaaagaggatgaaatggaaacgacaaatgaaaaagaattattaagcgaaacgcagatcacttcttttgtgcgggcgtatttgacagattcccgcaacgggggaaattggcacgacgataaaaccagagaagcggatttacatcagcaaggagtcgacttatattttgtagggggaagcagaaacggcgaacgatttttagtggaatgtaaaaaacaatataaaagttcgggcaaagaaacgtggttgcacgcgctgggacaaatcgtaacgagaatgagcgtgtccagcagcaggggaagaaatgaattcgttatgccgggatcctataaatacggattaggattgcacaaggatatggcggctatcgctttgagaagaattcccaaagcggctgcacaaatactcaatctttatgtcttttcagtcgatgacgacggatatgtgaaaaaatggacgccgagtcagttcggacaaagatacgatataaaactattcagtaaaccgcaggaactttaaacataaggcggccgtcatgtaaagacatctgtctttctgttttcgaaaaatcgaaagctgcctgtttctaatgaaaaaaacgcccttacgcggggtctgccgcatacgggaaaattcaaaaagaaagaacttactccattttaaacgcactaaaaagggtcgggtctgcgctcgactcttttttataagttcgaagagagaaatttcaaatcagggacaagagctttgcataatcgccgtcgagtttttgtcccgtttccgtttcgtaatagcggcagaagcatttgagatattccgctcggtatcgatagagagtcctttctcccgtatgctcattcaaggcaagagaaattgcaccttttaactcccagttaagatcgagataaatagcttcgatgatggaagagtgtttcgtttctttgagataatcggtcatggaataatactctttcaagcgtcgaaacgcattctgcacagcttgattttcgggcgcgtcacctttgatcgcggcgccgatctttaattccgtttcctttattttcgcttttgtattcatgcaaacatagtaacataaatcgaaaggcagaaactgtcaaaatttggcagatattgaaaattattatgtgatataataaaataagactattgacatggagcatattgacgatgtgtaagcggaatgccgaagaaatactcaaatatatgataagcacttttatggattatttaagggagttgtccgaaaaagagaacgacgaattcgggtatggagaaaagacagcgtatgtggaatgtctggaaatcatacaacaatgggagaaagcgaaagaaaacggtttggattacgaaatagaaaaattcttttctttgtaagagaaaagggatcgtccattcttataaaataacgccgggagaatggaggacgattttgagggaaaaacgttaaatagctttcatttttgtaggaatcgcgccgaggagttttattcttccgtatcggcgttttttgtgtatacggcttcgactccgattgttcctctcttccgcttgacaaaagggaaaatatgcgatataataagaaaaatacgtcgacgaggatcgaaaaactatgaatttttgggtgtttttgatctggtgtttgcttcccgtctttattttatggtcggcatggaaagcctcaaagagatcggtggtggcgagaaaacacctgagaaacaagcatacgaacgaaaaaggagatttcatctatatgcttaatttgatcaatcaatttatcgggaaaaaatgcaacatcgtgacgatcgaaaaggaatacacgggcgtcatcgagagtgtggaagaaaattggatcgtcgtacaggacgcttattacgaaacgaaagagatcatcaacttggaatatgtgacggggatccgtcagtgcaaagaaaagctgaaaaaacttcgcaaggaaagacaagaggcgtaacgcgcccggcggagcgagctatggtggagcgcgaatgctgcgcgccgctgcgcaggaatgcggacacaagaaaacgcgcccgtttttccttctttactccttttgtatggtttcgtcatattttcccgctattttttcttgctggtcggctctttgcctccgcggcattttacgttgtcccttgcctgtcgccgctgagtctggcggcgtcggatgctttattgctgcgcggcgtatattttatgtgtccttgcttgcgcgtatgaaaatttcgctgaatttttatgacgattctcgacaataataaagccgttcctctttggagaaacggcgctttttattcgacggcgacgttttttacttcgggcggcagatttcggactatgcggaatacctcgtcggcaaaacgctccttttccgcgcacgccctcgccgttccttccaatctttgttcgtcgcccgatctcgataagagcgggtatgcggatctccccagcgcggataaaacgtcctctcgtccctttcttacggcgagcagacgaagatagagaggagaggcgaaacattcccgaataaacgcctcggagatccccaacaagttttgcaataacacccgccgcagcctcgaagtcgtgtaccttttcgacgtaagcgcgcgggcgatatccttcacgttttcctccgccgctcttttcagtgcgttttccaggccttccgagcagtcgagaacgctttttatatcctctgccgaccgttgcagcagcgccaatttttccagagcttcgaggtcgttttcaagagtcaagggcaggtcgccgcgcacgtattcgggcaccccgtccgaaagtttctcgccccgttccaaggcggcgcggagagcggtggcggaggggtaatccgcgcgcagcgtttcgtccgaatatccgctgccgattctccgtatcgggaaaaggcgtatcgttttttgccggctccgtatcgcgcgggcatattccacgccgagaatattattcggcgctgtcaatagggataggggaaaagttctttcgcgagagtccgcgggttcaagtcccgttgcctccgcccaggcgcccgcccgcgcctttatatagctttcgccttctttcattcgccgccgaatgtcgtccgacaccttcgccggttcgctttccagcagttctgcggcgcggaaaaagtccttctcattcccgttttccgcgccgaaacagagggcttcgacttcgggaatagcggccgacagtttgacggctccttgcgcgaaaaattcggcggaggacgtggaaaaaacgacgggaagttctatgacggcgtccgcgcccgctaaaacggcgtgtcttgcccgcgcatattttcccatcgccgccgcttctccccgctgcacaaaattaccgctcatgatacagacgacgaagtccgcgcccgtcgcctgcttcgcggcgccgaggtggtagagatgcccgttgtgaaaagggttgtattcgcaaataatcgcacaaattttcattttatcgctaaccttttcctttacaacctgcgaaatgtgtgatataattaaaatgtacgtaaaaaatcggagcggggaagagttctcctgctttcaattcctattatacacgaaactcataaagaaataaagcgtttccaaggagatatttttatgaagaacattcttgacgaaatcaaaaccaaggcgaaagccctgcacaagaaaatcgtcctctgcgaaggagaggacaagcgcgtagtgaaggctgcggcggacgcgacaaaagaaggaatcgcggagatcgtccttttgggcaacgaggcggaaatcaaagccgccaatcccgacgtggatctcacgggtgtcaccgtggtggacccgctcacctctccccgccttgcggaatataacgcgaagctctgcgagctgcgcgcctctaagggcatgacgcccgatcaagcggcaaagctcctgacggacggcacctatttcggcgcgatgatgctgaaaatgggcgaagtggacggtctggtttcgggcgcctgccattcgacggcaaacacgcttcgccccggacttcaaatcattaagacggcaaagggcgtttcttccgtatcaagcttcaatctgatgatctgtcctccgcagggcaatcaatactgccccgacggactcgtcgtgttcgccgactgcggactcaatcccacctataccagcgaagggcttgccgactgcgccatcgccaccgcaaaatccgccaaggaaatcgccgggatcgaaccgaaggtggcgatgctttccttctccacgaagggcagcgccaagcacgataacgtatccctcgtggcggaagcggtgaaaatcgccaaagacaaggcgcccgaattgaaactcgacggagaactgcaattcgacgcggcaatcgttccttccgtgggcgaattcaaagctccgggctccgaggtcgccggtcacgccaacgtgttcattttccccgacttgcaggcgggcaatatcggctacaagatcgcggaacgtttgggcgggttcatggcggtcggtcccatttgccaggggtttgccaaacctctcaacgacctgtcgaggggctgtaaatcggaagatatcgtggcggctgtcgccatcaccgcgttgcagacgcagttctaagttttgtcagggagaagaaatcagtcatgaaaattttggtcatcaattcgggaagctcttcccttaaatatcagctcatcgacatggaaacggaaaacgtcatcgccaagggaaactgcgaacgaatcggcatcgacggctccaaactcacccataaggcaaagggcgaggaaacggtcgtcgaacagtccatgcccgatcataacgtcgccgtacagctcgttttgaaggagctgacggacaaaaagtgcggcgtcatttcttccatggacgagatcgacgcagtggggcaccgggtcgtcgcttcgggcgaggcgttcaaaaagcccacgctcgtcacggcggaatccatggcgctcatggaggagatcaaggatctcgcgcccctgcataatcccgcggcgatcgtcggggtaaaagcgtgccgggcggctatgcccgaaacgcccatggtgctcgtgttcgacacgggctttcatttcacgatgcccgattatgcgtatatgtacgcggtcgattacgcacactatgagaagtataagatcagacgctacggcgcgcacggcacgagtcataaattcgtttcgcaggaagccgcgaaatatctcggcaaaaagatagaggagttaaagatcatcacctgccatctcggcaacggctcctccatcacggcggtggacggcggtaaatgcgtggacacctcgatgggcttcacgcctctcgccggcgttcccatgggcacgagaagcggcgacatcgattatgcggcggcggaatacatcgcccgcaaggaaggcatggacgtttccgaaatgctcgcctatctcaataaaaaatgcggaatgctcggcatttccggcgtttccagcgatttcagagatctgacgtccgcttccaaggaaggcaatcagcgggcaagactcgcgctggatatgttcaattattcctgtaagaagtatgtgggcgcgtacgccgcggcgatgaacggagtagactgcatcgtattcacggcgggcgtcggcgaaaatacgccgggcgtcagaaagggaatctgcgaaaatatgagctatctcggtctggaaatcgacgaaaagaagaacgaggaaaagaacaacggcgccatccgcgacatcacgggaaagaactcaaaagtcaaggttcttatcattcctaccaacgaagaactcgtcattgcgcgggaaaccatggaattgttgtaaattttcagcaaattcctcgaaaaaaagttgacaaacaagcagaaatataatatacttttaaagtcggtttaatgatgattatcgatgtaagaaaactcaatgcagggaaacgatattcgggcaagctggaattcgagtattccgcgcccgaaacgctcatagacattcccttcgtccgattttccgctcccgtcaaagtggaggcggaatattgtcttctcgaagacgattctctggaattaaagggaaaaattacttacggcattgaagggcagtgctcgcgttgcttaaaggacgcttcgcaaaaagtggaaggggaaatcgatgcgtattttcagcctttcgaaggcggcgaagattacgcctataaaaacggcgtcatcgatttgacggacgccgtaaacgatgcgataatggcaagtatgccccgcgtgctctcctgcggagaaaactgtcacggcattcggtatacggattgaacggcggaaaaaatttaaagaatattaaacaagaggtgtaatatggcagtacccaagagtaaacagtccaagagcagaacaaataaaagattcgcaaattataaagctaccgctcccacgctggtggaatgccctcattgtcacgagctgaccgaggcgcacagagtttgcaaaaattgcggcttctacgacgggaaagaagtaattaccgaaaaagaagaaaagaaaaactaatcgtctaatcgggaattttaggcgggctgcttgcgggcgcccgcttttttccgttacacgctttttcaattgataaatttgataatttttataaattaacctgggttaagtatgtaaaaatttgacaaattctcccggttgtgctataataaaaacgaaaatacgttcctgcgtaagtatttcgcgcccgatgcaagggagctgccatactgtaaaggaaaacgaaaatgcgaaaacgcggattaggtatgcgcgtttttacatcctatggaaatatcgcgtcggcgatcacaatgaaaacgaaactatttttgtatgtctattttcgcgctcctgtatcatcatgccgacgtttaaagaagcagagaggcaaaattgcggaaagaaaagcgattcctttgccgttttgcgccttgttcggagatagtggttgtgtgttatgataagcgcggacgtgcgaaagcgtaaaatatctccttgcttttttcgtttctttcctgtataggttcgttcctgttatatggagcgcgatccttcacatttaaaaaggagtatcgcgctctattttcagaagacgcgggcgcgtctgataaagttgcttttgaaaaataaaaaaacgtgcatactacgtagtagcgtaagcgatagggcgcatcggaaaaaccgacggttttttgaaaagccgctccttgtattccttcgaaggacaagggagagggcggggactttgccgttttttcacagcgggcaggatctcttcaaaagccttcgcaccattttttcggtgcgcttccataaggagtttttatgaaagaaaaatttacggtcacgggaatgacgtgttccgcgtgttctgcgggaatagagcgcaccttgaacaagatgcagggcgtcgaaaaagcggaagtttcgttgatgggcgaatcgatggtcgtggaatatgacgaatcctccgtttccagggaacagctcgtcgccgccgtcagggaactcggctacggagcggcgccgttcgacgaagaggcatggaaaaagaaaaagccgcagacggatactctcaaaaggcgcttctttctttccctcgtctttcttgtgcccctgctctatttttcgatgggcggcatggtggggcttccccagccctctgccgtcgtcaatcacacggtgcagctgattctgacgctcgcgatcatcgtcgtcaattttcatttcttcaccagcggcaccaaagctctcgtcaaacgcgtccccaatatggatacgctggtcacgctcggctcggtggcggcgtttgcgtacagcctcgtgcagtccgttcttctctatgcgggaaaggcgcatcacgacggccacgatatgctcttttacgaatcggcggctatgattctgacgctggtcacgctcggcaaatggctggaagaaaaatcccgccgcaagacgggcgaagaagtggaaaaactcatcaagctgatgcccgataccgtcacggtcgagcgcggcggttcgcagtcggtcatcgccttttcggagatcgttccgggcgatatgctcgtcgtcaaacagggggattatatacccgtagacgggaagatcgcggagggccatgcctttatcgaccgcgcggcgattacgggcgaaagtatgcccgtcgaggtcggggaaggggacgcggtgacgggcgcggatatcgtcaagagcggcttcgtcaaagttctcgcggaaaaggtcggcgcggaaaccacgctttctcaaatcgtccgaatggtcaaagaggcgggcgcaagcaaggcgcccctgcaaaagattgcggataaaatcgcggggatcttcgttcccgtggtgacgctgatcgccctcgtcacgttcgtcgtttggctggcgacgacgaaagaggtcggcacggcggcaaattacgccatcagcgttctcgtgatttcctgtccctgcgctttggggcttgcgacgcccgtggcggtcatggcggcgacgggtcggggaatgtccctcgggatcctctataaagacgcggaggcgctgcaaaaggcgagaaacgtcaattgcgtgctcctcgataaaacggccacgctcacggtcggcgctccgaaggtgaccgattttgagttgatcgcgggcgataaaaactttatcctcggtctttccgcatccatcgaggcgcattcggggcatcccatcgcggagtgcgtgcgcgtctatgccgaagaaaacgcgcccgaacagaacgtcgaaacgaatcattatcagtacgaaatgggcaagggggccacggcggaacatgaagggaccgtctatcgcctgggcaatcgcaagcttctcggcaatacggtttcaaaatacgcttacgagcgggaaaaagcgtattccgcggaaggcaagacggcggtatttttagcggacgagaagcgcattctcgccattttcgcggtcgcggatacgttaaaggacaccagcgcggaagccgttaagtcgttgaaagaacggaagatccacacggcgatgctcacgggcgacaatgaaaacgtcgccaaggcgatcgcggataaagtgggaatcgacgaatattttgccgaggctttgcctgaggataagaccaaggcggtagagcgcgtgaaatcggtgggcggctttgtggcgatggtgggcgacggcatcaacgacagtcccgctttaaaggctgcggacgtgggcgtagcgatggggacgggtacggacatcgccatcgacagcgcggacgtcgtgctcgtcagcggggatctgcgctccgtttccaccatgatcgatttgagtaagcgcgcggttaagaacatcaaagaaaatctgttttgggcgttcttttataactgcgtggcgattcccgtcgccgcgggcgtgttcgcaaacgtaggcaaaggttttgccctcaatccgatgatcgccgcggcgtgcatgagtttaagctcgcttttcgtcgtgtgcaacgcattgcgtttgacccggttcggaaaatcgaaaatgaaggcgagcgcgagcgtaaaggaagaaatcaaagaaatagaagaaagaaaggagaaaaataaaatgacaaaaacgttgaagattgaaggcatgatgtgcaatcattgcgtaatgcacgtaaccaaagctctcgaaggcgtgatgggcgtcgagaaagcggaagtggatttgaagggcaagacggcgaaagtgactctgtccgcggaggttgcggattccgctttgagcggcgccgtcaaggaagcgggctacgaagtgatcgggatcgagtaaaaatacgattgcggaccgataagatttatcggtccgcctttgtgaataggaaagaaaaaaggaaaggcgctttggatattattatcagggaagataaagaaaaatatatgtgggagctgaaaaagtggctcttagaaacgaaggaaagcggcttagaggaaatgtcctcctttttttccgcacggctggatatatatgaggagcatatgtctatatggacgtctgcctaccgccgatttgcaaagctactgccgaagaattcgaaaaaggttttggatctcggctgcggcaccggattggaattggacgaaatcttttctctttttcccgaaatagaggtgacgggcgtggatctctgctgcgagatgctggataagctggcacaaaaacatccggataaaaatttaaagaccgtttgttccgattattttcgttttgatctgcaaaaaggtcattgggacgccgtcatttcgttcgagagcctgcatcattttctgcctggcgataaactcgttttgtatcggaaaatacgggaatcgttaaaagacaacggagtctttcttttaggggattatatcgcctgctgcgacgaggaagaaacgctgcttcgggaagcatggcgggaaaaaagagcccgtttttccattcccgagggacgcttcgttcatttcgatattcctttgacgctggaacacgaaacggaaatattgcaaaaagcgggcttttcggaggtgctcccgaaggatagcctcgacggagcgactctgatcctcgcccgaaaatagtatttttgcggggaaaaggaaagaattgtgacaaaataaattcccccgcgacaaaaacagacaggcagaaaacggctgcatatgttatcatatttccgacgaaacatataggaggaaaaacatatgtccgaaatgctgcttctcgataagcgcacgcaaagcctcatcgaagattacgtcccccaaggggacattctcgaaggagtcgtgtgctttttttcagtctttgccgactacacaagggtgaggatcctgtccgcgctcgccatcagcgaattgtgcgtcaccgacctttcgaggattctcgacatcaatcaaaccaccgtttctcatcagctccgttttttgaagagcgcggggatcgtcaaaagctgccgccagggcaaagtcatcttttacagtcttacaaacgactcggtgaacgacgttttgttaaaaggaattgagtttttaggctgttgaagcggatttttcgcttgtaatccttgcaaaatcgcgcaatttggtatataataataacgttgacggaaataagacgtttttgcgcctttatccgtttcggagccatatgagcgaattacaggaaaaactcaaacttttgcccgataatccgggcgtctatatcatgctggataaagacggcgtggtcatatatgtgggtaaggcgcgcatcctcaaaaatcgggtgcgccaatatttccacggttcggaaaagcccgaaaaagtcgccgcgatggtggaacatatcgcggacttttattatatcatcacggggacggaaatagacgcgcttgccctcgaaaacaatctcatcaagaaatataagcccaagtacaacattcttttaaaggacgataagacgtatccgtatatcaaagcgcatacgaaggaggagttcccccgcttttccatcacccgcaagatcagaaagcgcgacggaaaatatttcggtccctttatgggaggcatccgctgtaaggaaatactcgacgtggcggcgtccgtctataacgtccgcctctgctcggtagcgatcgcggaaaagccgaaaaagccctgcctcgcctatcatctgcatcgctgccttgccccgtgtgcgcacctttgcaccaaagaggagtacgcggaacgagtaaagaagacgatctcctttctcgacggaaattacgaggaggcggaagaaatcctccgcgaaaagatgctaaaatttgccgccgacgaggaattcgaactggcgatggaataccgcgaaaaactccgtatgctctccaagctcaaactcaaacgcatcacttcgctcaatcgctgtatcaacgcggatatcatcgccttaaagacgaataacctctattctgcggtcaatattctgatcacgcgcggcggcatcatgcagggtggcagcaattttgcgctcgaagacgcttctctttccgaatcggacgcactgacggcgtttatcattcagtattattcctcgcatgagattcccgaggagatcatcacggcggagtattgcgaaaaggagcttttggaaaacttctttctcgaaaacttcgagaaaaaggtggaggtcgtgttcgccaaggcgggtgtcaagcgtcagcttctcgatatggcggaacgcaacgccgaagaatatctctccaaatccatcgacaagatcaaacataaggatgatatgaccaagaacgcctgcgcgcggctgaaagaaattctaggactcaaacgatatcccaagcgcatggaatgttacgatatttccaatatcagcggcgtcgataaagtcgggtcgatggtcgtgttttcggacggcgaaccggatagaaccagctatcgccgtttcagaatcaaaacggtggagggagcaaacgatttcgcgtccttgcaggaagtgctcaaacgccgcctatctaaactcggcactgcggaagaagagcgttttcccaagcccgatctcgtcgtcatcgacggcggcaaaggtcagctttcttcggtcaaggagatattcgacgaaatgggcgtggagggaatcgatctcgtgtccctggcaaagcgcgaggaggaagtgttcaccctctccgtggaggaaagcatcaggatcgatcatcgggattacgcgctcaaaatgctccaacggctccgcgacgaagcccatagattcgccatcacctatttcagaagcctccattcgaagcgcaatctcgcttccgtgctggcggagatagagggcataggcaagaaaaaacaggtggcgctgatggacaaattcggaacgatagacaaaatcatgcacgcaagcgcagacgagctcgccgaaacggaaggaatcggggaagaactcgcaaagcgcattaaattctatttcgaggaaaaattataaacggtatgcgaaagataaattatcctttgatcatttccgacttcgacggcacgcttcttggcagcgacggcgccgtttcggacgctacgaaaagaaagatcgacgaatacatcgccgcgggcgggacgttcggcatctgtacgggacgtatgttcacttccattctaccccgcgcgcgggaactcggtttaaaaggtctggtggcgtcctaccaaggctccgtcatcaccgatatagagagcggaaaactcttggtggacggttatctccccgcggatgaggcggcggagatctgtaaagtatttgaaagactcgatctccatacccacgtctacaccttaaacgaattttacgtcaatagacgggacgaagctttgagcctttatgaaaagatatgcaacgtaaagggcaacgtcgtagaagaagaaccgctttcgggtttagttctccgtaaagctttgaaaatccgcaaagtgctggcgatggtctatgccgaggataaaaaacggattttcgaaaacgttttaaaggcattgggcgaaaaattctacgtcacatacagcgccgccaatttggtggaagtcaccagccgcgcctactccaagggcaccgccgtaaagtttatggcggattattacggcgtgccgatcgaaaggacgatcgccgcaggtgacagccttaacgatctgcctatgcttcaagccgcggggttaggcttagcggttaaaaacgccgacgaagcgcttaaagacaaggcgcaatcctttcccttcacgaacgacgaagacgcaatcggaaagataatagaaacgtacggatttgcaaaagaataggaagccttgcgagagtggggatccgctgtcctgtcatagagataaacagaggagccaagaatttgtcttttcaaatgcggaagggcgtatccgttcaaagcatatttcaaaaggcgctcgtttctgcatattttgaaaacaagtctttgtatcgttttttaagaaggtcgatcacatacaggaaatagaccaaatacttttttaagcagtatgccaagtgctgattttttccgcctttgatatctttctggaaaacgacttcaacactcattttcgaagtgaattttagtttccgtccagacatacaatcggctaggccgccgacgtttacgatatcttgatgaagcgtttgcattcaatcaagattgcttcaaaattttgcgaggacaaaattataaggcagaggggattcgttttattccttgctttatatagagcgaacgcccgaacgcgcgagtttcgtcaaaaatagggcaagacattatacttaaaattcgaatttttcctccccgaactctccctatgccgtttgcgcggagtattcgaagataattatgtcagacataatatctatttcacgcatagtacattctttttaaaaatgggcgtccaaaggggaatgcgcataagatgccgggatggacacgcagaagaaagggcggttctttaaaaaatatttcttacgtcgcgaagacaggctgcgtttgatcgcaggtgtttgatttacaggaggcttttggtaaagatgaacgagaatgtgacggagagcgtaatgctcgataaactcgcttccgatctgaatctggaaatcgtctatacggggaggggtgtcgtcactctttccagcatgagcgtggaacgcccgggcttgcagctcgcgggctttttcagctatttcgatccccgccgcatcatggtgttcggactttcggagcacgagtatctgcgtacgttttcttcggaggaacgccgcgaaaagcttgcgcggctcttcgaatacggcgaagttccctgtatcattttaagccgcgatcttcccgccgtgcccgaactcatggaaacgatgcgcgcggcttcctgtccgctctttcgaagccataaggtgacaaccgacttgatgagcgatttgtatatctatctcaatcggatgctggctccgtcggtgacagaacatggcgttctgatggaggtcttcggcgtgggaatgctgctcaccggcaaaagcggcgtgggcaaaagcgaaactgcgatggaactgattaagcgcggacaccggctgatcgcggacgacagcgtcatcatcaaggaaatcgccaacgacttgtacggcacggcgcccgacatcattcgctatttcatggaactgcgcggtatcggcatcatcaacgtcaagagtatgtacggttcgggttccgttttaaacgagaaaaagatagagatcgtcattcaactcgaaaattggcagcaaggcaaggaatacgatcgggtcggggatacgtccgcctttcaggaatatctcggcgtcaaagtccccaaactgatcattcccgtcagccccggcagaaatctcgccatcatcattgaagtcgccgcgcgcaacttccgcttgaaaagcatgggatacgacgcttcgcaggaacttattacccgtagtatcggccgctgaattttctcgggcgaaaagaaagcaaggcgtattggataaaggggcaaaggagaaattcattctttccacgactgcgcgccatacaatgcggtcagacagaatttcgcagggcgtaaaacccaaaagacccgaaaaaattttttctatctcaaaaaagggaacgccttattctttttgtctttaaaaagaagtcgagggtaagtctatattaaaaagacggggtcttgcccttgggggcgtcaaaaagcgaatgtcaactttaaaagctttctttcttaaaaagcagtaaagcctgtttataaaatttttcgtctgataaaaagcgtcaatccgtttttttcttatcattgagtagtttcgtttttctcgccgataggagcgcgttgccttcgtttcgtcgccaaaaacgttgtgaaaggaattactatgtctgaaataattactacgtctgacaaaatatcgcatacggggaggaatattggtatgtctgacataaatattatgtctgaaatattagctcctgcgggaaatgcggagtgtgcggaagcggcaataaacgcgggcgcggacgcgatctatctcggtttccgctctttttccgcccgcgcgggtgcggacaattttgacgcagacgccttgcacaccgttttggaaaaggcgcattttttgggcgtcaaggtatacgtcgccatgaatacgctcgtcaaggacaccgaaacggaggagtttatcaagacgtttttggacgtttggaatatgggcgcggacgccgtgattttgcaagacgtgcttttgggcaaatatctgcacgccgagtatcccgacgtcgtgctgcatctgagtacgcaggcgggcgtctgtacgctcgacggggcaaggtatgcgaaagaatgcgggttttcgagagtgattctcgccagagaaacgcccctcgcggaaatcgaaaagatcgcttcgtttatggaaacggaagtcttcgtgcagggcgccttatgcacttgtttttccggacagtgctatttttcttcctttgcggggaacaacagcggcaatcgcgggcggtgtaaacaaccctgccgcaagctgtattcttacgatcgggaaggcttcgaagatcccgcttacgcgctatcgctttccgatctttgcatcggggaagagatcgaaaaactgcggaaggcgggcgtaacgtcctttaaaatcgagggcaggatgcggcgtgcggaatacgtgtccgccgccgtacggtactaccgcggccttttggacggcgcggacgaaaaggagagaaacgaagcgctttccgatttaaagaggacatataaccggggcaatttcacgaaaggtcttgccttcgggcaggacaagcgctttctctcccgcgcggtgcagggacatatcggagaaaaggtcggcacggtaaaggtttctcatggcaaatattttgtcgaaagcgttttttcggcccgaaaaggggacgctttcaaaattttgcggagcggcaaagaggtcggcggggccgttttcgaaacatcggaaaaacggggcttttacgtttcttcccgcatacgccttttaaacggggacgccgttttcgtcaccacggataccgccgtcaacgaaaaagttttgacaaacgaaaggcgcctttccgtttccgtttcgctcgattttacggaggggcaaaaggcggtagtggaaatcggcggcgtaaaaacggagtcggacgaaacgctgcaaagcgccaattcttctcccttgacgcaaacggaactcacggcgtgttttctcaaaagagattccctgcctttgaacgtttccttttcgaagatccgtttgagcggaaacgtattcatcgcaaaatcatgccttaacgccttgcggcgtaaagcttacggagcgtttgtaaaaacgcgcgcgatatcgaaaaacacgccataccgcttcaaggaatttttgtgcccgcaattcttcaaggaaaacgggaaagaggcgattttgacatccgatttttccccttttccgaagtcggatatcgtcgtgtataagccccgggattatgcggaaaatccgcccgaaaatttcagagaaggcggctttgaaagatatctgtattattccgcgtatcttacgcaaagcgacctttcccgcattgaggaacttttaaaaaactatcctttcgacggcatttacgcggagagttacagcggcgtcgtctttgcgcgggatcggggaataaaagtgttcgcgggaacgggtttcaatctcgcaaacggtatcgctttgcgcgagcttttaagggaatcctgcgtttcctattatgcgatttccaaggaactcgacgaacgggagcagtcggcgctgtcgggagaaaaagcgtttgttctcgccgcgggcgacatcaaactcatggatttatgctattgtccctttgcaaagacctgcgccgtttgcgataaaaaggagctttatcatttgaccgacgccgaagggagaatctttcccgttcgccgctataaaggcgcggacggcaactgtcgattcgaagtctataattgcgtaaaactttccgaaggccgcgtcaaaggggcggggaaactgacggacaccactctttccgctgctgttcgagcggcggacaaaacgcagctttgcaaggagtcgtatacttcgggacatagaaaaaaaagcgttctttaagaaagaggcggaatattcgcctgccgaaaatcaaggaaaaatatgaatagaaaagccatagaaaagaccgaactgaataaaattcttcaactggcctcggaatatgccgtgctcgacgatgccaaggaaaaactgaaaaatacccttccgtgttcggatatttcggaggtaaaaaagagcctcaaacgcacggaggaatgcgtaaagcttctctttacctacggagtggggaagatcgagtattttccgcctttttcggacgagatagagcgcgcgaaaaaaggctccgcactttcctgcggcgagcttttgagcgtggggaatctcctgcgcgcggcgcgcatcgcgcattcgggcgtcaccggggtgacggacgaggagatcacgggaatcagagcgctcgcggacaatctctattttgattcgaatttagaggacgacattcagacgaaaattttaaacgacaccgaattatccgactatgcgagcgacaagttatactccatccgccgtgaaatccgctccttaaacgagcgcatccgcacccgcctttccgaatatctgacgggcgaggagggcaaatatttgcaggacggcatcatcactatgcgcgataatcgttacgtgctgcccgtccgcgccgaatataagcgcaatatcaagggcttcattcacgaccgttcggcgagcggcgccactttctttatcgagccggaacaggtcctcgaaatgaacaacgaacttcgctctctcgccatcgacgaaaaggaagaggtggaaagaattttaagcgagctgtcccgccgcgtcgggtttatgggagagcagcttttacaggatatagaggtgcttgcggaaatcgatacttattacgcgcgggcggagtacgcctacaagctctcctgcgtcaagcccgaggtcaacgataagggcgtcgtgtctatcgatcggggacgtcacccgctgatagacaaacaaaaggtcgtcccggtttctctttcgctcggcaaagactatcgttttttgctcatcagcggtccgaacacgggcggtaagacggtgacgctgaaaatggtgggactcttttgtctgatggcgatgtgcggtctgtttgtcccggctaagcgcgcggaggtttccgtattcggggagatttactgcgacgtgggcgacgcgcagagcatcgaggaaagcctttccaccttttcctctcacgtcacaaatatcgtggaaatcgtcgatcgcgcggactcgaaaagcctggtgctggtcgatgaattggggggcgggacggatccggacgaaggtcaggcgcttgccaaagcggtggtttcctatctgctcaaaacgggctgcacgggcgtggtgacgacgcattattccgcgctcaaagaatttgctttttccaccgacggaatcgaaaacgcctgcatggaattcgattccgacacgcttcgtcctctatacgtcatcaaaatcgggcttccgggatcgagtaacgccctcgccatttcaaggcgtttgggcttaaaagacgagattttaaaagacgctctttccaatctatcggaaggcgcgcaggtttttgagaacatcgtcaggagcgcggaggacagccgcatcgaggcggaagaggcgctcaaagaaaccaaccgcctgaaatcggaatggcaggaaaagatcaagactttggacgacgaacgggaaaaattgcagaaggaaaaagaaaagctgtttacttccgcgaaggcggaatcgcgaaggatcatcaacgaacgcactgcggaagcggaagagcttttggaagagatcgaaaagatcttcgaaaaggaaaatatttcggaggcggatctcattcaggcgcgcactctgaaaaatcggctgagcgataaagcttacgacaacgaaaaggaggaattttcccgtccgcagtatgtccccgccgtcgcggaaaaactcaaagcgggagatacggtattcgtcaaaaatatcaatcaggaaggcgctgttcaaagcgtccgcccgcaaaaaggagaggcggaggtgctttgcggaaatattcgcgtacacagcaaaatttccgatttatccgtgttaattcccgcggggaatgcacagaatagtaaaaagaaagaacgaaagggcgggattgacaacgtgcaggtttccaaacgcctcgctcccaaacctatgccgactttggaaatcaacgtcatcggaaaaacggttgccgaggcgctgcccgacgtggaggcctttatcgactccgccgtaatcgccaatctcgaagaagtgcgcatcgttcacggcgtcggcacgggaaaactccgggcgggaatccacgattacctcaaaaagcacaggaacgtagcggaatttcggctcggcaaatacggggagggcgaaacgggcgttacgatcgtcaagatcaagtaagcggcgaagagggacggacgaaaaaacgggcgtttcggctcgcggtcagattcggccggggcaacttgcggacgatagaagaaagttcccttaatcaaaaaacgcccggcgacgattaagaaggaagcgaaatccgaaagactgcggcggcggagtttggcataaacccgaaaaaagaaaaatatgataatacggaatcttttttcgaggtaatctgttttgaaaattaaccgcaaacgcgccgttcgcaaggaacggctttcgagggatgtgaagctgaacatcgccactaactgtgctttgagccttctgatcttttccgttggaatcgtgtgtctttttcccgtggacagcgccgtcacgacggacggcagcgaaagcaacgtctatcgctgcgccccttccgaaacggacggagtttctctcatgttcaacgtctattggggaacggacgaagtgtaccgcattctcgacatcctcgacgaacacgaggcgaaagccacctttttcatcggcggctgctgggcggacgacaacgcggcgtgcgtgaaggaaatcctttcccgcggacacgacctcggcaatcacggctattttcataaggaccacgcctctctctccgaagccgagaacaaagaggaaatttccctctgcaatcgctttatcgagctgatgacggcaaaaaaaatgaccctgttcgcgccgccgtcgggcgcgtacgggaaagcggcgctcgcggcctgcgaagcgctgaatatgaagacgatcctttggtcccgcgatacgatagactggcgggacaagaacgcggcgcttatctacacgcgcgccacgaagaacatcaagggcggggagtttgtgctcatgcaccccatgaaggaaacggcggacgccctcggcgacattttgacatattatcagacctgctcgctccgggccgtcactgtttcggagaacttgcagaacggaggataaaatagtatggtacacgaaaaaagatactcaaacgggcttcggctcgtcgtcaagcagatggaggggcttttgtccgtcacgatgggcattctcgtcggcaccggctcgtcttcggaaacggacgcggaggacggcatttctcacttcatcgagcatatgcagttcaagggcacgaaaaagcgcaccgccttcgagatctccgacgcgttcgaccgcatcggcgcgcaggtcaacgcctttacgggcaaggacgtcacctgctattattccaaatgtacgtccgatcatacggcggaggcgttcgagattttgtccgatctctttttgaacagcacttttcccgaagaggagatggcgcgggaaaagggggttgtctgcgaagagatttccatgaacgaggatacgcccgacgatctttgttttgacgttttggcttccgctttttacggcagggaaaattacggcagaaatattttaggccccgcctctaacgtcaagggctttacgcgcgaggatattttccgttacaaagcggaaagataccgccccgaaaacatcgtcgtttcctttgcgggcggcgtggatatgcggacggcggaagcgctcgtcgaaacgtatttcgcttctctcgaaaaaggggacttccgcccgcgcgaaaaacagatacaaagaaaacatctgtcccttatcaaaaaaaagccgatcgaacaggtgcacatcgccatcggctatcctgcccttccgagagagcacgagcttgccgacgccctgcaaacgatgaacagcgttttgggcggcagcatgagttcgaggttgtttcaggaggtccgcgaaaaaatgggcctcgcctattcggtctattcgtatatttccgcatttcaggaatgcggctcgctcgtcatctatgcgggcgtcaatcccgccagtgcggacaaggcgtacgaagccgtcggcaaggtcgtcgccgagatgaaggcgaaggggatcacgagggaggaatttctgcgcggacgggaacagatgaaagcgtccatgctcttctctcaggaaagcactccctcgcagatgctcctgtacggaaaatatatgctgttcaacgacaggattttcgatttcgagggcaaattggacgccatcaattccgtcacggaggaggatgtgcgggccgctatcggtttcactttcgacgaggacggcaaggcggtgggagcggtaggcagccttgacaagcctttcgcgctgtaatatgacggaaagtagaggggaaaggaaagcgggcttcgaacccgtattcgacgaacgcagccgcctattgatcctgggaagctttccttccgtcaagagccgcaaagttcaattttactacggcaataagcaaaatcgcttctggaagacggtttgcggatttttcggggaagagatacccgaaagcgcggagggaaaaaaggcgtttgcgctgagaaagcgcatcgcgctttgggatatggtgacggaatgcgaaatagagggctccgcggatgcggacgtgaaaaacgcttccgtggcggatttaagcgtcatattccgcgccgcgcccatagaaaaaatattcctcaacgggactttgtcttataagttatttatcgagcgttacgggagtatttccgttccctatttcaaaatgccttcgacgagtcccgccaatccccgtttcgacgaaagtgtatggagggagcagcttcgtgacttactctgaatttctaaacgaacttatgccgtatgcggagcccgatttcgcggcgtttcaaaaacgaatcgtcaattcgcccgcgcagtgctttctcggcatccgaacgcccgtcatgcggaaactcgcaaagcgttttaaatcgcgcctggacgagcttttcgctttccccgacaactattacgaggtgacgttcatcaagctgacagcggcttctctgctgccttacgacgagttctgcggatacgtgggcaggtgtatgcccctcatagacaactgggcgctgtgcgactgtttccgtcccgcctgtctaaaaaggcatcgtgacgagtttcttccttatctggaaaagtttttcgcgcacggcggggaattttatcagcgtttcgtgctgacgacgctgctcggggattacgtcgaagaaaaatatttgccgctgatcgccgactatttgaaaagggcggatacgcgtctgtattacgtacatatggcggcggcgtggctgactgcagagctcctcgtcaaacattacgatcagggacttgaaattttaaagggcgggattctgcggccgaagacgcataacaaagcgatccaaaaggcaaaggaaagtttccgcatcacagaggaacagaaggggtatctcgaatccctgaaaataaaaataaccaaataatcaaaggtacttgtatggacattttacaaacgattacagaggaattcaatctgactttgacgcacgcgaaaaatattctttcgctcatcgacgagggaaacaccattcccttcatcgcccgttacagaaaggaaatgacgggcagctgcgacgatcaggtgctgagggagctgttcgacagactcgcctaccttcggggacttgaaaagcgcaaacaggaggtttcctccgccattgaggaacagggaaaactgaccgacgagatcaggaacgctttggaaaaggcggtcacgctcaccgaagtagaggacatctatcgtccgtataagcaaaagcgcaagacgcgcgcttccgtcgcggtcgccaaaggcttacagccgctcgcggacgcgattttggcgcaggacaagaatctggacgtggaaaaggaagcggaaaaatacataacggaagaggtccccaccgccgccgacgccattcagggcgcgcaggacatcattgccgagatcgtttccgacgacgccgccacgagaaaaaagctccgcagctttttcatcaagcacggggaaattgtttccgcttacgtcaaaggcaaagaggaagcggacgaggcgaaaacgtacgagatgtataaaaattactccgaacccgtttcggaaatcaaaagtcatcgcgttctggcgctcaaccgcggcgaaaaagagggatttttgaaagtttccattctctgcgaggcggaatttgccaggcgcatcgcttccgcggcctttttaaaggacggcggagagtcgtcgaagatcgtcaaggcggcggcagaggacgcttacgacaggctcatcgcgccctccgtcgaaagggaagtgcgcgcccagctgttcgaggatgccagcgaacaggccatcaagatgttcgagctgaatttaaagccgctcctgatgcagccgcccgtcaagaataaggtgacgatgggctgggaccccgccttccgcacgggctgcaaaatctgcgtcgtggacggaacgggaaaggtgctcgataagacggtggtatttcccacgccccctcaaaacaagaaggacgaagcgaaaaaagtcctcaaagcgctcgtcgaaaagtatggcgtggaagtcatctcctgcggcaacggcaccgccagcaaggagagcgaaattttcattgccgaactcattaaggagatcaaagcggaaacgggcagggaggtcggatacgtcatcgtcaacgaggcgggggcaagcgtgtattccgcttccgcgctcggagcggaggagtttcccgattacgacgtcacggcgaggagcgccgtttccattgcgcggcggttacaggacccgcttgcggagctgatcaagatcgatcccaagtcgatcggcgtcgggcagtatcagcacgacatgaacgaaaaaaggctggacggcgcgctgtcgggcgtgctcgaagactgcgtcaacagcgtcggcgtggatctcaacacagccagcgtttccttgcttaaatacgttgcgggactcaattccgccgtggcgaaaaatatcgtttcctaccgcgaggaaaacggaaaattcacgtcgagaaaacagcttttaaaggtcccgaaattgggcgaaaaagcgtatacgcagtgcgcggggttcctccgtatcgactgcggggacaatattctcgacaacaccgccgtccacccggaatcttacgcgaaggcggaaaagctgctttctctattcgcatacaccaaagaggacgtgcgggcgaggcggatcgccgatctcaaagaaaagctcaaatcttacggtatggataaagccgccaaggaaacggaactcgacaaggcgacgctgacagatattgtcgccgagctgatgaagccgggcagggacatccgcgacgcgctgcccgcgcccatactgcgcaaggatattatgagcatcgaagatttaaagcccggaatggaaattacgggcacggtgagaaacgtcgtcgatttcggcgccttcatcgatatcggcgtccatcaggacggactcgtgcatatttccgagatcaccgaccgctatatccgccatccttcggaagttctgaaagtcgggcaggtggtcaaggtgacggtcaaggaagcggacatcaagaaaaatcgtatcgccctgacgatgaaaaagaaaaacggataaatcctgtttcctttttagcgtatatcgactaaaaagaaatgaaacttcgccgggcagggggcggaaaaggcgaatacggaaaacgtgttttaacgtccacggcttagcggaaaattttgcgaaaaagagattttttacgtcgtccctgccgctccatcgcaaaaaatcagaaaacagggaaaagagtttcgagaaaatattgaaaagcggatttcaaaagactccgcaagggaagtgcgatatgtctgtgcgcaaggcttaaacggcttttggaattcccttgcgcaaagagttttgttttttccgcgattaatcccggaaaagggcttgacttttccgtttccttgtattacaatattgtcataaaaaggtattacgctttgaaaaaatcggaggaaatataattatgttggaaaaggtacaggcaatgcttgcggacgcgctcaatcttcctttgagcaagatcactcccgacgcgcggatcatcgaagatctcggcgccgattccctcgacgtcgtggaacttctcagcagactcgaagacgaatacggcatcgtcattcccgacgacgacgtggaaacgctcaaaacggtaagcgacgtagcgaccgaacttgaaaaaatcatgaagtaaggtttttatttcacggcagtttcgcccccgaaagcattttcgggggttttctgtgtttttaagaggatttcggggcggaattgtttgccataagcgccgcgatatggtataatcttcaaggaataaaatatttgaggtagtttgatgttacaagtttcgggcgtcagtttgcagtacggcagcaaaaaactgtttgaagatgtcaatttgaaattcacaaaggggaattgctacggcattataggcgctaacggcgcgggcaagtccacttttttaaaagtcctttcgggggaaatcgaaccgcaaaagggctatgtttccatggataaaaacgaacgtatgtccgttttacagcagaatcaaaatatgtacgacggcgaaacggtccttcgcaccgtcatgctcggatacaagcgcctcgtcgacgtcatggacgaaaaggacgctttgtatgcgaatcccgatttttccgaggaagacgggatccgcgcggcggaactcgaaagcgaatttgcggaaatgaacggctatgacgcggaatatcaggcaggacagcttttaaatgctttggagatttccgaagatctgcatgattcctcgatgtccgatctcgatgcgaagcaaaaggtgcgcgtccttttggcgcaggcgctcttcggcaatcccgacgtgctgcttttggacgagcctaccaataacctcgacatcaagacggtgcgctggctggaaaactatctgatggatttcgaaaacaccatcatcatcgtttctcataaccgccattttctcaacaaggtctgtacgaatatctgcgacgtggatttcggaaagatcaatatgtatgtcggcaattacgatttttggtatcagacgagtcagcttctcgcccgtcagcaaaaagagcagaataaaaaagccgaacagcgcgcaaaagaactgcaagacttcatcgcccgctttgccgcaaacgcttccaaatcccgtcaggcgacctcgcgcaaaaaggagcttgaaaagcttacgctcaacgacttcaagccctccttgcgcaaatatccgtatatcgatttcaaattcgaaagggagatcggcaacgacattctcatcgtggaaggactgacgaaaaagggatatttcagggacgtttcctttaccgtgcaaaagggagaaaagatcggcatcatttcagacaagagcaccactctcaccatgctctacgacattttgacgggcaaagaacagcccgacgcgggcaccgtcatgtggggcaaaaccatttccgtttcctattttcctcaaaataacaacgaatttttcgaggggtgcgatttgtcgctcgtggagtggctctctcaattctcgcaggatcattacgaagaatatctgcgcggctggctgggaagaatgttgttttcgggcgaagaggcgctcaaaagagccaaagttctttcgggaggcgaaaaggttaggtgtatgctggcgaaaatgatgctggaaggaagcaacttcctcattttcgacgaacccacaaaccacctcgatctcgaatccattacggcgctcaacaacggtctgagcaactatcgcggttgtatgcttttgacctctcacgatcaggaactcatgaacaccgtcgccaatcggatcatcgaaatcgaggaaacgaaagtctacgacaggcaggtcagttatgatgaatatgtcgacgaaatcaattaaggaaaattaagtttcgacaaaaagcgacaagaaggggcagtatatttttaaaaaagacaaaaaaatcag

SEQ ID NO: 3787 - DNA, 4426 bp, Unknown
  16S sequences of unknown bacteria
ttcgcttgagatgtaggtataacctttgattttatgtccatttccgtccagcgtttcggtgaacgggcggtcataatctgcgaacagtgacaggtttgcaggcacttcaatatcgtttgccaggtaataactgccacttgggttgttttccatagctttgaggtcgtctgcgcttgtaatcgcagttcccgatgccgcatatacaggtatcgccgcgaaactcattgtaaatatgacagtaagtgctaagagaacggttaatattctgctttttctcatgataagccttctccttctttttctgtgtgcatatttctttatttttctttgttgttcttgagtatcattctcttgtatttaccggagtatgtccagtattttgatgaaagcttagggcagtttgccgctttgatggaggaaactttgctggccttggcaacccacttatgccatgtaacggatccccagccgtacgcctttcctgaacctgtgtagtagttattgtagatgttgcgcttctgtacgatatctgcgccttcatagccgccgataacctgtcctttgaatgctccctttgtagtagcttttaccttgcctttgttgtaattgtttacaaccttttcaccccaaggggttgcatagccggaaataccgccaacgaaagcttttcctgttgcggtaacgtttcctgtgttatagcagttgcgcatatccttagtttcgccacagataccacctatcttgttgtcctctgcttttttggttcctgtcattttaacggtaacagagcctttgttgtaggactggttgattttataggcatatgcactgagtccgccggcctcaacacctctgtgggatttgccgctgtagctgactgtacccttgttatagcatttgcttgccgatttgcctaccgagccaaagacaccgcccacttcgttcgggtctacggcttcgatagtcgctttcatgctgatcttgccggtattgctgcatgaaactgcagtatcgacttcagctgcaacacctgcagcaacgctgctttcgttcatcgtcccatttccgatcgccgacacggtaatcgcaccggagttcttgcaggaagttgtctttccgacgtagctggaaacgcctgctgcgatgaatgcatctccttcgatattgccgctgatgctgattttaccgctgttagagcagtttttcatagatgcctcagagctgaggaaagaagcaacgcctgcaatggtgctaccttggtcagccttggtaaccgtaacatctgcgctgtttttacagtttgtaaatgtgccgtctttatagctgtatgcaacgatgcctgcagctatgcgcatgtacttaccggtgaccttaccagaaacgctgatgttggagaatgtgccgccggtggtggctgcgaccagtggagctacggtgcctgcctggttgaggctgatgttaacgtttgtcatcttcaggtttttgaaggtcgcatttttcgtatagccaaacagtgcgacctgctcagtccagtctgctcttgaagtgtaggtatagcctttaatcgcgtggccgttgccgtctaatgtaccggtgaacggcttatcgtagcttgtgaacagcatcagattggcagggacttcaatgtcatttgcaagataatagctgcctgacggattgctttccattttctttaaatcatctgctgttgatatggcagttccgtttgttgccgcatctgcaacatacagtcccgggcctgccggaatggcaaatgcaacagccagtgccaataataacgataatagttttttcatcttagcttcctcctgcttatattaaatttactgcaataactttataattaaattctgcactttactttgcattaattataatataaacatcaatgttcaagtcaagcggttttacaaattttattcctactttttgcaattatatccgtatttcacttcaccttgtcacatctaagacggttttctgcctctcatatttttaaccgccatcaaaaaagacagccgggttttaaatcctgactgcctcatttaggctatttctctttgttgtttttaagtatcagtctcttgtatttgcttgaatatgtccagtatttagacgaaagcttaggacaattcctagcagtaatcgggagtttgacactttagaagcagaaaaacagctgtaagcgttgcaaacgcttaatttttatgtcaaatttttaagtttttacttgcgtctctttgcgtctttatgttcgcaaagataaccggattaaagcgcattttctgacctgcttccttgcacttgcatatacagataccttgaaaaaggacttaacggaaactattcctgcgaacagctgtgcgataccttacgtaaaatgaatgtcagagaggttcttggagaaggatatataccgacatataccagaactgacattaccgatgctcttcatgaaaagtttggctttcgtactgattatcagattattacaaaggagaatatgaaaaaaaccataggaatatctcaaaaaaacagaaggaagcaaaagtgtcgctaaaaaaaagatatacaaaaatcagctaagacgttggaattccaacgtcttttaacttttagccgttaaacttgtgattatactcgcaaaaaggatattgcaataaaaacaatatccttcgtccgcatattcagctttcggcgaatacctgccgttaataattgtatctgatagattcaagcgctgccattaccgcttcattatctaccatactgtcgccaatcacctgaatcagaatagggtggttgtttgccactgtataatagtaaattgaagaatcataatcaacatacagatattctgtatcgcctatcgttgttttctcaactgtgcggtatgtttctttttcgtcaaggtcttttttcatcatcttcaaggtgtactcttttccgaatttatatgaaggcagtctcatctcccatgtagagtcatcagaatccttgttggctccgtcaatcagtacatactctccaacgccaaagccttcgccatccttagccataagaattatttcatcacccgatatagatgaagtgatgtaatcttcgatgccaagctctgttgcagtaattgcacctgtatcagtggatatgtccttaggttccggcgcaggttcttcatcgccgcacgctgctaaagaaacggcaaaaatcattgccagcagaatcattaatatctttttcatctcagtctcctttcaaaagaacggggttgcattaaagcttgcagcactattgctgcaactatatgtcaattatatcattttgaatatattagacatgaaccaaaagatctattttggtgtttctgcctctgctataaaacaatcaggttaataagacctattacgaaacctatcagcgcgccgaggtttacaactgcctgaagttcttttttcattactgaaagcaccagctgttcaaatcccctgacatccatctgatttatcttgtcctcgactacagcggctatatcgattccggatgtaacccttccgagtttttcctcaataaattcattaaaaattctatctgtaaatccgtttaaatcaaaatcgagagctgcagcctcctgcccgagagttctcctccttacagtatcaagctcagctcttattttcatatctagatacacagtgccctctccgtcaagatactgcagcacccgctgctcaatcggctccgcaaaggaggctatcatattcttgtttacaaacattgcgagcatgatatctttgactttttcctccagtattgcgccgcatttttcggttacaagagtttgatgtctatcttttttatctctcctgtcagcttgtctgtaagggtttctgccagccggccagacatatcctcacttatagatagtctgatgttttccagctccggttttttgatgctgtttcctatggctttcctgatgtcatcctgtgaaaacaggctcccctcaacagcagctccgcaggcttttgctattcttgatttgtttttttgtattacgccgggagtaaaaggcagtgtcctgctgcctgttttaactgcgctgtatggcctgaaaagcattttaactgctatatagtttgtaacgtaacctattaatgcccctaaagccagcggcagtattatgtgcaatatttccatcacctgttcatccttcccgttttgtatccttcgagatccaatgctgtaaacttaaagcctgcagccttgccggccttgtctatttctgtgaactactccgacttatagaagtcggagcttcctgcttcaaccactactgcgttggctgcggtgttacgcaactcaatgtcttacacaatgtccacaggcgtataagtttgggctaatt

SEQ ID NO: 3788 - DNA, 2045 bp, Unknown
  16S sequences of unknown bacteria
atcgtagcatttttatgccaacctgtcaaggacgctacgcgccgccagaggcggtggctctgcttctgcctccggctcggacgatcttaaaatatgcactgttttacacggaaatcgggagcttacagaaaattctgaacatagccgctgtttcattgaatctctttcttccttcaggctatgatctgtcaaaaaccggtgtccggctatcaatcgtttctgtgaatgtcccccgacatgaattttattgcgcgctcgacggcgtccttagcgttgccccacggctcgttctcgtagcggtagtcgaacttcttgcagaaccagctgacgtcctcggagagtgactcgaagtatgtattcacgacgccggagacctccttgtagaagtcgccgaagagcttcttcggcagtccgcgtctcccgcactcgacaaacattctgtaatgcgggaggcatatatacggcgccttgcgcagtttctcgcggaacgccggatctttctcccagagcagcaccgcggtctcgaacatcttcgagagcgagaactcgatgcgcccgcagacatagcaggtattctcgagcttttcgagccgcttcatctggtctgtgccgacgcctttcagcgagaatccgccgccggtgacttccttttttatctcggcgaggtggctctcgagcatgagcgccattccgaggcggttctttcttgtgaacatcatgtcgtagtgggtcttgcagaagccctgctcattggtctttattctgacgtccggctccatcatggacgccccgaggatgaggtcgagctcgttttcctcgagcttgcggtagagcgtgcagaacggacagccgcaggcggggtccgccgccgaggcttcaaaggcttcgtttacgggtatcgtgtatatcttttccatccgggaatttcctttcgtgacgcggcaggcgtatttgttttcatcctgatgcttgatttatttatattataccgctataatataaataatgcaatagttatccgggtaaatttacaaagaaaattttcgcggattatttgtcgaaaggaaagttatcggatcatgataatcggacagaatgatcagctcttccgcgcggggggcgcggacaggttcgccgtttcggaggggagacgcgcggacggaacgccgtatgtgagggtggacggcgtgaaggattttctcatctggcagacctttgactgcggacagtgcttccgcttcgacccgaccgaggacggagggttcgacggagtcgcgctcggaaggtatgtgcgcttttcgcagccctcgccggacaggctcgagataaccggctcggacatggcggactttgagaacacatggaagcattacctcgcgcttgacgacgactatgcgtcgatacgcgtcgggatcgcagaaagcaccgccgacgccgcgggtcgtccgggggcgccggacccggtgatgggcgaggcgatgaggtgcggctcgggcatacgtatccttcatcaggagccgtgggagacgctgtgctcgttcatagtgtcccagaacaacaacattccgcgaataaagaagataatcgccgcgatgtccgagaagtacggtgagccgctgaacgccggaggggagacgtattacgcttttccgaccgccgaggcgcttgtcgacgccggcgtcggggggctcgcggagctgaagactggcttcagagcaaaatacatatacgacgccgcgtacagaaccgcgagcgggatgctcgatttcgatgagatacgccgcgcggactacggaacggcggagaagatactctgcggcataaagggcgtcggaccgaaggtcgcggcgtgtacgctgctgttcgggttcgggaagaccgaggcgtttccgatcgacgtgtggatgaagcgggtgctcgcgaagtattatccggacggtctcgacgtcggacggctcgggaagtacgcggggatcgcgcagcagtatctgttctattatgagaggtatttcggcggggaaatctgagcttcggaactccgcggg

SEQ ID NO: 3789 - DNA, 32759 bp, Unknown
  16S sequences of unknown bacteria
cggctgcccacgaccacgagatccgcgttgttcttttccgcatagcggatgaccgcatcggcaggacgaccgtgcaggagcgtgagctccgcgttgacgcccgccttctcgaggatatccatagcgggggcaacgagctcgcgctgcgcgtcgccatgtgcctcgatggggtcgtagaccatatcggagtacacgtcgatcgcgatgacggaaatcacctcgacctttgcatcgggagagagctgtgcgagcattgccgcctgctcgactgcacgcagggcgttatcagaaccatcgactgctacaacaatactcttgtacatatccatcgacctcttcccaactcgccgagccggcctgacagccggcctgcgttccttgacgctcacgccaggccttgtctggccgccgcgtccttacgtggttaattatacctcgtgaaagagcgtttgagcaggcgcctcgtgcgcccgaggcgttttgcaggcaaaagaaaagcggcccgctcggagccgcctttcatatacatcaagaggttgatgcttacgcgccaggagccttgggggcaccaggagctgcaggagccttgggggcaccaggagctgcaggagcaccaggagcgccaggagctgcaggagcaccaggagcgccagccggagcggcagcgccgccaccgttgagctgctcgttgaagtttgccatatcggcgtcgtcgaattccttcttgcagaacgggcacttcttgaggatggtgccgcccataacaggaagggacttgccacagctagggcacttgatctctaccccgccactcgcaggcctaaaacacatatcaactctcctatcactttgcttttccacgaaatcgaatgctcgagagctattgtaggcagatgcccgcgagcccgttttcgctccacgtacattaacagtcttttcccgttttgtaatcggaaacttatgtgtttgttgtcgaataaaccaatattccgtgaatggtagtagcgtctgacaaatagcagaccaagcccttgacgtgcctttttgcgcattctcgaggtgctgcgacgcgtctataatgggcgccacacgtgccattgaaaaaggatcgattcatgaacctagacgactttgccgacctcgatttcgaccgcgccaaacgctgcgggtttcccgaggtcatctacgccgcgagcaagacacccgagcagatcgcggcaatcgcgcaggtgcttctcgccgagcacggcatcgcgtttgccacgcgcgtgaaagacgaggcggtgcccgtcttgcgtgcggcattccccgatgcctgctggttcgaacgctcccgcgtctttcttgtggaccgccgcaaagaccccttgtcgggcgcgacgttcgaggagctgctcgcgtgccccaaccgcgctgcaggcaacgtcgtcgtcgcctgcgcgggcacgagcgacctgcccgtcgcagaagaggcggcgctcacggcgcacatcatgggctcgcacgtcgagatgctggtagacgtcggcgtcgcgggcgtgcaccgcaccctgcagcacctcgacgagctgcaaagcgcccgggcaatcgtcgtggtcgccgggatggagggcgcgctcgcctcgctgatcggcgggctcgtcgacgtgcccgtcgtcgcagtgccgacgagcgtgggctacggcgcgagctttagcggcatagccgcgctgctcggcatgctcaactcgtgtgccgggggcgtttcggtcgtcaacatcgacaacggcttcggggcggggcagattgccgaccgcatcaaccgcccgcctgcgcgctttacagaagcctgaccgcctcaagtgcctcatccatgatggcagccgcatcgttcgtcacgatatcgagcccctcggccgcgacgcagacgctctcctcgaaaccaaaatagagctcgaacagcgccttggcctggtcgaacccgtagttgtactttccgaggtagccgccgaccgtcgtcacgtagtacagcttggtaccgcggcacagcgccgtcggcgtgccgtcttcgccatacgtgaacgtcacgccctgggcgcagagcagctcgaagtagatcttgagctgggcgggaaacgagaagtcccagtacggcgccgcgatgagcaccacatcggcctccttgagctgctttgcctgctcaaagagtgcatcggagaagtcaccgcgctcgatggcggcgctgcgccgattgagccgctccgagtcgagcggttgcaggtcgagctcttcgagcacgagctccaagacgaggtcgtcgtctgctgagatgtggtcgagcaccgcccgggcaagacggtcggtacgcgagatatcgcgattcacgcaagcgttcacaaacaggatcttcttcatcgggcgctcctttgcatcgacgcatttccatgagtatagcgacccagcagatggcgcataagaaaaaggaggcgaggaggtggcaaaatgccaactccccgccctcctcgacagaactccgcgaaccgactcgggcccagctaccccagctgcgcctcgatgagcttgagctcctgcgtgagctccgcatgctcggccttgaccttctcgacggcctcgggcgcggcctttgcgaggaagttctcgttgccgagcttcttgtcgagcttggcgaggtccttctccgccttcgccttgcgcttctcgaggcgctttctctcctcgtcgaagtcgacgagcccggagagcagcgtgtagacctcgacctcgttgacgaagtcgatgccggattcctgcggctttgccgcatcggcagacaggacctcaaacgcgctcaggcgcgcgaggctcgtgatgagcccctcctgctcgcgcaggtaggctgccttcgcctctgcgtccgcgcccgtcgggcgcacggcaatcgcgagctgctggcgcgggctgatgccgtagtgcgcgcgcgtggagcgcacggaggagacgacgtcgcatgcgagcgcgacggcgcgctcggacggctcgtcgatccatgcggacagctcgtcggggtcgggccatgccgcgaccatcagggccggggcgtcgtgctcgatgggcaggtgctcccagatggcctcggtcacgaacggcatgaccgggtgcagcaggcgaagcgccgtgtcgagcacgtacacgaggttgcgttgcgcgacggcacggccggctccgccctcgttgagccgggccttgcagagctcgatgtaccagtcacagaactcgttccagaaaaagacgtacagctcatgggcgacggtgccaaagcggtattcctcgatgccgctcgtgacgttggccgtgagcttggccaggcgggacaagatccatgcgtccgccggcgtcgcggcctcgggcgcacccggctcgtagccttccatgttcatcatgacgaagcgcgcggcgttccagatcttggtcacgaacgagcgcgccgcttcggtgcggggcgagtcgatgagcttgtgcgtcttcttgtcgatgttcgcatcgaacttgacgtcttggttgttggtgacgagcgtgagcaggttgaagcgcatcgcgtctgcgccgtacttctcgatgaggtccatggggtcgacgccgttgcccttggacttggacatgcggctgccgtcctttgccaggatcgtcgcgtagatgaagacgtcctcgaacgggatctccttcgtgaagtacagcgagctcatgaccatgcgggcaacccacagcgcgatgatgtcgcgcgcggtgacgagcaccttggtgggatgatggccttccatgagctcgggatggtcgggccagccctgcgtcgcgaaggtccacagctggctcgagaaccacgtgtcgagcacgtcctcgtcctggtggacatgaccgccgcacttggggcagacgtccacgtcctcgagcagggcatcttcccagccgcactcgtcgcagtagaagacgggaatgcggtgcccccaccacagctggcgcgagatgcaccagtccttgaggttttccatccaggtgaggtaggtctgcgtccagcggtcgggatggaacgtgacctcgccgttcttcacgacgtccgttgccgggcccttgagcttgtcgacggcgacgaaccactgctcggaaagccagggctcgagcgcggagtcgcagcggtagcagtgcatgaccgaatgctcgagctcgtcgacgtggtcgagcaggtcatgctcctcgaaccacgccacgatggcctcgcggcactggtcgcggtccatgccggagaactcgccgtagccgtccacgacgacggcgcgttcgtcgaagatgttgacctggggcaggtcgtgcgcctggcccatcgcgtagtcgttgggatcgtgcgcgggcgtgaccttgacgaagccggagccgaagcccgcgtcgacgtgccagtcggagaagatcgggatctcgcggccgacgatgggcagcacgacggtcttgcccacgaacttctgcttgtcggggtcgtcgggcgagacggcgacgcccgtgtcgccgagcatcgtctcggggcgcgtcgtggccaccgtgatgtactcgacgccgtcgaccggctctttaagggggtagcgcaggtgccacaggtggcccttctcgtccttgtattccgcctcgtcgtcggagatggcggtcatgcagctcgggcaccagttcacgatgcgcttgccgcggtagatcatgtcgtcgtggtaccagtcgcagaagaccttgcgcacggccttggcgtagtccggcgacatggtgaacttctcgtcgtcgaagtcgacggagcagcccatgcgcttgatctgctcgacgatgattccgccgtattcctcgcgccacttctggcattcctcgaggaatttctcgcggccgatctccaggcgcgagatgccctcggccttgagcttcttgtcgaccttggtctgcgtggcgatgcccgcatggtcggtgcccaagatccagcgcgtcgaatagccgcgcatgcgcgagtagcggatgtaggtgtcctgaatcgtgtcgtcgagcgcgtgccccatgtgcagcatgcccgtgacgtttggcggcggaatgacgaccgtgcggtcgccttcgcccttcgagcgggcatagtacttgccgtcgagccacttgtggagcatctgctcctcaaccagtgcaggatcgtagttcttggacatctctgacataggggtcttgctttctctcatagttcacacgaatgcacaagattatagaggatactccatctttgagcggcacgtcttctgaaggcaccgcgacatgaggacgtcctttcctgcgccttcttctacgccaaagcgaacgcttcccgccaaaaaagcagagcccgcagcttcatgccacgggctctttgtggggcatttggtgcttgtagagcaggcgagcgctacgccacgcctcctgcaaggcgcttgccacggcggatgacctggggctgggcgccctcggtaacgcattccggcgtgacgatgaccttctggatggtgtcgtcgctcggcagctcgtacatggtctcctgcagcacgctctcgcagatcgagcgcaggccgcgggcgcccgtgttccggtcgatggcctctttggcgatcgcgtggagggcggcgggctcgaactcgagctcggcgttgtcaaagccgagcatgcgctggtactgcttgacgagcgcgttcttgggctcggtgaggatgcgcacgaggtcgtcttcgcccaggtcctgcaccgaggagacgaccgggatgcggccgatgaactccgggatcagaccgaaggtgttcaggtcctcggggagcacctgcgcgagcagctcggcggactccatcttgcgggattccgccacgtcggagttaaagccgacgccgcgcttgccgatgcgctcgccgatgatcttgtccagcccgacgaacgcgccgccgaggatgaacaggatattggtcgtgtcgatgtggatgagctcttgctgcgggtgcttgcggccgcccgtcggcgggacggcggcatcggtgccctcgacgatcttgagcagtgcctgctggacgccctcgcccgacacgtcgcgcgtgatggagagattttccgccttgcgggcgatcttgtcgatctcgtcgatgtagatgatgccgacctgcgcgcggtcgatgtcgttgtcggccgccgtgatgagcttgagcaggatgttctcgacgtcctcgcccacgtagcccgcctcggtgagcgccgtcgcgtccgcgatggcaaacggcacgtcgaggatgcgagcagcgtcttgccgcagccggtggggcccagcagcaagatgttgctctttgcaagctcgacgtcgccgtcgtcggcctcaatgccgagcgcgacgcgcttgtagtggttgtacacggcaacggagagcgccttcttggcgttctcctggccgatgacgtattcggagagcttgttgtggatttccaccggcgtcggcagcgagtcgagggagatgagcccctctttcttgccggtcgcggcaggcagcccctcctcttcgaaggagccgccttcctcgtcgatgatgtcgttgcagagcttcacgcactcgttgcagatgtagacgccatcgccggcaatgagcttgtcgacctggtcttgcgtcttgccgcagaacgagcagcggagcatgccgccgtcaaaaccgcgcgtgccgtcgggcatgtgctattccttcttctctgccgcacttgccgcgcgggacttgacaacgtcgtcgatcagaccgtaggccttggcctcctgcgggtccatgaagttgtccttctcggtgtcttcctggatgcgctcgatgggctggccggtgtggtgggccaggatgccattgagctgttcacgcgtcttcaagatcatgtcggccatgatctggatgtcggtctgcttgccctgggcgccgccggaaggctggtggatcatgatggtggagttgggcagtgcgaagcgcttgcccggcgcaccagctgccagcaggaccgcgcccatggatgcggccatgccgaggcagatcgtggacacctggggcttgatgaactgcatggtgtcgtagattgcgagaccagccgtcacagagccgccgggcgagttgatgtagaaggagatgtccttgtccggatccacgctctcgaggtgcagcagctgcgcgacgatggagttcgcggaggcatcggtgacttcctcgcccagaaagacgacgcggtcgttcagcaggcgcgaatagatgtcgaagctacgctcgccacgcggggactgctcgatgacatatgggatgagcgggtcttgaatcggttggaaggttgccatgttgactcttctttcttacggtgcgcttttgcaagttccccaacttggaaaagcctagttgtcggatgcgccctccttggcggcttcctcgataacgatcgcgttgtcgatgagccactgcgcggccttggaacggcggatgccctcgcggagcagggacatgcggccagactcctcccaagacttgcgagcggcagccgggtcgtcgacgacctggaactgctcgtcgatgtctgcgtcggtcagctccatgccgcgtgcctcgaacagcgcgtccagagccaggctctgctcggcgttctcttttgcctcgtcgtcgagatcggcacggaactcgtcagcgctgatgccacgctgggccaggaactggtcgaacgtgatgccggcgctctgcaggttgttgaagaactccctcaggacctcgtcgcgggagtagttgatgtaggactcgggaatctcgccctcgatgcgctttgcgagcgcctcgacgcagcgacgctccttgagctcgggcagctggcgctcccgctgggtgttgatctggttggcgatctcttcgcgcgtctgctcgagcgtgtcgaagccgatcctcttggcgaactcctcgtcgagcgtggggagctccttggtctggaccttggagacggtgacttcggcgtgaatgatcttgcccttgaagtcggcgagctgctcgtcgtcttcggcgacctcgaagtcgaactccttggtttcgtctttcttcatgccgaggacctggtcggtgagctccttgggcagtgcgtcggagccgagctcgaccagacggctcgggctgttgagggcgtcgacggccacgccatcggccttggcatcgatggacatcatgacgtagtcgccctcttcggcggcgcggtcgacttcctcgaactcgtagtagtagtcgcgcagggactcgagctgcgcctcgatctcttcgtcagttgccgtcgcggggggcatctcgatctcgaccggctcgacgctcgtcagcgtgagcttgggagcgacctcgccgtacacctcgaaggtgtagggcttgccgtcctcgacgctctcgaccttctcgtcgaccagcttggggtcgtcgatgaagatgacgtctttggagtcgagcgcgagcggaaggacctcgttgaccatgtcggaggtgatttccgcatagatggcctcgtggccgccgaagttcctctcgagcaccttgcggggagccttgccggggcggaagcccgggatgcggtttttcgcaaggtccttgaagaagctgtcgatgtgcttcttgacttcctgctcggtcagctcaatggccacttgggtcttgccgtcttcctcgcggatactggtggtgacttccaacgttcctccaaatctataggagccgccctgtgcggcactccccgcgcgccccgattgacgcgtgctttacttattcggtggtgcgggcgaaaggactcgaaccttcacgggttgccccactggaacctaaatccagcgcgtctgccagttccgccacgcccgcatcgcgcacagcataccctttatgcggcgtacgacaagtggagattgtagcgcagttgccgcagctcacccgttccgtagcatatttgtaaccaagccacgcggcgcattcgcgccgctcgaggccctaggagttcttcatgatgacggtcgcgaccgtggagcccgcgccctcgcacgcatcgcagcagcgctcgagcgccgcaagcgtcgcggtgataccgcttgcctcgatgttggactgcggggtgttcttctgcttggcggccttcaggatgtggtgaaccgagcggatgtagacgcggtcggcccgatcctcgcagttgttgatggcgatgatgtagctgttgatcgagcgcgacttcttgtagtgcgtgaacttctcgcacatcgtgtgcactgccgcgaccgcatcgcagacgacgtcggtcatctcgatgatctcggggacaatgatggtgaggtcgtacatgtagatgtgctgaatcacctcgtcgagctcgtcgaccacggtgtcgagctcgtcggacagcatcatgatgtcctcgcgctcgatgggcgtcacgaactcgtcggcaaggtgctctgcaatctcgtgggtgacgtcgtcggaggcgtcttctatctcgtggagcttgctcagcatctcgaaggtctcgcccgagggaagcgcgccgagcttcttttcctcgtcgtaatgggatttgaggaactccgagagcttttccgcgtactcgaccgcgtattcgctgatctttacgaatgcctcgaaataatcgtacttgtgcttacgtgccacgtgttgcacctctcctggtggtctgattcgccgcgtcccgtattgtatcgcgcgcgcatcggatttcctcgtacaagcaagatagaatatcggcatggaaccctcggacttcaacatacccgaacgcacctggaagggacgcgcgctgctgctcgtggacctcgacgcgttctttgcgagcgtcgagcagctcgaccaccccgagtggcgcggcaagcccgtgatcgtgggcggccgctccgacaggcgcggcgtcgtctccacggcgtcgtacgaggcccgcgcgtttggcgtccactccgccatgccctcggcgacggccgagcggctgtgccccgatgccatctggacaagctcccattttgaccgctaccacgagctttccgcccaggtcatgggcatactcaaagacgagtcgcccctgctcgagcagatgtcgatcgacgaggcgtacctcgacgtgtcgccgggacgctacaccggcgaggacccggtcgcgatcgccgcgcgcatccaggcgcgcgtcgcggagctcggaatcacctgctcgatcggggtcgccacgggcaaggccgtggccaagatcgcctcggacatggacaagccgcgcggccttaccgtcgtctaccccggcggcgaggcagcgtttctcgcgccgatggacgtgcgcgccatgcccggcattggcaagcagagcgccgagcggctccggcgcatcgggatccgcacgctcggcgcgctcgcggacaccccgctcgacaagctcacacccctcttcggggtcaatgcgcaggcggtacgcgaccgcgcacggggcatcgacccgcgcgagatcgccaccgagtcggaggtgaagtccgtgagccacgagcgcaccttcgcgacggacctcgtgacgcgcgaggagatagaagacgccatcgacatgctggggccgatggtcggaaggcgcctgaggaaaaaggggctcgccgggcataccgtcaccataaagctgcgctacgccgacctctcgcgccgtaccgcgcaaaaggggcttcccgccaacgtcgacgacgagaccgtgttcatccccgtggcaaagcgcctgatcgacgagatctggcgcccgggcgactcggtacggctcgtcggcctgggcatctcgggattcgaggcgcatgacgagcagctcggcctgtttgccgacgaagagctgcccgccggcaatgccgagctcttgagcgccgccgacaagatccgcgacaagtttggcgacggcatgctcaagtttgggcgcgagctcaagatccgccacgagacgagcggcacgacgggcatgaacgacggcagactctagcgcctgttcgcgacgagcgcctcggcgagctcgtccatgtccgcgcggccaaacgagaagacgacctcctccatgcccgcctcggggcgcacgaacgcgagctcgacgcgacgtgcgagccccgcatcgagcaccgcaaaggcatagcactgcgcctgcagcgtatagcgctcgcgaagctcgtcgccctcgccgctcgtgcccgtcttgtagtcgatgacgagtgcgtcggcaccatcgtcgtcgatgcagagcaggtcgatgaagccctcgagctgcacgccgtgggcctcgacgaaaaacgggcactcggcgcgccggcggtcgaagcttctcgtggcggcatagcgttcggacgagaaccacgccgcaagcgccgagcccaggcgctccctctcgtcggcaggcacgtcatagcgacgcgccgccgcctccgtccttcgggcaagagcctgctcgtcgaagacgccgtccacctcgtttgcccactgcgcgaccagatggaacgccgagccgagcgcgctgaccgtctcggcgtcgggcgtacgcggacgcaggcggggcagcgcgaagtcggagctgtccatgcggtgcgcaagcgacgagtaggactcgaacgcgggaagctcccgccggctcgccctgaccgcggcccgtgccgcagggcccggcaggaaatgcgagcgtacttcagaaggctccaccggctcctcgccctgcccgggctctccgtcgcccccaccgtagggcacggttacgacgcgtgccgcgacgagcgctccggtgtcggtcttgaacacgggggcttctcccagcgtgccctcgggatagacggcctccatcacgtcgtgcgtgagacccgccgcgaactttccggagctggcaaggcgcgaatcgtgcgcgacgagcagcagcacctcgcgcgcacgcgtcaaggcgacgtacagcaggcgctgcgactcctctttctcgcgctggtcggcaagctgtttggcatggacgcagaactcgtcggggtcgctcgcatcggcaaacgagcagatgtcggcctcctcgtccttgaagtggccggaggcgtcccccgtcacctttggctgcaacgccaggtacgtcgtgccgtcttcggtaagcgcctgcggctcaggtcccgcctgcctcttgcccgacttctcgtattccgcgaccgcgacgatcgggaactcgagtcccttcgacgcgtggatggtcatgatgcgcacggccgcgttgccatcggacaccatggtgccgggcttgccgcgcgcgcccgcgcccgcctgggcaagttcgcacatctcgcggaaatgctcggccgccgcgacgaccgcatggcccgaagagcgctcgaaatcgtcgagcaggtcgcacaggcgctggatgttcgcgaacgtcgccgacccctccaccccatcgccctgcagctgggcataccagccgctgtgcctcaccaggcgcatgacgacggtggaaagcggcgtgctcggcgcgctgtccagggcctctcggagcgccccgtgcgcatgcagaagagcaaggctcacccgttcgggcgccgtgcgggcgaggtaggccaccgcatcccacagcgaggccttcgtgcgcgcctcgtcggcggcgatgtggagccgctgacgggcgatgccccacagctcgagcaggtcgtcgtctggaatatcgaacaggcgcgagcccagcagcgcgaacagcgcctcatcgtcgtcttggtcttccaggaacctcaagaacaagacgaggagcaccacctcgggctgggtgtagaactcggagccgcccgcgatgatgcaggggatgccgcggcggcgcagctccgacacgtacgcccccgccttcgtggatttgatcgacgagagcaggatggccatgtcgccgtaatctgcccctgccgccttgtaccgctcgaactcgtcggccaccagcgcggcatcggaggcgcgcagggcggcaactcccgtggcgccgctgccccggggggccttctcgccggcggagaccagcagcttgacgcggggctctgccccatcgacccacgacagcggacgcacgttgccctgccccgcctcgacctttaaaaactcggtgccgaagaactccggcttgctgaagatcgtctcgacgaagcgcaggatgtccgggtgggagcggaagttcgtcgtgagctcgacctcgcgcgagccgcacgccgccatctgggcgcgcacctcccggtacacctcgaggtccgccccgcgaaagccgtagatggactgctgcgcgtcgcccacggtggtgagcgtgctgagcgcatcgtcgcagaagcgcttgacgatctcgacctggagcaggtcggtgtcctggaactcgtcgatcatcaccgtcgcgaagcgctcgcggtacatatgcgcgatgtccgggcggctctccagcagacgataggtctcgatgagcaaatcgtcggtgtcgaccgccccgagcgcgcgtttgctcgcacggtgccgtgcgcagacgccttctgccaggctcagcgccatacgcagctcctcgcccgccgcggcgcttgccgcctcgacgcgcaccgcggtgatgcgcgcacggcaggtcttgaacgcctcgcggtactgcttgggagtgttcccgcccttgacctcgggcagtccctccagaaacgagctcgtgcgccgccagctcggggcatcgcacgatgcctcgacgaactctttcagctcgtctaccaccgtgcacaggatgcggtatgccttgaggtaggtggtcgactcctcgccttcgcccagctgtccgagctcctctttcatgccggtgagctcggcgagcaggttggaaagcggcgtgatggtcgcgggcgccggctccgggccgaggtcgaaggtctccacccctctcggggcaagtgcaagacgcgacgcgaggtcgccgacgagcgcgatggcgtcgtcgacgccgtacgcctcgagcagcgtctgcagctcgacggaatcgccctgctgcttgagcatgtcctcgagtgcctggtcgcgcagatcggagctctcctcctccgtcaggagctgcgcgccggggtcgatgcccacttcgaaggcgtgctcctgcaggatatggcggcacatcgagtgaatggtggagatccaggccgcatcgacgcgcagggcctcctcgacgagcccgcggcgcctgagctcggcacgcacgcggccgagcagctctcccgccgccttgttggtgaaggtgatggtgagcaggttctcgacgccggggatgaggcgccccgactcgtcggaaagcccataggcgagcctgttggtgagcgtgaacgtcttgcccgttcccgcgcccgcctggatgaacagcggcctgcccgccgtctcgacggcgagcttctgatttggggtaagtgccatgtcacaccttcgccttcgggcagaacagaagcgccttgcagtaatcgcatacactcgcatcgtcttgcagggggtcgggggctatgtctcctgcggcaagatgttccatgcactgcgcgacctcggcctcgacgtgcgccaggtactcgtcgtaggtctcgtcgctgcccgccctgggcaggccgtccctatcggcacgtaccgtctcctgaggcccccactcgataccgcggtcgtacacgccgcgcagcgcgttgcgcgcatacgagcggtacaccgaccccctgaccttgaggggcgtgccgagcaaatcgaaatgtcgctgcacgagcgtggcgtagatatcggtctggatgcgcgagggcaatagcttgtcggggtgcagcccgtagccctccgaaaggctgctgagcttgtagtcgatgacgatggcgttgccctcggcgtccacgtcgatgcggtcgaccttgccgcgcacgaaaacccccgcgtactcgaggaccgtgcccgtgtccttgcccaagttgagctcgaagtacgtcggcacgaaccccggcaaaaacgtcgcctcgcggcgcacgaaatccaagatgagcccgcgcatgtccgaaaggacctgctcgtcgcgctccgtcttgagaaacagtcccgagcggctcttgccccggtcatgctccacctgcgcatcgaaggcctgcgatgccacgtcgagggcgaacgcgaggttgtcctcggtgacgcgggcagcgccctgggccttgagcatgcggtagaagcgctcgaacacggcatggacgaggttgccctgggcggcggcgtcgaaggagcggtccatcccgttgaagttgacgcgccggcaggtgaaccagcggtatgggcagcggtagtagtcttcgatccccgtcggggaaaacggcagtgcatcgcccgagataccgcacatgaggtagggcagcgcctcgtcatgctcgatcgagccccgcaccacagcgcgccgctcgccgtcttcctgcacgtcggacgcgaactgccgcgcctcgctcacgctcagcgcagcctctcgcagcgccggcgggacgacatgcgaggcaaggccgttctcgtcgtcttcttctgtacggtacgcggacatgagctcgtcccacagcgcgctttggcatagctcgacgccatcggccgcatgcgtggcgcggcaggcggcaaaccccgagcgggcgctttcgatggcgtcgagcaagaacacgcgctgaaagagtgccgtaagatcctcgccgcccacgccgagcttggccagcagcgggtcgaacgggctttgccggcgcgccatgggatgatgaacggtatcgaggcccgcgacgatgacgtggtcgtagcgctcgaggccgactgcctcaggccccgcaaggagcacggcgtcttccgcatcgcccgagcagcgaaacgcatgtatcgagaggttggccatctcggcgaggtcgggctctgcgccgagctcgccgcagacgtcgaaatactcgagcagggcatttgccgccttggcgtcgtcgacgagcacgtcacccggcacatgcgccgcctttgcgttgtcgaacagcgtgcgcacctgctcgcagggctccatgccgagcagggcggcaagcggcgccaggcgctccttcgtgacctttgacgaggcattgccgcgggcaaagccctcggttatatcgtgcagacgcgcttcgggcgtggagcacgcctgctcgcgccagcgcatctgcaaggcacgcgcgtctttgggctccacccccgagtacggggaggccagaaagccgacgagcggcacatagccctcgtcggaacccgagctggcacaaaagcgcgcgagcgagagaaacgccgcgcccagcgccgtgcgcgacaccggcagcgagaattcggcctcgaacgggatgttggcgcaggcaagcgcctccagcattgcggggtagctgtccgccgcattcggaaagacgatgcaggtcgtgccggaaggcccaaagctgcgcaggcgctctatcagcacggagggctcggcatgggcaccgcgcgcctcgtcggcaaagacggaaccgtccggctcgagcgccgccgtgccggcgtagagcacgcgtcggagctcctgcaggccgggcgcctgggaggcggcaggctcgaacgcggccgcatccacttcgcacggaagcgagcggccgagcaccgtcacgtcgacgttggaggaaatcgccttcagaaacgagagccggtgccccggttgcagcacggcgttctcggcgacaacatcgtgggagagcgcctcctccgccagcgaacgctcgacctgggcgcactccaccatgccgtgcgcggcgagcgcgtcggcatacagggagaccagctcgcgcatcttctcctgcgaatcgtccagctcgccggggtatgcgccgagcaggcacaccgcctcctggacgaatgtgcagagctcgtcgacgagcacgggagagggccgcgactcgagcagccccacgcgctcgacgagcgggcgcacgagcacgcgcctgcggggcgcgtcgacgattttgctcccgtcgccataaagctcccacagacccgcaagccattggtcgtaggtctggaccgaaacgccgaagggcgccgtggcgagcagttggcgcttgcgcgccgtcccccagcgcacgctgggcacgatcaggtcgaccccgcgcccagctgcaagcgaggcgcggacgcgctcgtcgcttgcggacacgagcacggccttgctgcacgcgtttcggatctggaacatctgcctgccttccccctaagtgccccgacgaccgcgcgctaggcgtcgagcccgtcgatgacgtcgagcagctgcgcgggtgcgtcgatgatgaagtcggggtgctggcgctcgaggaccgcgacgtccctgaagccccaggtgcagcacacggacacgcagccggatgccttgccgacctgcgcatcgggttccgaatctcccaagtagattgcctgctcgggcgtgctgccgagctcgcgcagcgcggcaagcgccatgtcgggggcgggctttgcgggcatggtgtcggagcggcccacggacagcggaatgagcccatcgaaccacttcttgcgcagcgcctcggtatccgtatgccatttattgctcacgaccgccgtcttgatgccgcgttccctgagcgcgacgagcagctccatgatgccctcgtacggctcggtcgtgtcgttgcggtgtgcggcgtagtgcgcggagaaatcgtcgtagaccttctggaattcgggcgagcccgtgggaaaggcgtgcttggtgacctcttcgatgaggacgaccgagccgtagccggcggcgagcctcgtctcgtcgaacgccacaggcggaaggccagactgccccagggcaaagttgacgctcgccatcaggtcgccgagcgtgctcaagagcgttccgtccatgtcaaacagcaccgtggtaatcttcattgttcacctttgcatcggttgcgggcttcgtatcgcatagggattgtagctcagcggtgagacacgaaaatgctagactgaccgcatggctacgacattgtcactcatactcgcatccggatcgccccgtcgccgcgacctgctcggcgccgcgggcttcgacttcgacgtcgtcacgagcaacgccgaggaatcggcatccgcagactgcgaccccgccgcgctcgccaagcacaacgcgagcgtcaaggccatctccgtcgcccaagacgcagacgagaccgccgtcgtcatcggcgcggacacgatcgtcgtgctcgacggcaccgtgtttgggaagccggccgacgaggccgaggcgcaaagcttcctgcgcgagctttcggggaggacccaccaggtcatcacgggcgtgtgcctcgtgtgcggagatgcgtacctcgcgtttcacgagaccacggacgtcacgttcaagcaactcgacgacgagaccatcgccgcctatgtggccacgggcgagccgctcgacaaggcgggcgcctacggcatccagggtttgggcgcggcgctcgtcgaccacatcgagggcgacttcgacaacgtcgtgggacttccgatggcaaagctcgcggcaaagctcaccgcgctcggcttcgagccgcacgccgactagttcttgttggaacgcgcgaccttgatggccgcgatgaggtacaagacggggaagaacgcgaacaggagcgtccacatgagcgcggccacgaccgtgcccgccgcgagaaccaccgcgtagacgaagaacgccaccacgaacagcagcgccacgatcgcgaacgcgaccgcgacgagggcgtgcttgggatgctttgcaacgtagatgccggcaagcgccggagggatggtgaggatgcccacgaccacgccgacgacccacagggtgaactgcaccgcgagcacgctgcccgcgatgtccatgatgccgatgatgctgctcaggcgcacgaggaagtagacgatgatgacggctgccgagacgaggatggcgatgctcacgcccgcgagcatgcgatgtccccacgtcttctcgaagacgagcagctcgtcgttgccgcggtcgtccgtgagtaccgaggggtcgaccttctccggtttgggctcgtagtcgccctgctgcggggtcgttcccgtacggcgcgtttctctgtagtcgtccaagttttccatacggctagtttagctgttcacgatggtcttttcaccacaggccgggcactttaccgcgattttgccccgacctttcgggacgcgcatcttctggttgcagaactggcaggtcaggtacgtgtagccggactgctcgcgtgcgaggtcctgctgctttttgccgcccttggcccggcggctcaggtagcgctcgttctctttgcggcgcttgtcgcggttgcgcgagagcatgcgggcaatcgtgaggacgagcatgacgatgctcgcccagttgacgacagtcgaggcgatgttcaggccgatggccaccgccgtcccgccaaacgtggcgaagatgcgggcagccacgctcagcacgatggatgcggcgatcaagatgatgacccagatgctcatcgagcgaccgagtgcatcgtatccgtaccgcccctgcatgaaattggccagccacgacctgaatccgcccattatgcccccgatttcgcacgtacgctttcttgttcggcaggtgattctacctgtccggctcggcttgcctgcaaaaccgtgatgatttcgacacgatgcccacgtctactccacaccgatgcgcgaaaaacgctcttggcgcatacgaaccagctcggacacggggatgccctcgagctcgcgcagcgacgagacgacatattccttgaccgcccgcgccgcctgctcgggatgctcgtgcgcgcccgcgccctcctcgcggatgacctcgtcgacgatgcccatcgcctttgcctgccaggcggtcggcttcatggcatcggccgcctctgcggcacggctcgcgtctctccacagaatcgaggcaaagccctcgggcgtgaggatcgagtagaccgcgttctccatcatcgcgatgcggtcgcccacggccagcgcgagcgcgccgccgctgccgccctcgctcaagacgatgctgatgaccggcaccctaagcccggcaaacgtcgtgagacactccgcgatggcattcccctgaccacgctgctccgacccggcgtcgcagtgggcgccctgcgtgtcgacaaggcagatgacagggcggccgaactgctcggcctggcgcgcgaggcgcagcgccttgcggtagccctcggggtgcgagcagccaaaattgtgcgcgacgcggtccgccgtgttggcgcccttctcctgcgtgataaccgtgaccgggcgcccctcgacaaaccccagccctgcgacgatcgccgggtcgtcggcaaaggagcggtcgccgtgcatctgcagaaatccgtccacgagcgcgtcgaggcagaccgccgccgtgggccggtcgacgcggcgcgccagctgtacccggcgccaggcatcggcatctgccccgccacgcgttgccgcctgctcgacgcacgcggactgcacacccggcgcgatgtctttcgggagcgggacctgcgccgcgtggtaccggtcgtctggtcgcgacgtgggctgggcgatgcgcgccgccgtctggaccccgcgtctcagcacgtcttttatcccgaacgagagggcgcgcactgggtctttgcgcaggtgcctgcgctcgtcgctgcggtttttctggacgaagtccgacgagcggcgccccgtgcgcttgtcggcgttcttggcgcgtgcagccatgatcgcctcttcttcgcgcgtcgggatatggtgcaaggcgatgagctcggagatgacgctgcgcaggtcctcgcgggcgacgatgccgtcgatcagcccatgctccagcgcgaattccgccgtctggaacccctcgggaagctcttcgcgcacggtcgactcgatcacgcggcgccccgcaaacccgatgagcgccctgggctcggagatgatcacgtcgccttcggtcgcaaacgacgccgtcacgcccccggtcgtcgggtcggtgatgacggagaggtagaacaggcccgcagcacggtgccgctgcaccgcgcacgagaccttggccatctgcatcagcgaaacgagtccttcctgcatacgcgcgccaccggaggcggcaaacacgacgacggggagcttttgctgggtcgcgcggtcgaacagcctgttcaggcgctcgcccaccgcatagcccatcgagcccatcatgaagccggaatccatggccgcgatgccgcacgattgtccctcgatgcggcagaagccgcagacgacggcctcgttttcgccgctgcgcgcctggacggacgcgagctttgcgggatacccggcaaactcaagcgggtcggagccctccacgtcgcctgcgaattccgcgaacgacccgaggtcggcgacgagcgcgatgcggtcacgcgggcgcatgcggaagtaggagccgcagcgcgggcagcagaaatcgcacgcgagcaccctgtcgctgggagccgagtacccgcactcccggcatttgtggaccggcttgcgcgcgacgccaaccggcggcgtgatctgtatgtacttcgtgcgtgccatctgccttctcgcctctttcccgcgctacgccatcacgtagaactggtctgcctcgacgcagacctccccgccgacgcgcgcgaccacatgcgcgcgtgccgacctgctgttcgccttgagaatctccgcctcgagcacgagcgtgtctccggggacgacctgcttgcggaacttcgcgttgtcgactttggcgagaaacccgagcctgccgtcgttttccgggttcgcgagaagcgcgatgcccgccgtctgggcgagcgcctcgagcatgagcacgcccggcatgacgggatgccccgggaagtgcccctcgaagtgcggccaggccgggtcgatgaagagctcgcctgtcacgtgcttgcccagatcgtgctcgacgatgcgatcgacccacaggaacggctcgcgatgcggcaggatcttcttgatgtcttctcgttcgagcgggtgtcccggcgtggggaccagctcctgctgcgtcagtgccatggctgctcctcgactgccttgaacgcgagcgacacgttgtggccgccaaagcccagcgagttggagagcgcgtagcgcatggggtggtcggcgacggtcgtcccgctcacccacacgtcgagtgcgtcgtcagggacgcggtacccgcaggtcccgggcacgcgctgctcggcgagcacgcgcgccgtcaccgccgcctcgatggcaccgcaggccgcgatggcgtggccgatgttgcccttgaccgaatgcacgaggacgtctttcgcgtgcgggccgcacagcgcatggagcgccttggcctctgccgcgtcgttcatctgcgtgcccgtgccgtgcgcgttgaggtagtcgagctcgtcggaagagacgcccgcctcctcgagtgccatgcgcatcgcacgtgcgggaccgtccccctcggggtcaggagccgtcacgtggtaggcatcgcaggtgttcccgaagccgacgatctcgcccaggacgcgcgccccacgcgcccgcgcgtgctcgaacgactcgagcaccaaaacgcccgcgccctccccgagcacgaagccgtcccggcgcgcatcgaatggcagcgacgccgcagctgggtcctcggagcccgaaagcgccgtgaggttgctgaacgcgccgagcccgagctcgttgatgaccgcttcggcaccgccgaccaccatcacgtcctgatagccgtggcggatggcccgcacgccctcgccgatcgcatgggcgccggaagcgcaggcggtcgtcgtgcagctgcactgccccttgaggccgtacttgatcgcgacctgccccgctgccatgttgccttccatgatgatgcccagcagcgggttcatcttcttgacagtcccgttttcgagcagcgcggcatggctgtccatcgtggaccgcagaccaccgcacccgcttccgatgcaggtgccgcagcgcgtcgcgtcctccgtcgccatgtcgatgcccgcctgctgccacgcctcgtgcgcggcgaccatggcgtattgctggtacctgtccgagcggcggacctccttcttcgtcatggccccgcttgccgccgggtcccagccctttatctccgcgtcgacgtggaccccgtgcaagggagccgtgtcgatgcgctcgatgggaccgatatggagctcgcctgcgacaagcgcgtcccacagccgctcgaagccgattcccgccggcgtgaccgtgccgacgcccgtgatgaccactctcgtgccaatgcccatgttcacatccccaatccgccgtcgatgtgcagaacctgtcccgtgatgtatgccgccttgttcgaggcgagaaacgcgacggcatccgcgacctccgccggggccgccatgcgcttgagcggcacgccatcgacgagctgctcgagcacctcgggcttcatgcgcgccgtcatatccgtctcgacgaatcccggagcgaccgcgtttgccgtgacgttgcgcgccgcgagctcgcgggccgtcgccttcgtgagtccgatgacgcccgccttggcagccgagtagtttgcctgccccgcctggcccacgacgcccgagagcgacgtgatgttgacgatgcggccgtagcgctgcttcatcagcggttttgccgcatggcgcgtcatgttgaacacgcccttgaggtcggtggcgatgacatcgtcgaagtcctgctccttcatgcgcacgagcagcccgtcgcggttgatgccggcattgttgacgagcacggcgatgtggccgaagcgctcgatgcttgcctcgacgagacggtgcgcttcctcgaagtcggacacgtcggcgcgcacgaccaatgccgcgaccccgtagcgcccctcgacttcggcctgcagctcggctgcagcccgtgcgctcgtctcgctcgtgtggttgatgaccacgtcgcggcccgctgcggcgagcgcgcgcacgatggcagccccgatcccacgcgccgcgcccgtcacgagggcgcatccttcaagctcagacattgcatgcctccagttcctcgaccgtcgcgacggacaccagctcgacctgcgcgcccatatcccgtgccgtgcgcttcgccatgcccgtcagcaccttgcccggaccgcactcgacgaaggtgtcgacgccgtcggcgatcatgttgcgtatggtgtcctcccacagcacgggcgaggtgatctgccggacgagcgattccgcctcgttaccgtgcacgagcggcagggcgttgtagttgcagtacagggggatgcgcgcttccgaaaacgcgaccgacgcgagcgggcggctcatctgccgcgctgccggctccatgagctggcagtggaacgcacccgaggtcttgacgggcgcgaacttgccgccctgccccttccagcgctcgcacgccgcctcgagggcctccttctcgcccgagatgaccacctgcccggggcagttgacattcgacggcgccagcacctgaccgaactcctctgcgcaggacctgcacagacgcgccgcctgcgccaggtcgcagcgcagaagcgccgccatgccgccctcgtgctggtctgccgccatggccatgaccgctccgcgacggctcacgagctcgagcgcagtctgcacatcgagggtcttcgcgatcacgtgggcagcgtactcgccgagcgagaaacccgccacgcagtcggggtgcacgccacgctcctcgagctcgttggcaatggcaagcgacacggcgacgagcgccggctgggtgtattgcgtgcgcgagagctcctcgagcggaccatgttcgatcagggcgcggatatcggcatgtgccgcgcgccccgccagctcgagcagctcggctgccgcctcgaagcgctcggcaaagtcgatgcccatgccgacgcgctgggcaccttgcccagagcacagaaatgcgatttttgacatttagaggttctttctggtctcgttatgcgcgagcagctgctccgcatcccagttgaggattgtttccgcctctgccatgaggccctgcacgacttctgcggcactcccgcgctcgtgcaccatgccggcgacttcgcccgccatgaacgagcccgtctccaggtcgccgtcgatggcggcgcggcgcagcgatccggcgtgccgcagctcctgctcggcgccatcaagtgcttctttgagctcggcgctgcgcgcctcgcgcgcgaacttgttcttcaacccacgcaccggatgcccggcgatgcggcccgtcacgatcgtgtccgagtccttcgccttgagcaccttgcgcttgtagttctcgtggaccgtgcattcgtccaccgtgagaaagcgcgtcccgacctggacgccctctgcgccgagcagcagcgctgcagcgagctgccgaccgctcgcgatgccacccgctgccagcacggggatgcgcactgcctgcacgacctgcggaacgagcgccatcgtgttgagctcgccgatatgcccgcccgactctccgccttcggcgatgacggcatcggcgccgcacttctccatccgccgcgcgagcgccgtcgaggcgacgaccgggatgaccttgatgccggcgtctttccacgatgccatgtaggctgcggggcttcccgctcccgtcgtgacggcctgcacgcccttgtctatggcgagctgggccaggtcgtcggcgtgcgggctcatgagcatgatgttgagcgcgaatggcttgtcggtgcgcgccttcgcctcgtctatctgacgggccatgacatcggcgctggcacttccccctgccagtatgccaaggccgccagcattgctgacggccgaggcaagcgacgcatcggcaatccatgccatcgcgccttggaagatggggtgctcgatgccgagaagctcggtgatgcgagtcctcatcgtgctgttacttcagagagtcgacgtgcttgacgatgtcgccgacggtcgtgatgccctcgggctcgccaaagtcgatgccctcttcttcctcgaggtcggagatgagctcgaccatatcgagagagtcgaggtcgagggactcgagcgtggagtcttccgtgacggtcgaggggtcgacgtcgagattctcttcgaggagcttcttgatcgtgtcaatcgttgccatgttcgttcctttcgccatgcccgccttttggccggcaccgattgtatccacctgcaaatctaggaaaactctagacgcaacgcaagacagtgtagcgaacgggaacagcccgctttcagcaacggctcgttttgcgcatactttcgctcaggcgcacgtcacggtgcatttgcagcgcttcttcgagcgtaggggcaatggcgtcctcgggatattcgacatgccagaacgtgagcccacaggcaggtgcgttttcccctgccgcctgcctgtcgcgcgcgtcgaggaccccctgtacccacgcgggctgtctgcggcccgcgcccacctgcacgagcgtccccacgatcgtgcgcaccatggagtgcagaaacgcgttgccgacgatctgcatcgtgagacaacgctcgccgagcacctcttcctcgaaaaagtcgatcgattcgacgtagcggcaggtcgatttgccctctgcgcttgccgccttgcaaaacgacttgaagtcgtgctccccctcgagcaggcgggcagcctcctgcatggcggcgacatcgagcggcgcgcggtgccaccaggaaaactcgcgggcaaacagcggcggggcgcctcccatgacgatacggtagcgatacacccggtagacggcatcgaagcgtgccgaaaactcgggcgcggcaaagcccacgcgcgtgatgctgaggtcgtcgggcgtgagcgcgttgagcgacgtcacgattttccgcggctcgcgacatgcgagctcctctacgtcgagctgcagcgtgatggtctgctcgagcgcatggacacctgcatcggtcctgccggcgcataccgtctcgaccggatgccgaaacaacgtggcaagcgcgcgttcgagctcgccttgaatcgtgtgaaccctggggtccttttgcttggcgaagcccgaataggcccttccgttgtacgagagcgtgacgacgagcgtcacctgctcagggctgtccagagcgtccatacgaccccagctcctttgcgatacctcagttattaacaattcacatgtcacaagaacgccgccacggcaacgagcgccgcagcccccgcaagcagcacgagcgcatctgcggggcccatcctgccgccccgcaggtccatacgcgggctcacgccgtagcaacgcgcatccattgcgaccgagagggtttccgtcgtcttgaacagacgcacgaacagcggtgcgagcactaaagcccacgccctgacacgctcgagaacgggcccctcgtcaaaacgtgctcctcgcgcctcctgagcgcgtttgaccgtcagcgcgctttccgtgatggtcggaatgaacctgagcgcgattgagatgatcatggagacatcctgcacgggcacgcgcatcttgtcgagcggagagagcagcctggacagggctacggtgatatccgccaccgacgaggtaaacgtcagaagcgagcaggcaaagacgagcagagcaatcctgagcgccaaaaacatgcccgcaaatgccccgtccaaggtcagcccaaagcttccgcccggcgcgaagacaatgccagtcgagagcgcccccggctgtgcctgcactgccgcaaggttttccacgtcgcccgcgaacacatgcacgagcagcgtgaatgccatgatgaacacgacgacgccgatgccattcaaggcagagcgcagctttacgtgcgacacgacatacagaagcaccgtgcttgcgcagaggacagccatgccctcccacgtgtcgaccagaaacgcgcagatagaaaaaacgcaggtcaagataatcttgacctgcgtattcatacgatgaagcatcgagttgccagggacataggctccaaatactctcgcctgctgcatgagcaccctcgcctaccctggcaagaaggccaaacgcgccttcttactcctcagtcgcctcagctgcggactcctcagcgggcttctctgcagcttcctcggcagcttcctcggcaggagcagcctgctcggccttctcctcctcgacagccttggtctcagccttctcggcctcgtcagcaggcttgtctgccttcttcttggaaacgaccggctcctggacgagctccatgatgaccataggagcgttgtcgcccttgcgggggccgagcttcatgatacgggtgtagccgccgttgcggtcttcccacatgccctgcgcagccttctcgaagacctcgcgcacgagctccttgtcgccgagagccgcgatggcgagacggcgggagtgcaggtcgcccttctttgcccacgtgatgatgtggtcgacatcaggacggatctccttggcacgagactcgatggtcttgatgcggtcgttcgtgaagagagccacgcacaggctcttcttcatggccttggtgtggctgggatcagtgcccagcttgcggcccttgtagttatgcctcataagataatctcctacttactgcttcaagctcaggcccatcgactgaagcttgtccttgacctcttcaatcgacttggcaccgaagttgcggatgttgagcaaatcattttcagaatattcgaccagctgacgcaccgagtggatgccagcgcgcttgaggcagttgtaggaacggaccgagaggtccaggtcctcgatctgcttctcgagctcggtgttcttgctcgggccctccggagcaaagatgctctcggcctcctcctcgctcgcgttctcgtcgagcatgaggaaagcggtcatgtgctggttgatgatattcgccgactggcacacagcctcggtcgggctgattgcgccattagtctcgacttcgaggatcagcttgtcgtagtcggtgcgctgtgcaacgcgggtgtcggtgacatccatggtgcagcggcgaatcggcgagaacagggaatcgacatggatgattccaatcggatcctcgggacgcttgttacgctcggcagggacatagccgcggccgacgccgatgcgaatcgtcatctccagctgggcgccctcggacagcgtcgcgatgacgtggtccgggttgatgagctggaactcggtaggaacctcaaggtctgcaccggtgaccgtgcacgggccctctgcagagagagtggccgtggcctcttcggcatcgccaaacgcagcgaagacaagtcccttgacattgaggacgatgtcggtgacatcctccactacgccaggagcaacggtgaactcatgctgtacaccctcgatcttgatagcagtcgccgccgcgccgtccagagaggacagcaggacgcggcgcatgctgttgccgagcgtctggccgtagccacgctcaagcggctccatgacaaagcgagcaatgttttcgtcgacttcctcgacggtgatcttgggcctcatgaactcagtcatatttaagcctcctcgagacttgaacgaatcgtacagggaaactcattacttcgagtagagctcgacgatgagctgttcctggatgtccaaatcaatctggtcacgcgtcggcagggaaatcacattgccctggagcttctcgatgtcgacctcgagccaggccggaacctggacgctctcgttggagatcagtgcgctcttgatgacgagcaggtctgcagccttgggggacacagacacggtgtcgccggccttgacgcggtaggaggggacgtcgacgcgcttgccattgaccaggatgtggccatgggtgacggtctgacgggcctctttgcgcgtacgggcaaagccgaggcggaacacgacgttgtcgaggcgggactcgagaatcttcatgaggttctcgccggtgatgccctgcatacgacgtgccttctcgtagtaggcgtggaactgcttctcgagaacgccgtagatgaacttggtcttctgcttctcgcggagctgcttgccgtactcgctctcctgacgacggcggcgggccggctgcctacgagactctttggaataacccagaacggaagggtcgaggccgagctgcctgcaacgcttcagaaccggagtcctgttaattgccataactatttgaacctttccgaattaaccgcgacgacgcttggtcggacggcaaccgttgtgcgggatgggcgtgcaatcctggatgcttgcgacctccaggccagcggcctgcagggagcggacagcggtctcgcgaccagagccggggcccttgacgaagacggcgaccttgcgaaggccgtgctccatggccatcttggctgccttgtcagctgccatctgagccgcgaacggcgtggacttacgagagcccttgaaaccgacggtaccggcggactgccaggaaatgacgttgccgcgggtgtcggtgatgctgacgatcgtgttgttgaacgtgctcttgatgtgagcctgacccaccgtgatgttcttgcgatcggcgcggcggatgcgggtcgtctgctgttgtttcttagccattgttctcccctacctacgctttcttctttgcgccgatctggcgacgcggacccttgcgggtacgagcattggtatgagtgcgctggccacggacgggcaggcccttgcggtgacggatgccgcggtagcatccgatctccatcagacgcttgatattctgagccgtctcgcgacgaaggtcgccctcgacggtatagtttgcatcgatgttgtcgcgcagtttgacaacttcctcttccgtgaggtcacggacgcgggtatcggggttgacgccagtctctgcgcaaatcttctttgcacgggtggcaccgattccatagatgtacgtcagaccaatctcaacgcgcttttcgcgtggaaggtcgacaccgagaatacgaggcaatgtataactcctattcttaaccttgacgctgcttatgacgggggttttcgcagatcacgtaaatcttgccgtgacggcgaatgattttgcacttatcgcacattttcttaaccgaaggacgcaccttcatatcatccatacctttccgaaagtgttgacacttcgtatctatctacacgcccagccgcaggcggtaatttttggcgttacaggtttagtcctgagacaggacaaggttgcccttgcgaggcaaccaaaaacacgctctcaaataggggtctacttgtagcgatatgtgattctgccgcggtccagatcgtacggcgaaagctcgaccgtcacgcgatcgcccgggagaatcttgatgtagtgcatgcgcatcttgccagagatatgggccagaacctgatgaccattctcgagctcgaccttgaacatagcattgggaagcggctcgactaccgtgccctcaagctcaatcgcatcttctttgctcaactcagtacagctctctcttaaaaattagtacacaagcaatcgtatatgttactgcaatacgacaagaattatcaagaacctatttgtgttattcctctgtaaggacgagcggccctttgtcggtaatcgcgatggtgttctcgaaatgcgcagcgggctttccgtctaccgtgacgacaccccacccgtctttctcgacgcgaacgcgatacgagcccgcggtgatcatcggctcgatggcgatgaccataccgggcttgagctttacgcccctgcccttcttgccatagttgggaacatcgggcttttcgtgcatgacgtgcccaactccgtggcccacatagtcgcgcacgacgccgaagccccgagactcggcgtagtcttggaccgcgaaaccaacatcgccgagcgtgttgccagggcacgccgcgcggattccggcccacatggcctccctcgtcaccgtgcacagctgccgtttctccgaagaaacctcaccgacggcaaaggtgtaggcgttgtcgcccacccagccgtcgaccgtcgcacccgtgtcgatggagatgatgtcgccctctgcgaggatgacgtcgtctgagggaatgccatggactaccttctcgttgacggaggcgcagatagaccccggaaatccgccatagcccttgaacgtggggactccaccttcaagacgaatcacgttttcgacgaaactgtccagctcgcgtgtcgtgacgcccggggcgattatgtccccaaccatgcggagggccagcgcgcttacgcggccggcctccctcatggcctcaatttcttgaggcgtctttagctgtattccgtcttttctcagacgaaacggcattatttgattgcggccttgattgcctcgaagacttcgtccggagtctggttgccgtcgagctcgaccagcgtgccgttgccacggtagtagtcgatgagcgggctcgtcgacttgtcgtagacgtcgagacggttgcgcacggcgtcttcgttgtcgtcgtcgcgctgatacatctcgccaccgcactcggggcacttgtccccatcggcggtcgtgccgatga

SEQ ID NO: 3790 - DNA, 30110 bp, Unknown
  16S sequences of unknown bacteria
caggccagacccgtttttgcagggcgtgttggagtttgtccgcgcatataaaacgctgtcctaatgaaaagggatatccaatgcgcggccacgtcctttctccgcgtggagaaaggacgcaaagagacgccgggggctttgcccccaggcccccggagaatttgccgattttctcttcataaaaatcgacgggtacggcatctcctgaaccgacgttcatataacaagggggcccggggcccccgggagtttgggtggtcatcattttataaatttgcaacccggaggcgctatttggcttcatgatatccggcggctgcgtatgcggcaattttaagaaggcgctctggtacgcgcgcggcgtatgcggattgtatgggggcggaagagcccgtttttgaagacacggaattttccttgtcagacggacaaaaatacagtataataaagatgttccggggataccggaattccgggcgcgctttttcgggcggccggacctgtatggaggaacagttatgtcgatgaaactgatttttgccatcgtcaacaaggacgacagcggttccgtttcgtccgccctgacccgtgccggcttttcggtcaccaagctggccaccaccggcgggtttctcatggcggggaacaccactttcctgatggggaccgacgacagccgggtcgacgaagtgatctccattatcgagcagcattcccgcaagcgcacccagatggtgccaagcagcacctatggcaccagcacctacgcctctttccccatggaggtgaccgtgggaggcgccacggtgtttgtcaccgatatcgagcgctatgaaaagctgtaatcgtattttaggaaaggacaggggcctccatgcgctttgaccgggtgcccggcccttcgccgtccgccggctttctcacgtttgccggaaataccgaggcgaaagagcggctctccgcctgcatcgacggggggcggcttcctcatgccctgctctttgaagggccagccggctccgggcggcgcacactggccaggctgacggccatggccgccgtttgtaccggagagggcgaaaaaccctgcggcgtctgcccaggctgccgcaaagcggcggcgggttcccatccggatgtcctcgaagcggggggggagggggccgcccgttccttccatatcgataccgtccgcgcgttgcgggaggatgcctacattctgcccaacgaggcccccagacgggtgttcctgctcgccgaggcgcagaatatgaccgagcaggcgcagaacgcccttctcaaaatcctggaagaaccgcccgcgagcgcgctgtttcttctgacctgtgaaaaccgcggccagctgctggagaccattcgctcccgggtggtgacgctcagcctctccggagtggctgaggaagagtccgtgaccatactgggagccctcctgcccgatacatccccggaggaccggcgccgtgcggcggttttgtcgggcggtgtggtgggacaggccctgcgggggctgtcggacggcgtgtaccagcgggtccaggagctggtccctgagctggcggccgccgtcgcggcgcctgcggagctgccgctcctgaggttgaccgggcggctggagaaagaccgggaagccttgcccggggtgctcaccggccttacgctggtgttccgggacgccctcgtgctgcgcagcgggggggacggctgcctctccatcgcgcccgacgctgcggccgccctctcccaggccctgtcccgggaacgcctgctccgtctgctcgaaacggccggggagctcgaacgcatccggcgccgcaacgccaatcacaccctcctgctcaccctgctgaccgcccgcctgcggcaagcggccggacggtgagggatggatttccatccgcaaacctcctgtttccgtgtacagcattcgttgagccggaaggcatacagatagaaaggttggataccatggccgaaatcatcggaatccgttttaagaatatgggaaaggtctattatttcgatcctgccggcagttcctttcagaaaggcgaccacgtggtggtggaaaccgcccgcggcatggaatgcggcgaggtcgtcattcccaataagcaggtatcggacgagacaatcgtgcggccgctcaaaccggttctgcgcgcggcttctcccgaggatctcaagcgggcgagggaaaacgcggagcgggaacagaaggccatgcggatttgccaggaaaaaatcgccgcccacaagctggatatgaaactggtggatgtggaatacaccttcgacagttccaaaatcctgttctatttcacagccgacggccgggtggatttccgggagctggtcaaggacctcgcctcggtgttccgtacccgcatcgagctgcgccagatcggggtgcgggacgaggccaagatgctcggcgggctcggcatctgcggccgtcccttctgctgttcccagtttttaggggatttccagccggtctccatcaaaatggcgaaggagcagggcctatccctcaaccccaccaaaatttcgggctcctgcggccgtctgatgtgctgtctcaagtacgagcaggaggcttatgagtcgctgctgcgcatcaccccccggcagggcgcgatcgtcaacaccccggatgggcggggccaggtggtggaggccaacctgctcaccggcgcaatcaaggtgaggctggaaaaggctcccgattctcccccggccctgtacagacgggaggatgtcaaggtcatacgggacggccgcggaagaccacaaagggaagcggctgagcccgcgggggatgccgaatagaacggccgggcggctgtatatcaaaaggcatggacggctgaaacgtccatgcctttttctgtccggcaaagtcttacgccggcggatttccgccagcggccgtccggttgtggatccggcttttacggtattccaacggtgtcatccccatgacctgccggaaccgccgggcaaagtaagccccgcttgaaaacccgcattgcccggcgatatccccgacgggaatatcggtggtggaaagggccagacaggcgcattgaaagcggtagagctgtatatattccgcaacggaacacccgacgacggctttgaattccttggtcaggctcgtcttgttaacgtggatatattgggacagggcgtccagggacaggctttccgcataatggctgtgaatatactccagcagcagagaaacccacacatgcggggcctggaggtcgaaacccgccgtcctttggccaacagccgccgtgtggcaccggtgcaccaattccaatatcatcagcaaatgcagccttgtccagcaggaccaacggggatcgttccggctggcgagcgccgcgccgaaggcgtcgaatagatcctgcatacgcagaaagccgtcccgggacaaaggcagaaacggagggacgccatccgggcactcataaaacgcgttcagcgggataaatccgaaatcctcgatagattcgtcataccggccggaatggatcatttcgtagccgatatggacgtttaaaaacgatacgtcgaaccggatgactctagccgccagccggtgggaacggacaaaggtgatctccaggttttcctggaccggcagaacacagggggcagcaaaggcccggatatggccgccgacatccagcgtcaggctgcccgcttccagcaggatcagggtgtatcgctgccgggtatcgatctgacggcagtcgtcgtttgccacgtactcaatctccgccacacggccggaacgatgcgtataggcggcgtacaaagggcggccctcccctccgttgtggattgtgctaggatttattttcataagtgctattcattgacgttgacaatttctaccatattttatacaataaggatgaggagttgtcaatcatgtataaacaagtcggcaaacgggggagaatttacagcataattttactgtttctgctggttttgtgttgcggatgccgcggcaaaaccggtgtcgtcctgtccactgccctttctcctgttccgggtatatccggacagggagaagcattgcccgaatgcaatacgccgtacactgtcggttatccaaaccgggacggcacctattcgctgtatattttttcgtctccggtccagtatcccactggggatggctatgccgtgatcgacaataccgtcgtggcctcgggaaaagaggggttcgcctacgaaaataaggcgaacgagatcaagacctatttccctccatccctgtcggaatacttccgggtagaaaagggtgaggcctggatcgaatttaagccctgcggggactggtccggcttttcggaagccaaagacacgccgtatgtcaatatgtatggagatactgtcagcgccgtcttatacgagggcacggcattggatatggtgttttatccaaccaaggccggaatccaggccgagctggtgctgaagaaatgtccggaagagaatacgctagacttctgtgtccgtacaaatgatgcgagctacattgacaggcaaaacggctatatcgtcttccgggacggagacgatattcaaagcgtcgtgcgtcagccgctcctacggcatcacccggacaaggcatttgacgtcacaaccgatgtatcgatactgtataaggcggatgggcagcacgtacagttgctgatggacgaggctgttctgcgggacgccgtctatccggtcaagctggatccgtcttttgaaatctataccgagaaaattccggactccagcgtgtattccgaattcgacaccaacgcctatctgcggcactatgaggttgtcgggcaccatcctgcactgggggagggctggacgtatgtgcgcttccggctgaatacgtattttcatgctgccccggccgatatcctgagcgcggaatattgcgttcgcgaattgtacacgtccggggcggtcaaaaccgccttttataagccgctttatcagtggaacagccaaagtgtcgtttggtcggaccgggttccagaggacaaacgggtatcggccaagagccggacacaagcctccgtccgcgcgtatgatataacggaatttgtaagggactgcgtggaattctattcctgggaaacggagctcatggggcttctgctgaaggctgaggaggacgagggctttcggatttttgcatcgtcggatcacgcgctgtacagcccttatgtggtcgtccgactgaaaacacgtcccgaaagcctcgaaagaacggaggcaggcagccccgacgggggattttaaagcatgccgtccccaaaagtgtggcctgacctctgaggtgattcagtgtcaagagcaagccgggcaccggcccatctccgtggaaggagggatgtgtatgctgtgatggaacacaccggagatgtggcagggccgcctggacgccgcattttctggtctggaaaaccccgttttgacattcggaaaggagagaacgtgatgaaaaagcatggtctgcggctgctgctgaccttgtgtctggcaaccgcgttcgccgtggccctgggcgccgtgccggcggcgaccgaaagcccgccctggtatgagatggagacgaccggcgatgcctatgagttcccgatcaccccggaaaagacaccggaagaatggggcaagctccgctcgatcaagaaaatgttgaaggtctgccaggtcccggaggaaattctcgaaaccatgtccaccgagggactcatcgagacctgcctcgcctatcctctcatgggcaatatgatggcttacaattccatctacgacggctttttgaagcacattgagaccttcaacgggctgcgggaactattgtctcgggaggacgcggggccgctgctggctgaaaaatatcaggcgctgtcgctggacgacgtgctgaagagcgacgattatccgacgtatcgcctgcgctatttcgagtatatcctcgcgcagcccgccgttttgaacacgcttgaaccggcacaaaaagaggcgctgctggaccgcgcggtccagctcaccgatcagaaggcccgacggtacgcggaaaccttttccatttccccctcgacgctgctcgccggtcgcatcctgatggaggatgagggctttgccgcggaggcggaagagagggaggatatacgcctgtttctggagaagggcaccgccctgacctccgaggtgcttcagtgtgtcacggagcaagccgggcaccggcgcatccccgtgggtgaaaggaggagctatttgaattgaagacgttcaatcaggcgggacgccgtaaaaaagccgttcttccggttctcgtaagcggcctgtgcttcgtgatgttgttggcgctcggcttccgtgcggccgccgatacgtatacgactgtttacactccaaacggaacggctgtcataggagcagtcttaagcgaactgaccccggctgatatcgaagacattaattctatgcagcaatcgcgctttccttatgcatataaaatccgggagccgacaaggcggtacaactgccattcctacgcctggcacagccagagcgcgaacaataccgtctggatcgattatggggattttctaaacgagcacaaaaaatactggcaggacggcagctacgtggccatcaccaccgtcacgggggatatcaatgtgattccttatgccgccccggtcggctccaaggtgttttataacaacggcgaccattcggccatcaaagaggggacgcatactttcgtctccaaatggggagcatggggattatatgaacacattccggactattgcccgtatatttcggattcggtgacctattacaaacggaataaatgaacacacaagcgcaccgggatccccgtatcccgatgcgcttctgccgtcccgttttccggtccagagaccggcctaaccctcaaaggtgcgcaggatgtcccgggccacttcccgcttgggcaggcgggtgtccatggcctccttttcgatgcagcggtgggcctcttcctcggtcagcccccggtaacggatcagcgcgcatttggcccgccccaccagccgagcctcttccaggcgggcggatagcttccgattttcctcctgcatccgttccacacgggcctgcgccgccatcaaggcgcgcagcagctgcaggaatgcctctctctgaaacggccgccctatcaccgccacaccgctgtctgccacccgcgcggcggtttcagccgcgtcttcctgccggacgatcagcagggtcatggcgccgctttgagcggccagatccatagccagccggtcggcgggctcgtcggcgagaggggcatggatcacgatgagggataatggcagttcccccgcccggcggcgggcgtccgctccgctttcggttatgagggaacgcgcgggatggaaggggcgaaggagggagagcagcgtatccgccgcttttcggttcccggccgcgatcagcaacccggtcatgccccatccctcccttctgactgccggccggtcacacccgttcgaagtaacaggcgtgttcaaactcgtttttgtcctcagcgcggttatagcgttcccattcgttccgtttgacctccaggatcttgccgatcaccggcgcgggcaggctttgccggacgaaaatgctgtcctgcgccttttcgatcgcggcgcccagagaatccggcagccgctccaaaccggcaagggtcccggctggggccgactgcagatctatatcggtcggaacgggcgggacggaaccgttccgaagcccctccaggcccgcctgaagcagcaaggtgaaggccagataggggttgcacagcggatcgggcgaacgcagctcgagccggggggcaccggtctccggcacccggatgagctgggcacggttgccgctcgaccaagtgacatatcggggcgcttcaaagcttccgaacctctgatacgaattggtcgccgtgttgagaaacagggtcatgtcgccgacgcggcgcaggatgcccgcgaggaatgcatgcagggtttgctccaaaagggcgtcccccgaaaggagggaaggcgccatatggacatgcaggccgctgccgctcttgccgggcaggggcttgggcatgaaggaggcaaacagcccgttctgcgcggcgatggtgcgcacagcgcttttataggtgatcaaatcgtcggcggcggccagcacatccaccggacggcaccagatttcattttgtcccgggcccttttcgtgatgggagccttcgggaaacagtcccatctcctcaagggccaggcagatctcccgccggacgttttcgcaccggtcgagaggggcgatgtcgaggtatccggccttgtcccgcggatgcagggtcggattccccttctcgtccatttcgaataggtagaactcgcactcggtcccaaaccggaaggagagcccggcctcctttgcctgcgccctagccgtgcgcaggagggtccgtccgcatccggaaaagggcgtaccgtcgctgcggcggatatcgcagaacatccgcgcaacccggccggtgctggggcgccagggaaggatcgacagggtgccggggtcggggaggaggaggagatccccttccgccacgttcataaacccgtccaccgccgacacatcgaagcccgccccctgtgcgaacacccggggcagcgcctccgccatcacggcgacatttttgggtacgccaaagatgtcacaaaagaaaagccggataaatttgacgtcgttttcttccacatattgcagcacgtcctgctctgtaaagcccataccgcgcctccttctggcgggattggcccgcccggttccatccataaccctattatgcctcaattccgggggccttgtcaatcgtccgctgctctgtgcgccgcgacgaatccggcgggatgatgggcagcgttttttggaaaaagttgctgaatcggcgtttcggtcttgacaaatcggaaatcggcgcgtatagtggagacaagaacaaacgagcaaaggcgctcgcggacattcgtccgcgggcgccttttgtattttctgaaagagggtgctggtatggaaaccatgatggcggtgtatggcagtatggtgttcaacgactcggcgatgaagcagaggctgccaaaggagacctacagggaactcaaggcttgtatcaaagagggacgctccctcccccgtgagaccgccaacgtcatcgcaaacgccatgaaggactgggcggtggaaaagggcgctacccatttcacccattggttccagcccatgaccggtgtcacggctgaaaagcacgacagctttctgacccccatcgagggcggcggcgccatcatggaattctcgggcaaggagctcatcaagggcgaacccgacgcctcctccttcccctccgggggcctgcgggccacctttgaggcccggggttacaccgcatgggatcccacctcctacgcttttatcaaagaaggcgtcctgtgcattcccagcgccttctattcttacagcggcgaggtgctggataagaaaacaccccttcttcgttcgatggaggtcatcaacacccaggcgctgcggatcctccggctgtttggaaataccgatgccagccgggtcctcaccacggtcggccccgaacaggaatattttctgatcgaccgggaaatgtatctaaaacgcaaggatttgcgctacaccggccgcaccctgttcggtgcccgcccgcccaagggacaggagctcgagacccattattttggttccatccggccgcgggtggccgcctatatggcggatctcgacgaggaactgtggaaactcggcattcccgccaagaccgagcacaacgaggtggcacccgcccagcacgagctggcgcccatctacaccaacaccaacctcgccaccgagcacaaccaactgacgatggagctgatgcagaaggtggccgagcgccatggcctggcctgcctgctgcatgaaaagcccttcgccggggtcaatgggtcgggtaagcacaacaactggtccctctcgaccgataccggcatcaatctgctggatccgggcaaaacgccgcacgaaaacgctcagttcctgctgtttttgtgcgccgtcatcaaggcggtggacgagtatcaggacctgctgcgcatgagcgtggcgacagccggcaacgatcaccggctcggcgccaatgaggcaccgcccgccatcgtttccattttcctcggcgacgagctgacggccatcctggaggcgatcgagaagggggaaacctacgttggccgcgacgccgtcgagatggaggtgggggtggatgttttgccccatttccgcaaagacaacaccgaccggaaccggacctctcctttcgccttcaccggcaataaatttgaattccggatgctgggctccagcctctccattgccgggccgaatattgtgctcaacaccatcgtggccgaggagcttgaaaaattcgccgaccgcctggagggcgctgcccacttccagaatgccatccatgagttgatcgcggaaaccatccgggatcacaagcggatcctcttcaacggcaacggctacgaccaggcctgggtgaaggaggcggagacccgcggtctgctcaatctcgcttcctccgccgaagccctgcccacctttgtcgcgcagaaaaatatcgacctgttcgtgcggcataaggtcttcaccgagaccgaaatgcgcagccggtgcgagatcatgctggaaaattacggcaagctggtgagtatcgaggccgaaaccatgttggaaatgatccacaaggacatcgtccccgcctgttatacctacctcaaacgcctggccgaaaccgggctgtccctgcaaagcctctgccccggcctcgactgcagcggcaccaaagcaatggcggccgagctctgctccttggtcgacagcctgcaaagcaaagcggcggcgctcgaacaggttgtttccgccgtccgccccgatgacgcgcgggaggccgccctgtatgtgcgccacaccctcatcccggccatggaagccgcccgcggcgtggccgacaccctggaaagccgcattggcgagaaatactggccctatcccacttacggcgatttgctgttcggcgtataacacaacggaggaggagtcatcatgagtaaaatcgttattccagccggttacaaacccgcgcttgacctctatcaaacccaaaccgccatcggcaccgccaagcggctgtttgaggatcatctgtccggcgcgctcaatctccggcgggtgtcggcccccctctttgtcgatcccgccaccggtctcaacgatgacctgaacggtgtggagcggccggtatccttcgatattcccgagaccggcgggacggcacaggtcgtccattcgttggccaagtggaaacggatggcgctgcaccaatacggattttcgcccggcgaggggctgtacaccgacatgaatgccatccgccgcgacgaagaattgagcaacctgcattcggtttacgtcgaccagtgggactgggaaaagattctgccgtccggccgccgggatatggactacctcaagcagacggcgacagccatcgtcagggctgtctgcgatacctatgatacgctcaaaaagatgtttcccctgcccgaggcgggattgtcccgcgaggtgtatgcgatcacgacacaggagctggaggaccgatatccggatctgtcgccaaaggagcgggaaaacgcactgctcaaggaacatcccacggtattcctcatgcagatcggcgacacgctgcgttctggagacaggcacgacggacgcgcccccgattatgacgactgggcgctcaacggcgacatcctgttttggaatccggttctggaatgtgcgtttgaggtctcctcaatggggatccgggtggacccggcctccctcgacagccagctgaccaaagccggctgtgacgaccggcgggagcggcctttccacaggatgctgcttgccggtgcgttacccctgacgatcggcggcggcattgggcaatcccgcgtgtgtatgctgctgcttggcaaagcccacatcggcgaggtacagtgctcgctgtgggacgaccggacccgcgccgcctgcgaagcggcgggtatccctcttctgtaaccgatcggcgtacaaaggcgtgtgccgctgccgtatatgtggcggcacacgccttttgtttatggattcgaaccggttcggtgaaaaggcgttcgatctgcgttttccccgaaatgaatgaaggcatacggataaaaacagctttccggggaagaagggcccctcgccctgcaggatgcgcttccgggggacgaatgatatacatggaaacggcccatcgcctgagtgatttccgcaaaaagccccggacgcaagaaaccggccgtcagcttacgctgacggccggttttatcgatgaagccggaatctgaaatttcaaaacgcgggagagccggccgccggtaggcgcagccgctatttgcgccggcatctcatccgcacttggaatacccgcagttgcggcacataacgcagccgccctcgtgttcgaccggggcaccgcattcgggacaggaccggatctgggcggctacggcaggctccctcgtctccttcctagaggcggctgccgcagccttttcggcctcctcggtattaccggccacataatgggtggccacggccttgaactctttagaggcgaccaccttttcgatcacccgggcgatggcgtcgggacaggaggtgcatttcatccccggctggcggatggtggaggggcagcggatcccccgcagctggccggtaatggttttgacgtccatccccgagcgcagagctaccgacaccagacgggccgtggcctcggactgggaggggcagccacccgccttgccggtgttggtgaacacttcgcagatgccctcttcgtcgtaattgacggtgatgtacaggttgccgcagccgatggcgactttttcggtcaggcccatggtcacgtcgggccggggccggggcagtaccggcccccgggccggagcggccgccggctcttgtacgggcacggcctcctttttgtcgtcctttttagctaggttcagcacctggatctcccggctgccgtcccggtagatggtcacacccttgcagccgagcttataggccagggtgtagacctccgcaacctcctcctcggtggcatcgtggggaaaattgaccgtcttggagacggcgttgtcggtgtggttctggaaagccgcctgcatcttggtgtgatacaggggtgagatgtcgtgagcggacacgaacaccctccggatctctgcggggatctcgtcgaaatgggcgatggtgccctcttcggcgatgcggtgcatcagctcgtcggaatagaggccgcgctcctcgagcacccgcttgagcacagggttgacctcgatcatctcggtgcggtccatgacgctgcggatgtacacatacgcgaacaccggctcgacccccgaggaaaccccggcgatgatggacagggtaccggtgggggcgatggtggtgacggtggcgttgcgcaggggttccccgtccttgtatatgctctccccgaacaagggaaaggcgccccgggttttggcgagttcccggctggcggcccggccggcgctggtgatgtaggccatcagcttgtccgccagcttcaccgcctcgtcagaattgtaggggatgccgagctcgaggagcatgtccgcccagcccatgacacccaggccgatcttgcgggtctgcttggtggtgaaatcgatctgctcgagcggatagcggttggcgtcgatgacattgtccaggaaatgcaccgcttttttaaccgtgtttcccagtttttcccagtcgatctccgcccgtccgtccccggatttcagcatccggaccaggttgatggaaccgaggttgcagctctcataagggagcaggggctgctcgccgcagggattggtggactcgatttccccctgggcgggcaccacgttgtcccggttgagccggtccaggaagatgatgcccggctccccgttccgccaggcggcgtacacgatcttgttgaacacctccctggcattgagctgcccggtcgcctgcttggtgctggggtccacaaggtcgtacatctcgcccttcagggccgcctccatgaaggcctcggtgatccccaccgaaatattaaagttggtgatatcggcattgtccgccttgcagttgataaagttcaggatgtcgggatggtctacccgcaggatgcccatgttggcgcctctgcgggtgccgccctgtttgaccgcctcggtcgccatattgaacacccgcatgaagctgattggaccgctggcgacgccgccggtggaattgaccgtcgagccggacgggcgcaggcgggagaaggagaaccctgtgccgccgccggatttgtggatgagcgccgcctgtttgatggcctcaaaaatcgcctccatgctgtcctccaccggcaggacaaagcaggcggagagctgacccagaggccggcccgcattcatcagagtgggagaattgggaagaaactccaggctggtcatcagttcgtagaactcttcctccagcgcggcgatatcggccgccggatcatacgctttgtccggtgccgcgatggccctggccacccgtcggaacagctcctccaccgtctcggtgggatgcccctggtcgtcccggatcagataccggcgttcgagcactgtgcgggcgtttttcgtgatctccatgattggtcgacgtcctttcctatccatcccgcggcgccccattgtcagggcggcggggatgtgctatactgatcgtacaagagcggcggcattcgcctcactgttaaaccacatgttgtggattgaaacactctgagtacgaggtcgatacaatatattgtataggctgtatcaagaactgtcaagatcccctaagaatttatttacacgacgcggccgtaccaccgttttgggaagaggagtgggtcacatggcgctcgaatatgcttgcctgcagctgcacatcgccgcggggacggagctcccgcgggaacgcatcctgtatgccgtcacctcttatatggatcgcatggggatgatcccctgtgggcaggaaaacgccacccgcaccatttgctttgccccgtccgaggccgggtggtccgtctatgacgattgtgccgaccggctggatatcccgtccatcgacgggttagggcgatgcctgaccggcaagatcgattgccgtgcggtggggatcctggcttccaaggaagggctgatgctccgcctgtatgggggcggacggctccgggatgcctatgtcacctcctgccgcgccttcggccggaaacaccgtttccccggccgcctgttctgccgtggacgatgccgcggccacgcgctgcgctggcgggcctgtctgcccgccggccgctcggtcgctgaactcgcggatctgtttgaaaagggcgagtctgagggccgcgcggtttttccacggctgatgccggtgctcgggctggacaaaagcgcggcgttcggatttgcctcggtggaagaggccgggatagatggcgtggtctggctgtatttccggccgggcaatgtcatccatcaggggctcctggcccgtatgcttcatccggcgccccgcactgtcaagccggcggccggaatatcgcccatgtcgccgaaacgctgaactttccgcaaacaaacggcccggccctgtattgacaggggccgggcctgttctataaatccggatatagggcggggggcgcgggaaaggctttcatccaaaatgatgggaatcaggagggaaaaagcgtcctttcgtcttctccctttttttcgtatcggcaggtcctgccacttttgacgaatcccgcagcctcatacaggccgacagcggggcggttgcggataccggtatccacataggcgtaaccgaggcccctgtcccgcattgcgcacaggccgcgggtcaggcagctttttaaaatcccctgccggcggtaggcctccacgcaggcgacaggattgagcatgacggtccggctgtcccagtcgatccaccaggacaggtaggcgacgagggcgccgcctcgcggatcccgcaccacctcgtccaaaacggtgctggcgtcctccgagcggcggtaggcccggaacattccctccgtgaccggcgatccggtcggcagggcggcataccgcacccggtccgcgatgtcgcggtcttccaacggcgcgacatacaagggcgcgatggaagcgggggtgccgcggtaagccgcgagagggcaaaccgcctggaaacggctttcggagccctctcgatatccgcaggcccgcagagcggccacaagagggagatccagccggctggcatcggtgccgggcacagcgccctcgggaaagcaggcctccaccgccctcagggccgaggccgccgtctcggcggtgtagggagggaggagagccagatggaaggtgcattccggccggtacaccagcgcatatccgaccggatttccccgaaggagaacaagatgggcgtaggaaaagaaatccgccgcaccggagccgaagaaatagcggtcgacgccgaggttcccgtggtggaagtgccatcgcgcgggctgcgcggcgcagatccggctttcgatttgccggacgaggcggtatccggcttcatcttggacaggctgcagggtgatcatgccttgttcctcccggtcgatccgcctgcccgcaggcgcaggcccttgggatagcggtttttgagacggccgcccgaggccttgccgaagcccgtcacaacaccggaggcggccaccgccgtccagccggcgcagccgggagcgtcgatttcttcccccctcaggaaggcggccagccggggatctgttaggtcaagatccaaaagccgccggcaatcctccgcctgcacggccataaacaacgcgtggcagggctccagccggacggcgccacgcccggtttccttgatttcggcagccgcacaacccgctccgagaatgggaagccccctgagatctgggagggaggcgggcagcagccgaatgattcttccgaagcgctgaaaggcgccctccggcttggagcaaaaacactcattgtataatttttgaatttctataccaaaagtatcaaattttgtctgaacgatggaaaagagagacgccccggcatcgccctttttgcggaacagcgccaggaaatgcccttcgcccccgtcctggggcaggatacgccggcaccgttcaaaggggatggcggcggaaagagggccgtcttccggcagggagaaggcggagaccgccggcgcggaaaagccagggcggccgaatccaaccgccccgaggtcttccagaacgaaatccgggtgttcgaccaggaacgcccccaccgtccgttcgttttcctccggggcaaatgtgcaggtggaatacagcagccgccctcccgggcggacgaggcgggcggcactgcgcaggataccgcgctgccgccgggcacacagcgcgatattgccgggactccattgttccagagcggccggttccttgcggaacatcccctctcccgagcaaggggcatcgaccaggaccccgtcaaaccgcgcccccagcttttcggcgagtaaagcgggctctgccccggagacgacggcgttccggacaccgcaacgctcgaggttttgctgcaggatctgcgcccgggtcccgacgatctcattggcccaaagcaggccccggccttggagggcggcggcgatgccggttgccttgccgccgggcgccgcgcaaagatcaaggatggcctcccccggcctaggatccaggatggcggccggcgccatggcggacggttcctgcatataataggcgcccgcatgatgccagggatcggcgcccgccttccaatccccgtggagaagaaacccggctggggaaaagggaacgggggtcaggggaagagggaaccgtttgcgaaacgcctcaaccgtacatttgagggtgttgacccgcagcccgcggtgagccggcccgtccagggctgcgtagaacgcggcggactcctctcccaggagacgctccatccgccgccggaactcctccggaagccgcattctcatccgtcccacccccttgcttgtgtcttccattatagggggcgtttccagactttgtcaatggaaatgggataagctacaggcggattttctcccggatatgtgcttcgatatagccgagcacccgttcgcatgtgctgcaatccatgcgtcctcaacgcttgatatcccaatttttgtgcgtgatcccatctctttccggtgatacttgggggcgaatgctatactgttctgaatcacacgcttcgccataaggaaaggtcatatgaaacatgatttttcctttttgataaatccatgggtctgattcgtttagattactatagacaatacgatatgatatttacatttccactttaaatgtgccgattcttttatttttcccatttcaaaacctcctcatgttccttagtaatccggtcgccaaaccttttactattttacatcaggaggctttccttttgctaaagcttttccccttgcgtttggatattgtctacgatacaataattataggaatgagagggattatgatgcatccagtggaaaaacaccgcgatttagtcttggtggcggaggaatatcttcgtgtccatcccgaaaccggatttcgggaggagatcacctgcaaatatttggcggaaaactttgaaaaactgggatatactttgacttatgccggggatattcctggattttatacggttatcgacaccggcagacccggcccggaagtgctggtactggcggagatggacgcccttctgtgtccgtcccacccggacgccgaccccgtcaccggtgcggcccacgcctgcggccaccatgtccagggtgcggctattctgggtctggcggcagcattaaaagagccggggacactggatggtctctccggcaggatccgcctttgctgtgtgccggcggaggaatacatcgaaacggaataccgcatgagcctgaaagaaaagggtatcatccgctacttgggcggcaagctggaattcctgcgtcggggctattttgacggtgtagacatggcctttatgcttcatgccggctggggactcagtgccgcagcaggtgccgtgggtttcacgggcttgcagatcgagtacaagggcctggccgcccatgctagcgatccctggaacggcatcaatgccctgagtgccgccaactgcggtatgaacgccatcaatgctatccgggataatttccgggaggaggacctggtgcgggttcagaccatcattaccaacggcggcgatgctaccaatactatccccgcctccgttaccttacagtgccgcatccgtggcaagactgatgaagctatggcctccacccgtctgcgggtaaagcgggcactgatcggcggtgctgtttccctgggtgcgggtatcgagattaccgatttccccggctacgcacccctttacaatgatcccggcctgctccgggcggccaaaaccgccgccgacgagctgggtatgagtttctatcaaaacctgggctacggcactggcagcacggacatgggtgaccttagtgccgtcatgcccgccatccatcccttcggcggcggttgcaccggcggtgcccatgccccggatttcaaggtggcagataaagaagaggcctgcgtgggcggtgcgaaatgggaatttacccttttgaatgtgttgcttcgccatgatgccgtttgtgccagggagatcgtggagaattatacgccccgcttctcctccaaggcgggtttcctggcccatttagacagcatggaccggtgcagggcctgcgtttcctatgaaaacggtaccgctattgccaagctagactgaaaggaagcgtcccatgcgttttcagcttgactacgacttgactacgatttatcacattcattcccaactgtcgctatgctccaaagacccggaacagaacctggaaaacatcctccgcatcgccaaggatctgggcctgcggccgatctgcctggctgaccaccggggccgccagtgccagacgctcctccaaagagcccgcctcctccgccaggcgtttgtccgcacggaggttccgtatccggcaaacatagatctcgcttgtccgtgtatcatcgagatgcagggttttatcgacctcgagttcaaacgtccaggggctgctttccggcaccggcacctccagcacggcacccttttcggagcggatgatcccggatttatcggcggagaagacgccggtttcgcggatccggtcccgggtgagcttgtcctccccgatgcaggcgacgaaccggaggccctcgtcccagcagtaagtggcccagcagaacaggccgtagtcaggggtcccgtcctttttgtaggtgccgtagagatagaggctttgggggcaaaacgcgttggtcggagacagcgatatcttgctcatgtcaagtacccctttcggtatggttttgcaggatccggcggagcatttgctcgaacgcttcgacttcatcctcggtgaagcccttgtaaaacagctcgttggtggcctgtgaaacctcctcgtattcgttccgcagcccttccgacaacggcgtgagggatgccaggacctgccggcggttggtggggtcggtcctgcgggtgacgagcccggccttttccatatggtccagtatcccggtcagggttgtgccagccagggaggtgagttccttgatcctggcgatgggcagggtgccgttttcccacagcacatataaaattttcccctgcgccccgttaaacgcctcgatcccctctcccgcagaagcttgttgaacgcccgggttgagacgtgacggatttgggacatcaaaaatcctccgtttgtcttcgtaattccacctccttgctatatagaatatttgtcaaggccttttggacaaatatcggagcaagcgaaccgatgcttgctccgatatgcttgaccgttatccactagataccctccacaaacacgggctcaaaacctcaaaacaaaaaacctgcggccgcgaatggctggccgcaggtctgtgaaagccacatgaaaaagatgttttggcgtttttggcagatagatttgaaccctcacgtccccgaaaaaggttgggtgcaagccggagcgtccggagcgcgtttacaagggagcagtaaaggagcagcgtgacctttttcggaaaaggagaagcagcggaatgagcgcgccggtgacgtttgtaaaaaagtcgccgcaagcgatatgcagcttgcggcgacgtgggtttgcgctacaaaaaagatgccagtaaggggccgtagtagcaacccgcaaaaagcccacagcaagccgaagcgttgtgagcgcgtttacaagcgaacagcgtagacgcagcgtgactttttgcggaaaaggaggaaccgtggagcgggtggctgattttttatgtaataaaaaaatcggaacgagcacaactcgttccgacgtggcaaatgaccccaattaagatacaatggggtcgggtcactttgcatcggggaaggcaactggggaacgcataattttatcccgtttttgattgaagattacagccagcaggtcgccgtcctgttttcttctccctcccctttggccgtctgaaaaacgtgtcagcctgcggctgttgcacttgagctatggacgaaaaataattatactgtcaacgccacattatcctgacaaaagaaagggtagagtctggaacgccgtgctcgttctggctaagccttctcacggtttcactcccgctgttttttgcgttttcccggcacatcagtcatttcaatgtgagtttacacatcaggaagaatttggtcgcccaccttgaaaaaggtgcctccgccccatccgactaccggcttgatttcgttgatgagcatcggccctttgtcttccctggctttttctgcaaactgttcttccaccaatgtattcctgattttacagatgtaaatttcgctgtcatcaagcgggatcgtctgcttgacctccagttcaaagatccacggacttttctccaaaatcgggatatccagaacgcgtcctttggaaatggcggcgtccacttgcattttattgggatcatagcccgatttgtttccaaaataggtggcaagcggaaggagctcctccgtgactagattggccgaaaaccggcctgtggcgcggatgcgatcctttgtcagtttttcgcctccgatgcaggccatgacgcttagttctccgtcccagcaaaagccaaaccagcagaacaggccaaaattcggggttccatcttccttataggttccataggtataaaatgtctggggacagtatgcatttgtaggatgtggcagtgatactttcatgttgttttcctcctgcttaacgcttcaaattcttccagattggctagaatgcgggtcaaatatgtctcatgttgttgtatttctttctcggtaaatcccctgtaatacacttcgttgatctgctgcgaaacagcatcatattctttacgtaagcgctgggcttccggtgtgatcgaaaccagaatttcccgccggttctccggattctgccgtctttttaccatgcctccctgttccatccggtctatcatactggtcagtgtggttctggccagcgaggtacggtgggaaatctgtgaaatcggtatctccccaaactcccatagtacatacaggatcttcccttgtgcaccgttaaattcccggatcccgtagtcctccagcatctgttcaaagattctggagccgatctgtttgatttgtgacgttaaaaatcctccttgtgttttcatataatcactcctatatgaaattatactatataggagtaattgtgtcaagaaaattttcgcatgatccaaccccactttgtcatcgggccatgcttttcctttatatcattgggacttgatgcctaaacgataacccacaaatgaaacgacaaccttaaaaataaatgatagcccacggctgtttagctcccttgaaaactggatcggcggtgggctatcgttcgaattgggtaacgaccgatacctcaaaagcccgaaatcccttgaaattagggctttcaggcaaaaagcaagcaccgcaaccctgatacccattgtatcaaaattgcggtgcttttttggcggaagcggtgggattcgaacccacgagcccgtgagggctacctgatttcgagtcaggcccgttatgaccacttcgatacgcttccctttatgtcaactccggttccccggagtcagacgcatattcggttttgttagaatccccgctaaagcagggtgccgctgtggaccagccgtaaccaacgaagccacacggataccagctgcaggccgttacggcgcccccttattataggagactcccgccggtttgtcaactgcgatttggctaaaagacaccgggattcaaatcagccgcccctttgtcctgagggacgggaaaccccattgccgaagcacctcatacaccccgacagccaccgtgttcgagagattgagagaccgggccgcttcatcgtcgagcatggggagacggacacaccgctcccggttctgccggagcagcgcctccggcaggccggccgtttctttgccgaaaaccagatacgccccatccggataaaccatttccgaataaacggtcccgcctttggtggtaaaataaaagaaagggcccgtatttttggcaaaaaaatccgcacgattttcgtaggtcgtgatatcgaggagatgccagtaatccagccccgccctcttaagctgccggtcatcgatggaaaacccgagcggccccactagatgcagatgacagccggtcgccgcacaggtacggctgatattacccgtattctgggggatttcaggctcgattaatacaacatgcagcgtcggcatcgcgggccctcctttatacccggctgcacagcagccgcaggcttcctttgaccggcacggccatccccgccggcagaaatatgctcgtacccttgccgatcggcagctcaccgtcctcccacagcagcgccccctccccttccaggcacagcagcgccgtaaagctttcggagcagcccacccgcatctgcccctccacagtaagcagctcagcggtaaacaggccgcaggatgccaggggccgcaccgatccgcccggcacgggcgatacccgccccaccgctccatacggaatctggggcggcaccgtgactgtgacatccaccgccttatccacatggagggcgcggggcttgccgtcggggccgaggcgcccgtaatcggacacgcggtaggtggtgttcgagttctgctgcacctcggcgatgaggatccccgccccgatggcgtggagcgtccctgccgggatgaaaaacacatctcccggatggaccggcacctgattgcagatttcaggcagggaatcttcctcgatgtgccggcggaactcccctttggtcaacccgcagttgaccccatagatcagccgggctcccggctcgcaatcgacgacgtaccacatctcggtcttgccgtattccccttccacccgggcggcataggcgtcgtccggatgcacctggaccgacaaccggtctttggcgtcgatcagcttgatgagcagggggaaataggggaagccggcagcccggcggccgagggcgccaggcccccattccgcgagggcttccgtcaaggtgcggccagccagcgggccgtttcccactaccgaaggcccgtctttatgacaggagaggacccatgcttctgccgcggtcgggcccttggcgggaaacccgaaatccgtcagcaggcgcgtgcctccccacaggtattcttttaagcatggggtcaggaacagtggataccagtccatccgccatccgcctttcacaaaaattcgacaaccgatcccttccattttactccattcccgcctgtctggcaatggctggaaccggtttttctccattccgtctataagcgtctcttattacagctaaaaatcgcgcgttttttgtgcatagtttataatcaaatctccttttcgtggcaaatcaggaaatgtttttagacgatatagagaactattgcggttttgccctacattgtatataatagtaacaggatcggccgctttccgtgacggcccgacggtccgagagaaaggaaatgcgatatggcaaaaacatataccccatccaccgtccacccgtctgccgagaaggaactgcgggacgctctgacggccaaactgctccacaatttttccgtccagcccgaaagcgcgaccaacgagcatttttacaacgccctggtcctggtcctgcgggaccggatgcgcggccaacgggtggagaccatccgggaggcccatgaacagcagagcaagcaggtgtattacctgtgcatggaatttttgatgggccggtctttgaaaaacaccctgtataatctcaacctgaccgaggatgcccgccgggtgctcgacggcttcggggtcaagctcgattccctgtatgagctggaacccgacgcgggccttggaaacggcgggctgggccgcctggccgcctgttttctggacggactggccacggcgggtattcccgcaatcggctattccctcttgtacgaatacggcatcttccggcagaagctggtggacggctggcagaccgagctgcccgacttctggctgcccggcggccgcagctggctgctgccccggcccgagctgaccaaggaagtccgcttcgacgggcacatcgacgaatggtgggacgcgggcggtttccaccacgtggagcatcgggacgccaccgtggtggttgcccaggcctacgacatgatggtcgcgggcaaagacggccggggagtgtccaccctgcggctgtggaaatccaccgccccggggatggatatgtccctgtttaaccaaggggaatatatgcgggccatggaacagaaggccatggccgaggtcatcacccaggtgctctatcccgcggacaaccaccgcgagggcaagagcctgcggctgtcccagcagtatttcctggtatccgcctcggtacaggatatcgtccggcgccatctcgacgcctatggcaccctggacaacctgcccgatatggcggccgtccacatcaacgacacccaccccaccctggccattcccgagctgatgcgcatcctgctcgacgagtgcggctacagttgggacgccgcctgggatatcgtggcccgcaccgttgcctacaccaaccacaccgtcatggccgaggcactcgaatgctggccggaggatcttttccgccagcgtctgccgcggatttaccagatcgtacgggaaatcaacgaccggttcagcggccggatgatggaggaaacagggggggacgccgaaaaggtcagccggatggccatcatcagcttcgggctgatcaaaatggccaacctgtgcgttgcggcggctcactcggtcaacggcgtgtcccgtctgcacagcgatatcctgaaaaacgacgtgttccacgacgcctataccgtcatgccgggcaagttcaccaacgtgacaaatggcattgcccaccgccgatggctctgccagtccaatcccggcctgaccgcgtttatccgggagcggatcggggacggcttcgtcctgcacgcggaagagctggaaaaactgaagccctatgcatccgacaaggcctccctggacgggttcatggcgatcaagcggcagaataaggaacgcctcgccgactacatccggcgggcaaacggcgtcgtgatcgatccggagtccctgttcgacatccaggtcaagcggctgcacgagtacaaacgccagcacttgaatgccctgcacatcctccatacctatctcacccttaaggacaacccgaacatggccttcaccccccgcacctatatcttcggcgcgaaatccgccccggggtattatctggccaaggaaatcatccggttcatctgcaacctggcccgggaaatcgacgccgacccggcggtccgggataagctgaaggtcgtgtacctggaggactaccgggtgaccctcgcggagctgctgatgccggccgcggatatcagcgagcagatctcgctcgccggcaccgaagcgagcggcaccggcaatatgaagctgatgatgaacggcgccgtgaccatcggcaccctggacggcgccaatgtcgagatctgcgaacaggtgggccgggacaacatcttcctgttcggcatgaccgccggggaggtggaggcactgaaacagcagggctaccgcccccgggatctctacaacgccaacccccatatccatcgggcggtggacgcaatgtttgctggcttcggcgggcggacctacggcgaaatcgccgggtccctgaccggcaacgatccgtatatggtgctcgcggatttcgaggattactgccgtgcgcagcgcctctccggggaagtctaccgcgaccgggacaaatgggccgccatggcgttgacgaacaccgcctgcagcggcgtcttcgcctccgaccgcgccattgcggaatacgcggacagcatctggcatgcccggcccctgcacgattgaccctgccgttttttccggaacgccccctgccatttgacatggcagggggcgttccctgtttccccgccgtctaggtgccgcgattcgagcgcttcatcttcgccttgccaaaggtacaagaggatggccgctgccaacaaccggcagcccgccggtatccccatccacaacacccgtttcgtccgctttgtcatgccgtcagcactcactatctgtgtaaagggttcccgttcctctgcttttcagtataacagaatcctgtcccagagtaacccccgggatcatggcccggatgtccgaggccacgagccggcccgaaaccgggacgttttgacaaagaggaaacccacgggcaggcggagcaaggccgtgtatcttaagaaatcgggaacttttcggggaaatcgcgtacacacattgacaggttccgcccctatattgtacaataagcgggaaaatccagggccgggacttaaggccggccttctgcggtatactatgggcggatgggcccgatcaaaatggcaggatggtgttggcatggcggtcaaaagatcgaaaaaaagccggaggcggcggaaaatactggtgggggtgttgtcggtcgggctctgcttgggtctggtgctggtcacggtcgggatcgttacggtcctccgccgcgcccccggtcccgggcccgccggttcggcggacgaatcggcgcccggcacggtatcggccgctcccactgagcctcccgggccggtaccggtggctacggccaccgtcggcagctcgggggatatcctgatccataagccggttcttcaggcggccaggcaaaaggacaatacctacgatttcacttccatgtttgccctggtctctccctatgtcaaaaagatggactactccgcgatcaatgtggagctggccgtctcccgttccggattcgatacgcccgagatgcagttccgtattccgccttccctgatcacggctgtttcgggcgcgggttaccgcctcggcctgctcgccaacaaccacgccggggatgcgggctcacaggggtatatcaccactagggaagtcctcaccgaaaacggtatggatttcatcgggacccgtggggccgtggcggataaacggtatctggtcaaggatgtcggcggcatcaagatcgggttggtgaactacacctacggccaggacacctcgtcaaactccctgatcaaccgattcagcgattccaatctggaactgttttataccgatatgcagcgccagatcgccgacatgaaggcggacggcgccgaggccatcgtgctgtatatccattggggctatgaatatttcctgacccccaaccggaaccagacggctgtcgctgaaaaaatgtgtgaattgggggtcgatgtcatcatcggcggccatccccataaaattcagccgctcgagctgattacggcggacaatggcaaccagacggtctgcctctattcgatggggaatttcctgtccaaccaagtgatcgagtcgatgtacggcggcaaccgctccaacagccgcaacttccaggaccatgtcagctgtcccatcccggatgtttccaaccgctacaacgacgacaaatgggaccagcatgtcaaggactgcaacgacaacggtcacaccgaggacgggctgctgttccagaccacctttaccaaatacagcgacggggtggtaaggctcaccggtgtggatgtgctgccgacctggtgctaccgctataaggattccgcctcaggcagcgggttcggctacaaagtggtgccgctcgacaaatcggtggaaaactggggatccgccttcggtatccccgatatcgacctgacctacgcaaaccgctcgtatgaccgcacgatgaagctggtgggggacggcctggccgcctgccgcgaggccatcgaaaaggagggcggctgggtcacatacggcgatgccgagccggaggctaccgcgtcggatcccgccggcacggccgcttgacaggcatatgcaggaaccccccgctggaagacgttgtcttccagcgggggg

SEQ ID NO: 3791 - DNA, 5287 bp, Unknown
  16S sequences of unknown bacteria
gtccgcttcatatcggctgcacgaaaatagccaatccagccacggataaacacttgccgcttttttaccagttcgtaaggggattcacgcttgaactcctcgactgtttgcttattgaaatacagcgcgaagaggttgctccacatatttatcgcgaggtcgccagtcatcgcgtagagctttccgttgtgattcagatatgcaattaatcgagatttttgacgctttcgatgaagctgtcgatgccggctttggctgtgtccttctgctcagcgtatacggttgaccagctcttgtctttggctatcgcgtcttttatctgtactgtaaggtttacgccggtcgcgccgctgtagaggcgtccgaaatcgaaggctacaccctcgcggatcaggtcaaacatctttgctgactcatcgtcgcgcgagtacttgactttcagcgcgacctcgaaatacgcgggcgaaactgtgtaatgattctcttcgcagagcgcttccatcgtcgctgacgccgcgtcgatgtctttcgttgaggtggttattccgaagagcgtgttgccctcgtttatcagtgtcaggtaactatcctgatttttatcgtatttcggcacaggaaggacgccgaaatcgtctttcatgtcgttgtatttcgttgccgcgtcacttatgagaccggacgcgaataacgtcaatccgtttgcgaaggctcctttcacagcgtcaccattgtcaacagtaatgtcaaccgatgacagagaaccttctgaactatggacgaacttcgtgatcttactcattacgtcgatcattttctcgcttccgagtgtcagttcggggtatccatcttttgtctgtgttgtgttctgaatgcctgctccggttaccagcggagggaagttgttgtcggtactgaaagagattccgtacagatcaccaattgactttttcccatcgttgtcaaggtcggaatagacgtttccggagagctcgaacagcttgtcaagcgtccattcgcccgattcgacgagcttgtacgggtcttcgatcgagtattcgtcggcgagacgcttgttatagaagaaacagctaagctccttgatgttggatatcgaaatttcaccggacgccagataaacctttccgtttatcgccgtttcctcgacgagtccgcgagcccaccacgggtttgagaagtcgatatattttgtgtcgttgagcgctaagagaactccgtcagggataagcgtcggcatggtcgcgtactgtccgcttacgaggtcgaaagaatcatcgcccgccatgacgctctggcgtatcgcgtctatgtattccattctggaatcccatgtgtacgagcgcggaagattcgcgagcttgactccgagacggtcttcaacggttcggtcacggtcatagagcgcgtcattgacgacttcaccattctgctcgtcggtgcactcgccctgctcaagccagtagagaatcttgatttcctttccgccaaaattgagaccttcgggcagagaagacgcgcgggtttccgcgggggcttcagttgagtcgccgctccctgccgttgtcacagtcgggtcgaccgttgtttcgccacacgcggcaagctgtgcgaggataagcaatgacgcgatcagagttgctttctttttcatttttattctccttttttgctgaaattttgtatagaataattatagcgcttcgaaggaaattatgctataatatatttgctgaaaaatgcgataaatctgcaaacagggaatgattatgaagcaaaagagcgattatccgatatacttcggacatcggactgatggtgactttgaaattgattttcaggagtccgagaaaatcgaaaacgagagtgagcaacactttcatgatgggtttgaaattgcctaccagctttcaggcactcggacttacgattattccggaaaattgtttgaactccatgccggggaagtattgataattccacccagaacactgcacggtacaccgcgaccgaccgtctattttcagtcatatgtcttcggctacccctcaaatatcatctactcctacgatatctcctttcgcaacatgaagtatttattggctttttcgggtgagcactcgttcgagcgctgccgtttctcaggcgattcgccagccatggacgagctgcgcgcagagatcatccggctagccgaatacggcaactctccgatgagagagctccttgtccgcgcgtcgatactccgcattcacgatatgatctataggctttacaaccacaaaaatcagaacacctccgaatttctggaggcggtgcagagttacatcgacgatcacatattagaggatatctctccttataatattgcagattttttgcatatcagtcatagccttctctgccacaagctgcaagccgagcttggctgtacgccaaacgagctgatcatgcgctgcaagctcaatcttgccgaaaatcttctgctcgaccgccgcggactttcggtgacagaggtcggtcttgagatcggaatcccggacacgagctattttatcaaatgcttcaagaattcgcgaggcgtcactcccggccagtttcgcaggctgacacgcgatatgaggaatgaaaaaaaacagtaaccgcgccggctccccgcttcaatcgtgcatttttttacgatttcattgtaaaaccgacaaatgtgcgcgaaaccccttccattttcctgaaatatgcggtagaatatatatataccatttgtccccatatgtcaaggaggacctccacatgaaaacctacggaaaaaccacatggctgataccggattgttacctcgagcctgtctcgaacggtcagataagccacgaagctatatgcgtcctgaacacatcgccggaggaagcggcgatagagctcacgctgttctttgaggaccggaagaccgacacggcgttccgctcatcgtgcccgtcgatgcgaacgcaccacatacggctcgacagactgatctctgaggacgggcgcgagataccgcgaggggtgccctacgccgtcctcgtcgagtcgagtgtccctgtcgtcgtgcagtactcgagacttgacacggcgcagtccgagctcgcgctgatgacgacgatggcttacgcggttgactgagcggcaataagcaataaagcgaaaacgcctgacgcggattttattccaagtcgggcgttgatttatgttcacttatacctgatttccgctgtccacacggcgggcagacacccagcggtttatgagcagcacagctccgagcgcgagtacggcggcggttatcagcatcgccggaatataccgtgataccgtttccgtgttcccgggcagagcgccgatcagattaccaccctcaccggagagaaggtcagcggtgccgtatttctcagcgaatcgcgcgacagtcatgtactccgacgtatcgtccgcggtcaggacggcggtcctgtatgcgccgtcggaggacgcggttatgccgtatcccgagagcggctttatcattatatcgttccccttagtgtaagccgtcgccgccatcgcgtaattctggagcgacaggacatacagcgggcttatgtcctccgacatagacacggtcttcaacgcgtctatagcgtcgaacgccgggttatatgtatccgacagggcaagcgaataaacgtgccactgcccctgtttcttcgtgaattcctctgcctgctcgtcggttatcacgttctcttcgacgagtttcgcgatgtgctccgggtccgccccgctgtatctcgaaaggtgaaccgtgacgttcacgtcctctatatcgacctgaagtatccactcatattcgttttcctcaagcacattttcaagcctgtccggtgccatgccggcggtgaacaccgtatccggcaggatgtggagcctgtacatcgtgagcccggcgatatccccgcgcgtcacgtgcgggagcgtcttctttgtatagcggtgctccgaattctcggcgtcaatgacactgttcacggcggaaacgatatcatcggcgagagccgctatctcgtcgttctcgtcagcgagcctgcgcgtctccacggcggagaccggaagggacataaccaccgcgaataaaatcatgataacaaacgcgaactttttcacagacatacctcctgttcagctgtttatcaatgttatgtcgactcttgtgatatcattatatcacgcgcgggacgatatgtcaacatttttttacacgaataatattttcgtatatctgcacaatccgctatgcctctgattgtgcaatattgcccaaggcatatccggcagacgtttttcttcatatgttcgaaaacatatatttccgccccactctgcccgattttttacatataagttaaaaatataataaattttccgtcccgctcttccatttcgcgtcgctttgagttaaaatataaatatagccggttcattaccggcactacataaaaaggagatatccatcatgaaattaccgttcaaaatagatctgtccggaaaagtcgccctcgtcaccggcggcggcggagtcctctgctccgaattcgcgaaagccctcgccgcgagcggcgccaaagtcgccgtctgcgacctcagagcagacgccgcgcagaaagtagtcgacgaaatcaccaaggacggcggcacagccatagccgtcggcgcaaacgttctcgacaaggcaagcctcgaagccgcgcgcgaaaccatccttgagaaattcggcacagtcgacattctcctgaacggcgccggcggaaacaaccccaagggcaccacctccaaggacacactcgatcccgaagacctcgaaggcgccgctgagggcatcaaaaccttcttcgatcttgaccccgccggcatagaattcgtcttcaacctcaacttcctcggcaccctcctcccgacccaggtcttcgccaaagacatggcaaaaaaaggcgacgccgtaatcctcaacgtctccagcatgaacgccttccgccccctcacaagaatccccgcatactccggagcaaaagccgcagtatccaacttcacacaatggctcgccgtccacttcgcaaaagtcggaatccgcgtcaacgccatcgcccccggattcttcctcaccaaccagaaccacgacctcctgatcaaccccgacggctcctacaccgcccgctcccagaagattctcgcccacacaccaatgaaccgcttcggcgtaacc

SEQ ID NO: 3792 - DNA, 32759 bp, Unknown
  16S sequences of unknown bacteria
cttgaaatatgaccgtttcggttcttctggtcatattataccgcgcttttttctggtttgcaagggatgtagagaaaaacatacgcattttaacaaaaaattattttcccttaacacattatttcatgaaggcgctcctcttcctttggcaaagaactgcaccccctaaaatcagaaatgcacccccctccaaaccgtaattgcacccccctaacgggtttctatcaaaattagagtcatttgccatgaataccgacattcgttggtgtaagagagcttatccgaaaggataggctcttttgcatcctgattatgaactttctacagacgcagaaatcgatgcgcgctgtaagagcgcatgtgcccgtgctagcgagcagcgatatccttaatacaatttgaacgtcttaggccatgatacacctgttgcgttcaaatataacatttctgcgtctcaagcattttttcgcggtttgcgcacttcctcatgataaaaataattgaccagaaccggcggggcgtcgaatgggcgctgcattgtatcatcgttccgcacataggcgagcccattctgctgggcgtattcccgcagttgaccatccagcatttcccaatagagccggctgccatgcgaataaatttctttataaagaggcgctagggcgggccgtttcctctgaacgtagtccaggatggtagcgcgatagctgccgcgcagattgaggttttccagccaaatcagattgcattgctcctttacgcggccaacgattgcctccacatccgtaatgcccgggaaaatgggggcaatgaagcaggtggtgcggatcccggcgtcacgcagcgccttcatggcccggagcctgcgcgcaatgctgacggctttgtccatatcgtttttgaaattttcctccagcgtgttgatggaaaaccccacccgcgcgccggaaaacgttcgaatcagatcgaggtcacgcaaaacaaggtcggatttcgtctggatgctcagccggacgccgctgccttgcaattgctcgagcagcgctcgcgtgcgacggtattcctcttcctgcggaagatagggatccgtcaccgagccaaaaaacagttcttttcccgtgtatttttccgggcgcttgatttccggccagaacttcacatctaagaacgcaccccatggctccgcgtgccccgtaaaccgcttcataaagcaggcatagcaatacttgcaggcgtgcgtgcaaccgatatagggattgaccgcgtagtcccctacggggatgttggttttggtgatgacgcttttgacctcaacggcccgcacaaccggctccgccatatagattcccctttctgaagcgtcaggggcttttccagtgaatacgcaaacaaaatctataagtagtccgccctaccacttgttccaatgcactttcttttgcacagtcgcctccacctgcctcggaatctccgcctcagggctggcgtatccgagaatgacgagcgtgggcaggtaccagccatccggaatttgcaaaaattgccggatctgttccggctcttttttcaccggaatgtggacgacagaacccaatccctcagcggtcgcggccaggagcatgttctccaccaatgcccatgccgcgccatagtccatcaggccatacccatttttgtcttcagataaaggatacttttgcttaaaaaacggcagaatcacacacgcagcctcctccaccatgctgcgctggcgaggataagcgattttgaacatttcctgctgcggggttttcggctcctgaatgcggcaaggatacggacgaatgaactgggccagttccaaaataaccggcttttccgtgagaaccaccaactcccagcgccgctgatggttagaagaaggcgctttcaaacccgcgtccaggatgcgctccaacacttccctgggaatttctctatccacaaattggcgaatgctccttcttttgcgaatgacgtcataaaattccatggcctattcctccatttcctggtttaccagcagggtcaaattcttcgtaaatgtccttgaaagatcgatcaattgcttttgctcttcaggcgtgaacatggacatcgccgtatcctccgcccatgtgatgtggcgaacgacccgcccataatgggcgcaacccgcctttgtcatgcggacgatcttgttccgcttttcgtcctcacaaaaccatccctgccttgatctatgctaccgtcatcgtacacttactcatcgaatccaaagctttcgaccttcaaagttttgcaattttccgttactgtacgaacagtcgtaaacggtgtgccgtcaggcatagtggcttcaacaagcaacttgatctcgaccttagcgccatccacctgcatcaaatgattgataacctcatccatgagattgctgatattcttgaccactctcgtggaatccaacgtggccatcatttcaaaatggcaattctgtggcttggttggctgcacagatgcaacacttaccggttccgatccgagcgttatgggttcatcgctacctccaacactcggcggtgtaagaatttcaggctggctagccggcgctgcagaggcggacgtctccgcagccttctgcttcaatgcagcgatctgcttcaccaaatatccagacttgtcgatgaatccgacatactgattgtacttcaaagccacatactttccatcgctaatgccgtccgcataagcaaaatagtcctcagagttcacccccgtctgaatagcggcctgtaaaacttcgaacgatgcgaggcgcggcaaatagcaataggtgcacaaaagtttccagagttcgccgacattcagctcgtttttatcctgccacagcaaattatccagttgcatgttcagcaaagcaggcgcccactgcgtaatcagttgctcattttgctgcatctttcttgccgccttcaagacaatgctgtctgttccgccacggatactgataacatcccaaaccacggtcttaaggtcaacctcgcgatcgatataaggaaccagcagatggcaatacgtctccagaatacgcgcttcaatggtctggttgctgcggctgaggttgttgtccgtttcgcggttttgagcggcatccaggttcaaatccacactatcttccttgatggatttccaggcaaggaagcgcttgatttcttctcgaagagcggacatcatattctgatccggagcgacaaaagccagcatattgcgataaatgcgcggcgaagcacccctggtattcagaatattctctgcagcttggatggcagtgtcgcgcggattgttgaacttgtacgtctgccggtatttcagaatgacaaggccgacatcctgctcatcactgacatccatcgagctattcgggcaaatatgtacacggccaaagggacgttccttccgaatctgcttcagacggcgctcaatctccatctcaacttcttcctcagaccgctgactggcacgatcttcgacagtctttcgaagcgtgggacgggtatcaaaccagaagcggtcattggagggattgctatagaggtacgtcaaagctccctgcagcgtacctagggcatcattaaaggtcgcaatattctcacccggctgtacacagccaaggcgtatacgcgatgtttccaggccacgaatggtatccatgcgcgtgctcggcgcgctgccgagcataatagtacgcgccacacggcgagctgccatgacatgaccaaagcgggtgacctcttggtctttttgatacggcacggagtttttgccatccacctcatgatcgatgatggcgttccagttgtcaccaacatgacgtgtcaattcatcacgaatattggcgacgtccaaggaaagggatcctggcaaaatgagcaagctcccatcttgattcatccagagattatggacaactgccgccatcaggcggaggacgccacgggttttctgaaagtgctcgatggtcgcccaatcctcatacagccgatcaaaaatttccgggtgaatggggtagcaggagcgcatccgctggaaatagtccacttctttggcattggtggggaaatcgctgctgttctcctgatacatttggctgaatgcctggcagacggcatcccgcgcggcctcgtctttgcaattcaggaaaagacggcgacgcacgatctcaaagccttcatctgccgcaacaggcttccagatggcttccatacgcccaaaggtgtgctcaaccgccgctaatgcctgttggccgccactgccttcttcgccaatttcaatggtggattcgggaatagaggcaacgaccaggctgttttggctcgcgcgggcagcctcggtgatctcttgaatgaaagaaatgaggttgtcaaaggaaccggcaggcaggctatccatcttccagagtttcttcgcataggcaaccaactcgtcgatcaagacgacgcaggggccgcaggcatcaaagaggttcttgagcgtctcgctacccggtgaaacacccttcttatcggattctttgaccaaatcgtagagcttcggcaccccggcatccttggcaagctgataggccatctctccccaaagggtattgacggtgatccctggcatgtccgttgggcgcttgctctttgccggctcaagcgcagtgcctaccagcacggcaacgcggcatacgggcggctgagtcacctcagcagcttccagcacatttttgatgctactgatctttttgctgggagcgcgtccgcgcagcagatgatagagtgccagcatgctgtgagttttaccgccaccgaacgcggtcttgagctggatgaccggctcgccatccatgcccgatacacgacggagagcctgaacgagcaagcccttcattccctctgtgacataggtgcgagaaaaaaattcgaccggatcgcggtattcatacgcaccctcgccacgggccacttgagcgaggtcggcagcaaattccgcgttcttgtaacggccctgcgccacatcgggatgcggctcaatgacattgcgccagcagggcagattattgacaggtgtggtctgcatgacgccgagggatttcttgcctgcgccagcatccgtgccattcgaggtggaggccattgatccctgatcggagccatactggagctttctgatcatggcctgaatctctgcctgggcctcgccgtcaatctcgcccacaagcagggccatggtatccagcgcacgaacggtctctttctccgtaaagtcggtgccgcccatgtgcgcccactggttacggaaatccttgatctcctttgcccaagagcgagctgcaaccggcagtttgtatcggaacaagttattccaatggcgatccagcagatttaagcaggcggccagatccagggaatcgagccgctgattgtagtccgtgccgtagtacaggtccttctgttcgcgctcgttcattacgccgatgacaccatctgtccaccaacgatcctcgatcttatactctgggatgctcatgagttgctgaacgatataaggcgcgagccactcccggagaatgccgaagccttttcctacgatttcatgattgctcatcttgtgttgctccttataacatatcaatcgtcagttggacgggcttttctgcctgcatctgtgcggccatggtctggatgtccggccaggccacgacgagattgttgtacgcatatccttcctgcgcccaattcttgcgctcgcagatggtgtagagcctgtatgccagcgccttggcgttttcggcgttgctgccgaacaggtcgacgacgatctgggcgcacgccttgacgccgcccttttccatggcgtgggcgagctgttgcgtgagcagccagatgcattcttccgtatcgctgaccttttctgggatttcttctcgggtcagtaggcgcaccatgcccttggcagccaacagcacgccgcgatccgccagtgcctgcacggaggtgttcttcgcgcgggcgagaatgtccgcgtcgccgaacttaatggtgttgaaggcgtactggttgaacagttccacgcagaagcggctttctcgatccagctcgccttcctgctcgttgtagaaggcgtccagctcttggttgatgatctgcaatgcactgcgcacgctcacgggcgtgccgtccgcctccagcacgctcttgtagcggctgaatgcgccgatgcccgggccgatggccgattgcgccaggtctaccggggcgatgttggcggattgcagcttttccagcgctgggcgcatctcccggtgcagagcgttgataaactcgcggcgagtgacgctgcgggcatcctctgtgcgcttgcggcagacgaggacgatgctggaagcgagggcattggagccactggctattgttctattgaccatctccgtacgcataggccatgtgcctgtgatggcaaagcccgcgcgtatgatggcggaaagcatggtttcccagccagtcgatgctgtgctgtcatctgaatccgtttcactctgcttgaaagcatagtaaatcgtgaccggtacatcatctcgagcatatacatacaactggcggcatgtattgaacatgccatcttcaaaaaagtcccgtgctctttggacgctgccttcaaaacgatacggcgtagcgaccaattcctctgctttaggaacgagcatcgtacggaacacctttggataggtgttctttagcgattgtcgcatccatacataaaaaaaatccgataaatccgcatagccgatgttatcataataaggtggatctgtagaaaccataatcattcgcatatcacaatcactttgtgcatcgaactgacaagctgttccctgccgaccattagtaggaagattctgcaatactttgtatacccaatcgagcatattagcataactaccactcgactcacacatagggttagcttctgcataatcccatgtcatagggatagcttgtctaccaaaggtgttgcgaatcttctcaccgctattatgccatgagcaaatcgaagaatgataatccgccattttatccacgacaaacgccaaatacacccccaccgcttcgccataggcgcgggcgccggtgccgccttcggcgaggggaatgtggtcgttaaacacacccgcagccacagcatcggcttcggccttcttctgcgcctcgcccaccagcgcgctgaacgtggtcagggcggtcagctggcggttggtgaagagctggctgtattcggtcatgccaaaggcaggtgggctaaaccaccgaggattggtaggcatcgtgccatccgggtaatcttcgggcttggaaacctctgctgcacgaatctgctcggcatccggagaaagatagattcgtccatgcttgccttccgccacaaccgccataagctgcgcaccgatgcgccctgctttgcccgcttccttgacataagcgtccagcgtcgtttcgccgcaggcagggcaaacaaaggcagcaccacggccctttttgggctccataaccgtgcccattttttcgccctgatgaacggtaaattccacctgatttccatatacgcgaggttcgatccaggcatattttcccttttttttggacagcacataggagcttgccagcggcatctcgcacccgcatgccgggttggggcacttcaccgtccgcgcccaaatccacgcgatgacggtggcctcgccgccgccctgttctctgggcaccttcaccttcggatacaggtggccgatgcgcttataggcctcctgcttcatccattcgccatagcagcgcacgtcctccgccaggccctcagcacccttccaactgatattgtcgcccatttgcgcacggctttgcggattgacgggagcctgccctgcgaacttcggcgggatttcgatcatggccttgttgatcatcacggccacggggttcaggtcatgggcatgggcctccagcccaaggcgctgcgcctcgagcggaattgtgccgccgccagcaaacggatccagcagcgcaggcggattgccgtcggtggacttcaggatctccgccttggcctccgccagaacggcttcgtcgttgctgttttcccatttgaccagtttggtgaggatggcaaacaggcgctcgcgctccctgcgctgctcctcctccgtgggaaactgctcgggatggctggaaggatcgtccaccagtgaggaccaaatgaccgcgcgcgccgtcgccagtggtcgccgcgcccaccacaggtgcagcgtgctgggatgtccgtgccggatggacttctcccgggcggattccgcattgatcgcctccaaagggagagcgacctcaatgagtttcttctttgcggccatagccatacctcactcttctatctcgccaatctgcaatagatcggcgatttcgtaattcacgctgcaagccccctgatccggcgcatgagtaaagggcttgcggatgtatacggtcttcgtctgtgccccatccacctcgacgatggcgaggatgtattcatccggcttgttgagtgccgtcaagatctcgttgcgcgtcgccgtcaccgtcgtggagcccttttgcctgcccttgacttcgatgaaacgcaggcaatgcccgccgttgcgcttggattcggggatgacggactcaatgtcatagcccacgttctcggaggaaatatcccgcggcaggaaacctcgctccagctcgcgctgcgtcaccgcatgcatcgcggcctcttcgatggcgacgcggtctgtgccaaacaggctccctacgttgggctgccccatgattcggttgagcagtcccatcgggacgatcagcgcgccgcccacgatgactggcgggcagggcgaaactttcttctcctgctccagctcagccaggcggcgctgcatacgcgcctgcagctcgtccgcccggcgctgagcgttggcggaattgagctttgcgttgggtttgcccgcggcttccttctccttgaggtcggcggcgcgcagatcccaatactggatttcgcaggtcaaccgctccttgaccgccttggcgatcttggccgccatcttaaccttgtgcgctttcacttcgccgtaatgcttgggcacgatgtgttcgatagcgtagtgaacggccagttcttccagatcttgagagagccacggctgggatttggcatagctcagcacggcgcgctgctcatccggctctgccgagcgataatccagatacggcgcgtatcccgcattctttgcctgccctacttcgttcagttccacgaactgaagcgttttgctcacgatgcggcggctgccgtcaggcagaacatggccatcctgaatggaattctcaatgtaaaacagcaggcgtgcctgctcgctgggatcgttctcatccaccagaacagaaccccgcttcaacacatctgcgttctgctcgcggatcagatcaatgacagcctcaagcagcggatgaccgggacagatttgatccgcaatcggctggccctgcacgctgcaatacgctttgtcgaagcagatgcgctcatactttgatgcaaccggcacgccaaagccgatcaattgatcgcgcgaacgcactttatagggaacgctcaggatttcgtagcgtccagcctcccgcttgcgaatgatgccgccgagcgattgaaacgcttcgaggaagaacgcctcaatgaagtgcggctggagcttatgcgcctccatgcgctccatctcctcgcgaatggccatcacgcggtgaacatccatcgtatcctcggtgagagcgcgttcctctagcagatttcgcaacgcatccttatcgagtgctcgatccaccacctgatagagcttcgcgcgggtctccggagcattgccatagcgaatcgcatcgatgagcagatcgcgcaaagagcgattgtcgaagttcgctttgccaaggatgtcaaacaccttgccgcccagcgccgctcgctcttcttcgagcttttcgaacaagcgctgaaacactgccccctcgcgggtttcctttgacacgaggttccatagatggcagacttccgtctggccgatgcggtggatgcggccaaagcgctgttcaaggcgattgggattccacggaaggtcatagttgaccatcaggtgcgccctctgaaggttgataccttcgcccgcggcatcggttgcgatcaggatgcgcacatccttatcctgtttgaacagcgtttccacttttctacgttcatcgcggagcatgccgccgtgaatcgccacgacagcctcatctctgccaaaaagcgtgcgtatctttgcgcacaggtagttcaacgtatcgcggtgttccgtgaagatgataagcttttcgcgttgcccctcgtcgtcgaacatgagactgtcgtcctggagaatagaggatagctcatcccactttttgtctgtgccgctgctgcgcacagcgtttgccatgctttccaggcgcttgagggtttcaatctccgcttcgagctcggcaatcgtcttggatgccgaagcttgatcggccacctggtcctcttcttcctccaaatcggctgcgggcatctcatccagttcgtccggatcttccggtatgtcaaactgccagggcaaatctgcagcgcgcttgccaagtttttcttccgcaagccgaacttcaaggcgttcgcgcctacggtgcaacgactggtaaatggcctctggagaggaagccagtctgcgctgcaaaatggtcagtgcaaaacctacgctgctgcgatgcgtgccatccaaatggtccgcacggttgaactcctcctgcacatacgttgtcacgttggtgtacagctgcgcttccatcggggaaaggtcgtagttgaccgtgtaggcaaggcgctcagggaacagagggcgcccgtcaaatttcagcagatcttcctttaccaaacggcgcatgacatcgctaacatcgatggactgattgctggtgcggcaagcgccttcaaatcgatccggatcgaccaaggacatgaagagttgaaaatcctcttccttgccattgtggggcgtcgctgtgagcagcaaaaaatgccgggatatgctcgaaagcaatttgcctagctgatatcgcttcgtataatgtacctcgccgccccacatggtggcggacatcttgtgcgcctcgtcgcagacgatcagatcccaatctgtgacccggagcttttcctgcaattctacgttgcgggagagcttatccaatcgggcaatgcaaaaattgatttccgtgaatacattgccggtcacggcagattccaaacggtcatttgtgaggatctcgaaacgcaggtggaacttctgataaagctcatcctgccattgttccgccaagttccctggcgacacaatcatgcatcgctttaagtccccgcgaatgataagctccttaagtaataaacccgtcataatggttttgcccgcacctgggtcatcggcaagcacatatcgcagcggcagccgaggaagcatttcctcatagacggcagaaatttgatgcggaagaggctcaatagcagaggtatgaacggccaggtaggggtcgaatagatgcgccagatgaatccgataggcctcggatacaagacgcagttctccgccatccacgtcaaaactccacggcagactcttttcgagcaccgtcaatgaagcctcgtcatcacgatagagaatttgagagccggttgtgccacgattggtcttataaaacacttccatactggaggaaccataccacttcgtcgaaaccactgtgatgggctcgccagaaagcaagccatttacgacactaccaatggaaagatcttctagcctggccatattgacacccgctttctcaagtattgtcatctgcctgcatcttcgagctcatcatccacaaattccatgatgtctgtaatttcacaattcagggctttgcagatttttccaagcacttcagtagatacattctggttcttgccgagcttagcgataacattcgtactgagaccggcagcaaggcgcagatcttttttctgcatgtcgcgatcgatcagcagcttccacaacctcttatagcaaatcgccacagtgctacctccacaggcaatagcataatgcattgcaattatagcaccaataataagaagcgtcaatttaagattgtaattctcaattcacctcggaattttataaaaaaataaggactacaattctataccagaattgtagtccttctgtggcggagaaggagggattcgaaccctcgcgccagttatcccggcctactcccttagcaggggagccccttcggccatacttgggtacttctccatatctatatacagttgttggcggagagagagggattcgaacccccggtgcctctcgacatcaccagttttcaagactggcgccttaaacctctcggccatctctccacagaaacgccagcgaagattattttaccagattcatgcccatatgtcaatagcgctgggttaaataatagttaataacgcaccgtcattttttccattggcggggcggtttcccccaccccgccaacgaaaaatctcacttctccgcaaacgcgcgctcagcggcctgcgcgagccactgcgcgctgcattcttcaatcttgcccgcgtcgcacgcggcggccagcttcggatcgatgggcagcttacccagcacttccaaattgtggcgcgcggcgatttcatcgatatggctctcaccaaagatcgaatgcttcttgccgcaatccgggcaagtgaaatagctcatgttctcgatgagtccaaagatcgggatgttcatcaggcccgccatgtttacagccttttccacgatcatacccaccagttcctgcggcgaggtgacgaccaaaatgccatccaccggaatggactggaacaccgtgagcggcacatcgccggttcccggcggcatatcgacaaacataatgtccacatcgccccagaccacatctgtccagaactgtttcaccgtccccgcgatgatcggaccacgccacaccacaggatccgtttcccgcgcggtgagcagattgagcgacattacgcgaatgcccgtggacgttatcgcgggatagatgccattttcatcgcccgtggccttctccgtcaccccaaacattttgggaatggacgggccagtaatatccgcatccaaaatagcggttttcaaacccgctttctgggccagcaccgccatcaggccagtcaccatggatttgccaacgccgcccttaccgctcataatggcgacgacttttttgatgctggagagcgcgttgggcgcttccaaaaagctcttcggatcgcgctgcgcgcaattctccgagcagttctcgcaattgtggttgcaattctcgctcatgctagttcccccttctttatggattatacccaccgcacacgtcgatccaatcacaaaattgcgacgcgcgctccaattcttcgagcgacaagcgcaccgcgctgtgcgcgttgccacccgccggatataccgtatcgaatcgcttgagcgatacatccaaatacacctgcgcgcctgggcgcaccgcaaacggacaaacgccgcctggcgcgtgccctgtgcgcgcaagcacctcatcaccctgaagcatgcgcgcgcgttcgccaaaatacgcccggaacttggcgttatccacccgcgcgtcacccgccgcaacgatcaacgccgcgccatcgccgcgccggaacgccagcgttttggcaatgcgctgcggctcgcagcccaacgccttcgcggcgagttccaccgtcgcgctgttttccgccaaatccatgtaccggtctgccaggccaaattgtgccagatgcgcgcgaacagcttcttccaccatgccatttcctcccttcgcgcaactgctattataccgctattgcgaccacatgtcaaattgacttttgccacaggatttgttataatgaaaaagccaatttatacaagcaaggagcgcacacacatggactggaaagagcgattgcagcagaacctggtcgattatcaatccattcctttctggagctggaatgacaagctggaacccgaagagctgcgccgccagattcgcgccatgaaaaaagccggtattggcggattcttcatgcacgcgcgcggtggcctgatgacggaatacctcggcgaagattggttcaccgccacggcggcctgcatcgacgaggcagaaaaacagggcatgcacgcctggtgctacgatgaaaatggctggcccagcggttttgccggcatgaagcttttagaaaaccgcgaaaattgggaacattatatcgtttgtgaaaccaaagccgcattcgatccgagcgctatggcggtctacgccgtggaaaacaaccatatccgccgtttgcaggcgggcgaatccgccaaggaatatctttgcctgtacgaccgccagaattcttcggtggtcgatattctgaaccccgatattgttgcgcaattcctggcggaaacgcacgaaaaatattacgcgcactttggcgcggattttggtcgtgcgatgcagggttttttcaccgatgagccacagtatttccgttgggacacgccctatacgcccgtgattctgcgcgcgtacagcgagcgctatcaaggcgatttactcaatgaactgggcgcgctgtttgtggattgcgaagaagcgccccgcctgcgctggcgctattggaagctgatgaacgagctgtacacggccaatttcgccaagcagatttacgattggtgtaccgcgcacaattgccagctcacggggcactccattgaggagcgcaacctggcagggcaaatgatgtgctgtgctggcatcatgcccttttacgaatatgaacacgtgccgggcatcgactggctgggccgcgaaatcgccaacgaatgcgcgccgcgccaggtttcttccgccgcgcagcagttgggcaaaaagcatgtgatcacggagactttcgcctgcgctggttgggacgtaacgcccaaggagctcaaacgcatcgccgaatggcaatatgtgaacggtgtaaaccagatgtgccagcacctctacccctattccatccgtggccagcgcaagcgcgactatccggccttctattccgagcacaacccgtgggttaaggcggaattccgggccttcaacgattatttcaccgcgctgggctgtatgctggcggacagccgcgaggaagcgccggtggcgatcgtgcaccccatccatgccgcctacctcacctataagcacaacgatccccattcggtggaagcgctggacgcgcgctttgccgcgctcgtcgaacgctttggcgccgcgggaattggccaccactatgtggacgaaagcctgctggccgagcatggcagcgtgcaaggcggcaagctgaaaatggggcagtgcgaatacgaatatgtggtcgtgccggaaatggacacgatcgacgcgagcaccgcgaagttgttgcgcgaatacctggcaggcggcgggaagctattcctacagggcaaagcgcccactcttgtggaaggcgaagcagcagatctttccttcttgcagagcaacgtatccttcgaagaaatgcagcgcgccgttcgcgtgcgcatcgatcgcgcggataccgccattcgctacaccacgcgcatggctgaccagggcgactttgtgttcgcggtgaacctcgcgaaggatcaaacctactccattcaactgcgcatccgcgccaaaggcgcaaaagttttcgacgccatggcgcgcgaataccgcccggcttatttcctgcgcgacggggaggaaattgtggtgcccctcactttcgcgcccggcgattccctgatcctcgtgctggacgatgccgcgcaaagcgccgccaagcccgtcgaacccggcgtggcgcatgcgctgtcgctggatgccaacgtcgtttcgtgctcggagaacgcgctcacgctcgatacggccagcctctcttacgacaatgtttcatatggaagccctctgccggtgatggccatttccgatcggttgctgcgcgagcgcacgaaccatacggtttatctgaaatactcctttacgatcaaaaccgtgcccgagcgcattcgcctggaagccgaaaagatgaacgccaagcgcgcctggttcaatggcgaagaagtgcgcctctccgatcctggcacgctcgatccggccttcgtaagcctcaacctggcagggcgcgccaaatccggcgtcaacgagctggtgctggaaatcgattactaccagagcaaagaagtgtacgacgtgttcaacggcgtgtactacgagcattccgacggcaccgaaagcctgatcaattgcttgagctacattaccgatatcgaagccgtatacgtgctgggcgatttcggcgcgtatacgccttccctcacgcccggcgctaagaataccctgctctcccccgccgatttctggatcggcccgcgcaaaacgagcctggcgctcgaccaactggcgcaaagcggctatctgttctttggcggccagatcacctttgaaaaggatttcgaagccaccggcgcagaaaccttgctcaccctcggcggtcgctttgccgtggcgaaggtttcgctcaatggcggcgcagaagaaaccctgatgtttgccaacgcgcttgatgtggctggcaagctgcaaaaaggccgcaaccaaatgcgcgtcacgctgctttccagctaccgcaacttgttgggcccgttccactttgcccccgacccggaaccgtatggcgtaagccccgataccttcacccactacgggcactgggacaatggcaagtgccccggctatgcccaggaccagtatgccttcgcgccgtttggcataacttctatcacgctgcgctgattgcgtaggccgaaacgcacatcctccatacccgacgcccttccggcacgacttccgcgccggaggggttgcgttaaaatccagcaggttcacgctcctcgcttgacaaatacggggtttctctttataatatacctatacccctacaggtatatagagaaagaaggtttcatatgcacaaactcatccgcggcacggaaaaaatgctggaatttggcggaatcaaaaaggacattctctttctggttctatccggcatcgcccttgtcatcagcattttcgatctccttcctctccccttcgacgcggcatggatcgccatcctcctgtgcggcattccaatcttgctggaagccatcatcggcctgatcacggcctttgacatcaaagcagatgtgctggtttcgctggcgctcgtcgcctccgtatgcattggcgaagactttgcggcgggcgaagtggcctttatcatgcagttgggcgcgctactagaggatttgaccgtagcccgggcgcgcgcagggattgaaaagctggtgcatcttacgccgcaaaccgcccgagtgctgaccagtgaaggcgaaaccatccttcccgctgaacaagtgaaggtcggcgaccgcatccgcgtgttgcctggggaaacggtgcccgtggatggagtgattctcgccggacaaacttccatcaatcaagcggttatgacgggcgaatccctgccagtggacaaaaccgttggcgacggcgtttccagcggcaccgtcaaccaattcggcgcttttgaaatgcgcgccaccaaagtgggcgaagatagttccatccagcgcatgatccgtttggtgcagtcggcagacgcgggcaaggcgaagatcgtcaatttggcggatcgttgggccacctggatcgtggtcatcgccctgagcgccgccctgatcacgtggttgaccacaggagagatcattcgcgccgtgaccattttggtggtattctgcccctgcgcgctggtgctcgccacgccaacggccatcatggccgccattggcaacgccaccaagcgcggcttcctcgtgcgcgaaggcgacgcgctggaaaggctcgcacgggtaacccgcatcgccttcgacaagaccggcacgctgacctatggcgtgcccgccgtcgtggcggtgaaaagcgtttcgtccttggacgacgcctcgctctattccctcgccgccgcggccgagcaattttccgagcaccccctgggaaaggcggttgtgcgttgctaccggcaaacagaaggcgcggaactcctccccgcggagcaatttgcgatgctgccagggcaaggcgtgtccgccgtggtagagggaaaacaagtttgggccggaaacgaaaaattgctcaaccaccacggcattgcggttccgcccagtgcgcacgcggctgtggaaagccatctttcccagggaagcaccatcatttatatcgccttggaaaatgcgctcgctggctatattgtcctgtccgatacgctgcgcgaagatagcgcctccatgatcagcgccttgaaggcgctaaatgtgcggcccgttttgctgaccggcgaccatgaaaacgccgccgctgccattgcgcgccaattgcgcatcgatgaagtgcatgccaattgcctgccggaagacaagctcaagcggatcagccaatatcaagagcagggagaacgcgtctgtatgatcggcgatggcgtaaacgacgcgccagccctcaaaatggcatacgtcagcatcgccatgggtggcgtaggcagcgatatcgccgtggaggcggcggacatcgccttggtggacgatgaaatccgtggtcttccccatctgttggcgctttcccggcgcatgatgcgcaccattacgctaaacctggtcttttccatggggctgaattttttggccattgtgctggccatcacgggactgctgggcccggtcattggcgcgctggtacacaacgccggttccgtgctcgtgatcctcaattccgccctgctactcgcctggaaacgccgcagctaacgcattgccgttccagcaaaattcttgcgcgcacaggcttgcccgaagcaaaaaaatatgctagaatagagaagggaacaaaggcaaaggagaatgcgcatggagcggagaacgcgggtggcgggcgatatcacgctggcgcaggaacaggcgctgtacgacgcgagttgcaaacgcctgctttcgtacaagatatttcttgcgtggatcctgaaatactgcctggatgaataccgggattgcgacgtaacgacgatcgcggaaaaatatatcgaggggatcccctcggtgggagaaacgggcgtcgatcccgaccaatcgaaccgccaagtgacggaaggcgcatcgatcgccgggatgaacacagaagatacgctggtgacggaaggccgggtcaactacgatattcggtttcatgcgctggcgccgcgagacggagcgttgatgcggatcatcgtaaacgtggaagcgcaaaaccggtacaatccaggatatccactgatcaaacgcggaatatactatgtcagccggttgatttccgcccagcacgggagagaatttgaaagatcggggtacggaaagattcgaaaggtgtgctccatttggatctgcctgaacgcggatgcggagaaacgcaatagcatcacgcgatacgcattgaaagaagaacatctggtagggagaaacgaagagcctgtggcgaattacgacctgatatccgtggtcatgatttgcctgggaaaagcagaagaatcagaggaagcgagcctattgcggatgctggacgtcttactgtcgaatgatcggaaggcggaagaaaagatcgcaattctcagcgaagaatttgcaatagcgatgagcgaaccgatggaagaggaggtggcgcagatgtgtaatttgagccagggcatcgtagaaaaaggcctggcagaaggcttggccaaaggcatggctcagggcgtggcagaaggcatggccaaaggcatggagcaaggcttggccaaaggcatggagcaaggcttggccaaaggcatatttgacgccaatatgggcagcattcgcgccatggtcagcgagctacatctaacggtagagcaggcgatgaacgtgctcaaaatcccacagaatgagcgtgagcgttacaaggcggcgctggacgcgcaagtccgcaaaccaaggttataattacacaaaatacccttccaaccacccgcagacgttgcatgcagcgcgtccgcgggttttgtgtgtttcgaccgccttggcatagcataatcctccgccatagggtctggagcgacctatgcctcttcgcaacgccaaatgcaagagcgcccctccgcgagcgatggtttgccgcggaggggcgcttccattcggcctaaagcctacttaccggagcggaatacacgcccggattagccgccatagtagctgttatagagctcgacatactcctgcacaccatattcttccagcgtggcgacgaagttgtcgtattcatcctcgatggagatctcgccggtgatgaacttggcttccatggaggcaacatagtcgtccagcggggtctgaagcgtgttgatgcggtccaggtcatcctcagtgaagtagaaggtcgggatgctctccgcatagtagggctggtaggtctcgatgaagttgggctgccaatcttcgaagtagttgcccgtggcaaagagctggccgagctgcgtatccgggaactgctctgcgtagagttggtagtaaggatcgtattgcaggctattgaagccaggcaaattccagatggtcaaataggtgcagcggaacgaccactcgttggtcacgtcatctggcatgttgtatttgatcacgccgtcttccacatagtggccagtgccgaagtaatccagctcgctccccgcctccgggccatacatggaccaaccataccattcgacactgtacatttcatccgccagggccgccagagccgcagccacttcttcttcgcaatccgcattcaaaaccataaaggccggaatgtaaacgggattggcggcgggatagatgcgcagtccgccttcttctttggacatggcgttgatggcaacccagttgtccttggtttccggcacatacacatagggcgcggacatggcgcagaagccgatggtgccttccaacacggtcgcctgcacctgagtttccgactgcgtgaacatatccgggtcgagcaggccttcgttccacaggtcgttcatgtagagcaggtaatccttatactgcgcttcgtagggcacgaaaacgatgtccggattttccttgttgtgatccaccgccaggttgccgctcgcggcatagcccagcgcgtagaagatcagatcgcgctctgccgaagcgccgctccaggaaccgccccacgggatttcgtcgtccgggtcgccgttgccgttggcatcttcatcgcggaaggcaatcagcatgttcttgaactcttccagcgtggtggggttttccagtcccagacggtccagccaggtctggtcaataaagaaccgcgccgcataggaatagatgttgttgagggccgggaagccgtaaatgttgccatccgtcgtggtgatgccttcgcgaaccgcaggattttcctccaggaacgcggagaagatgggcatatagtccagcagctcgttcaccggatagaacatgccttccgaagtaccatattgcgcaatatcattggcttgaaagacatggcccaaaatcgcgtcgggcatatcgccgctgttgagcatcagcggaatgcgctcgctggcggcggtggagtcaatgaccatccactcgatatcgagaccgctattgcggttgatgtattccgtcatccagttctgctcgacctggaaatcaactgcagaaccctgcggcaccagcgcgatggtgacggaaacaggctctttgaccacggggaagccgggttcaagatcgatgttctcgatcaagtcttcggcgaatgcatagctgctgagcatgcacagcgccaacaccagggtcaggatctttttcatgggtctacctcctaaaaatattattgctacggcatccgccgcgacaacctgggtttaccccttgagggaaccgatcataatacccttcacgaaatacttttgcacaaagggatacatcagcatcaccggcaaattcgcgatgatgatcagcgaatatttcatcgtttccgccatgcgctggcggcgcagcatatcggccaacgcctcggcggacatacctgccgtatccgtgccgatcgattggttcatcagcagcacttgccgcagcaccaactgcagcggatagtattccgaagaattaatgaagagcaaggcgtggaagtagctgttccagcgccccaccgcatggtagagcaccatgacggagacgatcgcgccggaaagcggcagcaccacctgccagaagatgcggaattcgctggcgccatcgatcttcgctgcctcgcgcaattcctccggaaaactggaaaaatacgtgcgcgtgatgatcatgttgtacacgctgacggccgccgggatgattagcaccacgggattgtcgatcaggcccatgttgcggatcaacagatagaacggtatcgtgccgccctggaagtacatcgtgaacacgaaatacgccatcagcaggttgcgccccttaagggttttgcgcgaaaggccataggaagccgggagcagcaaaatcaggttgtaaatcgtgcccagcacggtataaatgatcgtgttgcggtagcccgtccacaccaggcggtagtcaaacaccgaacgatacgaatccagcgtcacccgcaccggccacaggagcacttcgccggtgatcaccgcatttgggtcggaaaaggaggcgatgatcgtgtagtaaatgggataggcgcacaggatcagcaccaggaggatgaaaaccatgttgacggcgtcaaagatcttatccgagcgcgtgcgcagcagctttgtttggtgatgtttggtcgtaaccatattgcttcctcccccttaccacagcgaggtttcgcccaccgtgcgcgaaatctggttcaccaccactagaatcacggcgttgatgatgttgttgaacaagccgattgcggtggtgtagctgaattggccgttcaaaatgcccagccggtaggtatatgtagaaataatttcgctcacatcgcggttcaaatcgttttgcagcagatataccttttcaaaccccacgctcagcatggatcctgcgcgcagaatcagcaaaatcacgatggtcggcgcgatggtgggcagatcgatatagcgaatcttttgcagcgtgctggcgccatcgatgcgcgccgcctcgagcgattccgcgtccaccgcggaaagcgcggatagatagatgatcgtgccccaccccgcttcctgccaaatatccgataccacgtagatggtgcggtaagcggaggacatgcccaagaaattctttggctcgccgcccaccatttgtaatagcaggtttataatgccgctttcccgatccagcatcagatcaatcaggccaacaatggcgaccaacgaaatgaagtgcggcatatacgtgatcatctgcacggtttttttcagccgcacctgatggatctcgttgatcatgatcgccaggacgattggcaccgggaagccaaagagcaaattataaaaggaaagcagcagcgtgttccgcattagctgcacaaaattgggggactcgatgaactgcacgaaatattccagtcccacccactcgctgcccgtcatcccccggcggatcttgtaatcgcggaaggaaatctggatgccgtacagcggaaaataccagaaaatcaaaatatccaaaaatgccggcaaaataaataaatagaagacccaattctccttcaggtaatgcacgatgctgcggcgccttttcagcgcgggttgaatcgtcatgccttgtacgccccctttttgctgttaaatttagaataatcgttttccctctttctgtcaatcacaagttcttgcgcctgtactttctgcgatgcgcaaatggtttctaccctccaatttgtatatatagaatatatttgcaacatttttttataggttaattccaattcgtacattattgtgcagcttttcgcctactttgcgcctccgcccagtccagcaaggcaaggattgacatcctccattttatattgctataatagatgtaatgttttccctaagaaggtgccgccaatgttccaaaagttttcccatggctttcgcattttgcaaagcgctctgcagcggcgcacttttttgctccgcctattcgccacaaccatgctggtagctttcctgcccacatccatcgcttgtatgaacctggtgaccagcgaaagccagcgcgcatacgaaaatagcgtggctcagctagaaagcacggccgccaccgcaatggtgcaatttgaaaacatgatttcctcgctcaacagcatcaatatgcgcttgatgaccgccagcgaactatacgaaaatgtcatcggccaaagcgtgcaaaccgaaaccgacgcgctaaagctgattgatagtttccacattatgctcccttttgtgcgcggctacgcactgtatctgcctgagcggggaatcgcctattccaacgatggaaaattgcaaaaaaatggcctcacccgttttgtggctggcatcactgaggctgaattggacgctatcatcgcccaaagcgacgcagtgggcagctttgtcgccctccgcgccaacaatggcaacatgctctacgtggcccccatgcgcctgggcagcgccatccaggcatcccgctatggcgtatacatcatttcttcctcgctatttcaaaactatatgcattccgcgctgacaagcgcctaccagatctattccattcgcgataaccatggcaacctcatctatcaggatgaaacactcacccaaatggacgcagcaaccagggaaagcgattatatcacctgctctgttacgggagcgcggggatacaccatcgaagtatacgcggcccaggccctgattcagcaaagcctggatagcgtagcgcaaaatgtgcatctgctggtggggatgaacgtcatcctctgcgccgtgctcatcattctggttctcttttacaattatcagccgctcgcgcggttggtgaaaaaaatcggcagccgagacgccgggagcagtgcttccgaattggattccgttttgcattcttacacagccttggcgcatgaaaaaggcaaactcaacgtggaattgtatgagaaaaacctgattctcgcggataaattgctggagaacctgctgcgcggacaggaactcaaccgcagcgatttgcgcctgctccagctccacatgccgtattatcgcgtgatttgcgcgccgctgcacaaagtgcataacatctgcgatatcatcgaacgcaacgcggttggctcgcccatctatgccattgaaatgtatatggacggcgtgttggcatttgtttgtggcctgcccgacgattcacaagccagcctggaaaagctgctggaagcgatacgcgcgttggttgccaacgcggatgtgccactgggctattcaccagcctgcgcgtcgcccgaaatgctctttgccgcctatcgcaaagcaaaggcggctcttcctgcagaagaaaactcggcaggagacgctgtgccagaaacctccgcactcctggtggacgattcgccagaaacgcaagccaagctgaccaacgccatgaaatgcggcgacgactttatggtgcgttttgccgatgcgtctcttcgtgccattgcgcagcagaattccgccgcgctccggcgctatggcctctatcaattgagcgagctatatcgcaggattgggcaaaccgtggatatgccgtttaacgcccagcgattggccggcatattgactgatgccaacgagaacgcggcgcgcgaaaacttgctttcgctcatcgcggcggcgcgcgaagaacgcgccaaactgttggagcagcaaaccagcgccatctcctatgaactcacaaaatacattggggaaaatttcacagattccctctttggcctgaacgaattggcggatcgcttcggcgtttccgtctacacggcgagccgcatggtcaaaacgctcaccggcatcaatttcaaaaaataccttggcgatttgcgcatcgaacgtgccaaagacctgctgctatccacggaaatgtccgttgcggacgtggcgcagcgctctggcttttcctccacctcgtatttcatcaaggtgttcaaggaatccgagggcacaacgcccagccgctttcgcagcgaaggctaacaaaatgaaacgcgctatccagcccgcctttggcagttttgcgccctttttctcctcttccccctactttgcatcttgccatttcgcgcaaaatgtggtatgatagcccaaaaagtgcggtgtataccgcgaaaggagaaaggcatgatttacgaccgtttggagcatattggccgctatcgtgggttgggcgcgcatttggatagagcgatcgattttctaaccaaggcggatgtggctttgctcaccgggcgcggggaaatcgatggggaccgcgtgtattatatggagcagaacccgcagttgcgcgcgttgcaagacgcaaagtgggaacggcatgagcgctatatcgacattcaaatcgccctgacagagggagaagacatctacgcctgccccatggaagacgtggaggattggagcgcattcgacgctcagaaggattgcgcgttttctgaacaaggcgcaaaaggcgcgcgcctggccatgcaaagcggcgcgttcgccatctttttcccgcacgacgcgcatatgccctgtgtgcgcgcgggcgcggcggaaaccacgcgcaaaatcgtggtaaaggtgctggcgtaaacaacagaaaggcaaagggatgccgcgggttagccaacgggtaacgcgactgcttggcggacgcaagcgcctggcagtagggttttgtggatatgctctgcaaatcttcacgctctgcctgggcgctcccccattcgctcgcctttctaagaatagcgcgcaaaaaacgttgcggaaatcgcttgccaacgcttgcaattttacatagcaaatgatatactgaactggtatgaaactagcgcaagaggtgaattgaaatgaagcatattcaaacgatccaaaagccctgcctggcccagagcgccaaaaccggcggctgcggcgaatgccaggcctcctgccagtctgcttgcaaaacgagctgcaccgtagccaaccagagctgcaagaagtaaggaaagtagctggaaaacgcgttcttcgcggcctttgccgcgaagaattttttctgaatagcaccaatttggggagaggtacaccatgctgcacacatttaaggcgctcgaccgctacatcgccatggacgcggacagcggcgcagtgcatctgctggatgaaatggcttttgatgcgctcaatgccattcaggcgggcgatgtggctccgctataccaaaaatacgatgaagccgatgtgcgcgaattgctcggcgaaattgaagagctcaaagcacagggcgcgctctttgcggaacacgattattcccacctggaaatcgaaaagagcggcatcgtgaaggccatgtgcctacacgccgcgcacgattgcaacctgcgttgcaaatattgtttcgcctccacgggcgattttcatgggccgcgcggcctgctgcccgtggaaacgggcaagcgcgcgctggattggcttgtggcgcattccggcaaccgcaaaaatttggaagtcgatttctttggcggcgagccgctgatgaatttcggcgcgctgaaagagatcgtggcctatggccgggaaatcgaaaagcgcacagggaaagttttctggtttacgaccaccaccaactgcattggcctcacagacgaagtggccgattatctaaacgaagaaatgcacaatgtcgtgctctccatagacgggcggcgggaagtacacgatttcatgcgtcccaccatcaatggcaaggggagctatgacctggtgctgaaaaacgcgctcgcctttgcgaaaaagcgcggcgataagagctattacgtgcgcggcacgttcacggcgcgcaatttggatttcgcgaacgacgtgttcgccctggccgacgcgggctttgagcagatctccatcgaaccggtggtgttgcccagcgattcgccctacgcgctcactgaggacatgttgcctaccattttcgcggaatacgaccggctcgcggcggaatacatcaagcgtcgccgggatggtcgttggttcaatttcttccactttatggtggatctcgaccacggcccctgcgtgaaaaagcgcgtgaaaggctgcggcgcgggcggcgaatatgtggccgtgacgccggaaggcgatatctatccttgccaccagttcgtggggcggccaggcttccgcatgggcagcgtgctcaatgaagaatttgataccgccatgcaaagccgctttgaggacaactgcctgctcaccaagccgcagtgttcttcctgctgggcgcgcttctattgcggcggcggctgctccgccaacgcgcaagccttcagcggcgacatccgcgtgccttattccatggaatgccagttggaaaagaagcgcctggaatgcgcgctggccatcgctgccatcgagcgcgaagccgcggcgcaatagcgtttttagagcgttggacaagggtggggcggtcaaactcctcaagccgggcatagtcctgcatcatgtcccgccaaatccattcttccttcggtttttcgatctgcttgtggttcttgtaggatgcagtgcagtcttattccgcaccatgtggccatcataaacctcgttgcggagaatggatttggccgtttcgccgctccacgactgtccccagcggctcggcttcgtccgtcccgctgcccgcccaattttttcgagggtgagcgcatcaagcagagatcccatctcggtgctgccgctataaaggcaatgtttcaaaatcttattctcaattttcaattcaaatcatctgacctgtttctgaaaacgcaatgcaccctttctctcaactcggcactaaacccatctaggtcggcagaagaaattacgccctcatatataagctgaatgaggttctcaatcatcattgaccgtctcatatccaaacatacccctgccttgttcctgtccgtttttatctgcttctccaatctccagaatttatccgatggcgcggcgctttcgcacaacagttgtatatattccttattgcgcctgtctatataggcctcctgccattcagggactttttgcctgaacaatttccaatcgttttcgttgaagttctgatgatacatgccaccactcccttataattgtctctttttctgctaacaattagtttaccatacaagaaaacgaattgcccccctaacaggccgatgcaagaaaaattattggaacaaatgctccgatgtaagcttgtcaaaaataaacgctcgtacccgacacgcctgacacaatcagtcaccgaaaacgggcgtttgggccgtatatgttggattccgcactgcttgacggtatcgccacgcttgatgcgaagttgtcatccagtggtttgtccaccggaatttccggtggctaaaatcgttaacgcgcgctcgcgggttcgagaatctcgatcagcgcgtccacatcggcctcctgtgtcgaccaggaagtcacaaaccgccatacactttccccatctcccaacggctgcgtgcgctggaactgcgcgcgcttcatcaggcgctgcgccgtatcgtcccgcatgatgggaaaaagctgattggaaacggggggatacaggaattcatatcccttggccgccaagccgcgggccaatttttgcgccatggcattggcatgcgccgccatatcgaaatacagattgtcttggaacaacgctgcgaattgcgcgcccagcagccatccctttgccagcatagcgccgcgctgtttcatgatataacggaaatcgcgcgtaagcgtgggattgacgagcaccatggcttcgccaaacaaagcgccgttcttggtgccgccaatggtaaacgcgtccgcacagcgtgcgagcgtttgcagcgaagcgccgcccgcggctatggcgctgcccatccgcgcgccgtccacgtagagcaaaagctcgttttcccggcaacacgcgccaatggcctcaatttccgcctctgtatagaccgttcccacttctgtggtgttggaaatatacaccagggcgggctttaccatatgttcgtcagcatgcgccgccagcacgatctcaatgccttcgcgcgtcactttcccatcaggggcgggaatgcccagcaccttgtggcccgtcgcctccacggctccggtttcatgcacattgatgtgccccgtttccgcgcaaatcgccgcctcatgcggccgcagcgcggcggcgatcagcagcaaattggcctgcgtgccgccgaccaaaaaatgcacctgcgcctgtggcgcgccgcacatctcccgaatgcactcggccgcggcgcggcaatcttcgtccatgccatagcccgcggtcgctcgcaggttgatggcctgcaaagcctctagcacgcgcggatgcgcgcccgtcgtataatcactggaaaagcaaagcatcattcttccacaaagcgcgcgatctccgcaaacggcttgcgctttttctcgcgcggctctttctcctctcttgcgtatcctatggcgatcaccgcgcgcacccgcgcgcccgaatttaagtttagcagttttcgcagcgcctcttcatcaaaccagccaatgatgcaggtggaaagcccctgcgccgtagccgccaggcacaaataggcaatggcaatgccggtatccgtctgcgcaaaatgctggtgcttgaatttgccgcccacaacggcggacaaattggctttttcctcgcaaactacgataaaggccgggcaacggtcggtaaatttgttcatgcccatgccttgcaggcacttggcgaccgctttggccgtgcgcgccccggttaccgccgtaaagctccagggctggctattgcacgcggacggtgccagccgcgccgcctgcatcacggcttccagcttttccttttccacgggtttttccgaaaaatcccggcaactttcccgccggagggccaattccataaaatccatattctcctcctctatcattgttctatgcttgcgtagatcaacggcggcgcaatcaccggttcctgggaaagcacaaccgcgccgcgtacaaactccgcggcggtttgggtattcgaatggctggaaacatgcaaatgggccagcggttcccccgcgtcaatccactcgccgatgcgcttggccatcacaattcccaccgccggattgatcggatcttccttgcgaatgcgccccgcgcccagcaaaagcgaagcgcggccaatttcgcttgcggttaccgattgaatataaccgctttgcgcggcgcagaccggaagcaccgcttccgcctgtggcaggagggaaacatcctctgtcacgcgcgggtcgccgcccaaagcggcgatcatctgcgccaattttttcagccccgcgccgctttccagcgcggccgtcaactttgtccttccctccggaattcccgccagcgcgagcattttcgcgccgatttccagagaaatttctttgagcgcgccgcccgcctgcccggaaagaatttctatggcttcccgcacttccaacgcgttgcccacgttcatgcccagcggctggttcatatcggtcacaagcgcgcaaaagcgcctgcccgccgcgttgccaatttccaccagcatttgcgcgagcgtcttcgcgtcctccagcgtttccatcagcgcgccgctgccgcacttcacatccaacacgatattctgcgcgccggaagcgatctttttggacaaaatggaagagacgatcagcggcatagaatccaccgtggccgtcacatcccgcagcgcgtacagcaccttatccgccggggccagatcccccgtctgcgaaatgatcgcgcaaccaatctcctccacggttcgcaaaaagcgcgtctcctccatcgcggtgcataggccgggaatggattccagcttgtccagcgtgccgcccgtgaatcccagcccgcggccggacatttttgccaccttcgcgccgcacgcggcgaccagcggcaccaaaatcagcgaagtcgtgtcccccactccgcccgtggaatgcttgtcgacggtggggccgctcaggcaagagagatccagtatgtcgccagaatgcgccatttccatggtaagacagcgggtttccgcctttgtcatcccttgaatgcaaatggccattaacaaggcggaaatctggtaatctgcaaaggttccatccaccacgccgcgcacgaacgcggcgatttctgcattggacaactcagcgcccagccgctttttgcggatgatttctacaggt

SEQ ID NO: 3793 - DNA, 16161 bp, Unknown
  16S sequences of unknown bacteria
cttaataaaaatttttataaaaaaattataacacggcgacaggaaaaagtcaaggaaatccctctcttttatttgcctgcgttttccctgcgcttttcttgaaagttgtaagatttaatgaaaacggaaatttcggtctttttccctattttttcttcctttccaatcaagccgtaaacggcggctgatatcgccgacaaaggactaaaataagtaaaggaaaaggatagagcacgcttttttggacgatttgcaataaaaatacctttccttcacaacaaattttttggctgcaaaattcttctctccattccgccctttgtccgccgcctctcttgccgacgtctgattccgcctttcatcgcctatccttcaaagccttaaaatcgcgcccgcgtcgacgcactgatgttttccctttccattattcccgccgaaaaaagttttcaagcgttcggcaacacaaaagacgtcgtttcgccgcaaaattcatcgcgcgacgcgaatgaaaaacgccccgtaaataaacggcggggcagcttgctgttttaaatgagcatatcttctacggaagattcggcggaaatgggagccgtttcctcggtcaaagaagcggtcggtttttcatagggcacggaagcggaaatttcttcggatacgcttgcctccgcgtctttataattgccgacaaattggggagaaagtcctttgtattccttcatgcccgtccctgcggggatcagcttaccgatgatgacgttctctttaaggcctacgaggtaatctctcttggtgcggatcgcggcttccgtaagcactctcgacgtttcctggaaggacgccgccgaaaggaagctgtccgtggcgagggacgccttcgtgatgccgaggagcaccctcttggcaagcgcgggagcgccgcccttttgcatcgctttggcgcactcgtcctggaaagtgaccatatccacgagttcgccgggaagcagatcggtatcgcccgaactctccaccctgacttttttgagcatctggcgcacgataatttcgatatgcttatcgttgatatccacgccctgggaacgatagacggactgaacctgttcgaggaggtaatcctgtacgcccttgacgccctgcacgcgcagaatatcctgaggatagacgctgcccgtgttgagaagtaccccggggaccactttatcccctttcttgaccttgatttcggcattgaagggaagcgagtattccttcttgacttccttcgtcgcctcgtcgaggatcttgatatgcttggagccgtcgctgtcgtcgagatcaatgatgccctcgacttcgcagatcgtcgcgcagcccttgggttttctgacttcgaacaactcctcgacgcggggcagaccttgcgtaatgtcccccgtcgccgcgataccgcccgtatggaaggtacgcatggtgagctgggtgcccggttcgccgatggactgcgcggcgatcgtgccgaccgcttcgcccacctgcacgggaagcgtggtagccatatttttgccataacatttcgcgcagacgccgaaacgggagttacaggtgaagatactgcggatggaaacttccgaaatgcccgcgtcgcaaatctctttggcgagctcctcggtgataaactcgttctgtcccaccatgatctcgcccgtcgcgggattgacgacgttttccgccgcgaaacgccccgtcagtctgtctttcagaccttcaatctctctgccgtcgctgccgaaaatcgcccgcaccttcatgccctgcggttttctgcccgcatagcagtcgtcctcgcggacgatgatctcgtgcgaaacgtcgacaagacggcgggtgagatatcccgagtcggctgttttcaaagcggtatccgtcaaacctttacggccgccgtgcgaggaaatgaagtattcgagaacggaaaggccgtttctgaaacacgatttcacggggacctcgatctttttaccctgagggttgaccatgagtccgcgcataccggaaagctgtttgatctggtcgatagagccgcgggcgccggaatccgccatcatccagatggggttgaacttatcttcttcgccctgctttttgaggagtcccgccactttatccgtcgcggtatcccactgcgagataacggcgaggtatctctcctcttcgttcaaaagacctctggcgtatttcttggagatcttggaaacttccgcttccgcgttgttgacgatgtcttccttttcaggaggaatcttcatatcgaaaacggaggtggtaagcgccgccaaagtggaatacttataccctctctccttgatggcgtcgaggacataggaggccttgggcgccgcgcccgtcttgaagcaggcttcgacgatacgggagagatgtttctttccgatcgcgcgcgcgctgccgataaactcggtgtcgagttcgagtctgagataggattcgggcgtatctctcttgacgaagccgagatcctgcggcagaccgtcgttgtagatcagacggccgatggtcgtcttgatgatgccgctcacctcgcgcctgcccgttttgggattgaggcgcaccgtcgcttccttgatcagcaccgctttcttttcgtcgaaatcagtgttgtcgatcgggcaggtatacggcaaaggcagatcgtcgaacttgccctcgggaagttccacgacgcgctttaaatacatttcgtcctgctcgtgcgcggctttggtctgatacgccaaaatcgcctcgttttcggacgagtacacgggcgggatatagacctccccgtcgtcgtcgggacgaccctgatcgtcatatcttctaccctcttcacagcgcttgatggtaagacagtacgcgccgataatcatatcctgcgtcggggacatgaccgatttgccgtcggcaagtttcaaaatattattggcggaaagcatcaaaaatctcgcttccgcctgcgcttcgatgctcaaaggaaggtgcacggccatttggtcgccgtcgaagtccgcgttgaaaggtccgcagacgagcggggagatcttaatggctctgccttcgatcagaacgggctcgaacgcctgaatggaaagcctgtgcagcgtgggagcgcggtttaaaagtacgggatgatccttgatgacgtcttcgaggacgttccagaccatatccttcgccttttccacggcgcgcttcgccgtcttgatgttgtggcactgcccgctctccaccagccgcttcatgatgaacggcttgaacagttcgatcgccatttccttgggcagaccgcactgataaattttcaactcgggaccgacgacgataaccgaacgtcccgaatagtccactcgcttgccgagcaggttctgacggaaacgcccctgcttgccgcgaagcattcccgaaagggatttgagttcgcgattggaaggtccgctcaggggctttcctctcctgccgttgtcgataagcgcgtccacggcttcctgcaacatacgcttctcgttcttgatgatcatgtcgggcgcgccgatctccatcatctttttcagacggttgttgcggttgatgacgcggcgatagaggtcgttcaaatcggaggaggcgaatctgccgccgtccagctgcaccatgggacgaatgtcggggggaatgacgggcagaacggtgagaatcatccattcgggacgattgccgctctttcggaaagattccaccacttcgaggcgtttgatcgccttgatcgccttttgtcccgtggggttgtcggcgatgactttcttgcaggcgtcgctctctttttcgagatctaccgccatcaaaagctcgcgcacggactccgcgcccatgcccactttgagtcccgttgcggcgctgtcgccgtagcgctcttcgagttcccgaagctgcttgtcgttgatcacctgcttgtagacgagctcggtgactttgccgggatcgagcacgacgtaggaagcgaaatagatgacctgttcgagctgtttgggtcccatgtcgagaaggaggccgattttggagggcacgcctttaaagtaccagatatgggaaacgggagccgccagttcgatatgtcccatcctttcgcggcggactttggagcgggtgatttccacgccgcacttttcgcagatgtgtcccttgtattttactcttttatattttccgcagtggcattcccagtccttcatcggcccgaagatcttttcgcaaaaaaggccgtccctctcgggcttttgagtgcggtagtttatcgtttcgggtttggtaacttcgccgtacgaccattctctgattttttcgggagatgctatgctgatctgaatggaattgaaatcgtttaattcgtacatattattttttctctcctcggattaatccttgtcgccgtcctcgccgtcttcgtcctcgtcgtcgaacagagaaccgaagttgaaatcgtcgctgatatcggcaaagtcgtcgtcctctccgtcgccgtcggcagagaaatcgtcgccgtcgtccccttcctcttcgaagagggacacttcgccgtccagatcgtcctcgtcgtcttcgtcgtcggcgttgaagtcgatgtcttccagctcttcgtctttgaggctttctcttctcctcgcttcgttgtcggaggcttcttcctcgtcctcgaattcgcggatgatcagctcgtcgccgctttccgtcagcactttgacgtcgagcgcgagcgactgaagctctttcaagagcactttaaaggcttcgggaatccccggctcggagatgttttcgcccttgacgatggattcgtacgtcttgacgcggccgactacgtcgtccgatttgaccgtcagaatttcctgcaaaatatgcgccgcgccgtaagcttccagcgcccacacttccatttcgccgaagcgctgaccgccgaactgcgccttgccgccgagaggctgctgcgtcacgaggctgtaagggccgatcgaacgcgcgtggatcttgtcgtccacgaggtggatgagtttgatcatatactgaacgccgatggtgacgcggttttcaaaggcttcgccggtgcgcccgtcgaatacctggaatttgccgtccacttttccgtcgggattcagaaggttgttttcgcggaacatctgctcgatgtctttttccgtcgcgccgtcgaaaacgggcgtggcgatcttccatccgagctgtttgcacacgtagccgaggtgcacttcgagcacctgaccgatattcatacgcgaaggaacgcccagggggttgagcaagatctgcaagggagtgccgtccgcgaggaagggcatatccgcctgcgacagcacacgggaaatgacacccttattgccgtgacgacccgccatcttgtcgcccacctgaattttgcgcttctgcgcgatatagacgcggacgagtttgtttacgcccggttcgagttcgtctttattctctctcgtgaacactttgacgtccacgacgacgccgccttcgccgtgcggaacgcggagggaggtatctctgacctctctcgacttttcgccgaaaatggcgcgcagcagtctttcttcgggcgtaagctccgtttcgcccttgggggaaactttgccgacgagaatatcgccgctctgcacttccgcgccgatgcgcacgatgccttcctcgtcgagatctttcagcgcgtcgtcgcccacgttgggaatatcgcgcgtgatctcttcctgcccgagtttggtatcccttgcctccgtttcgtgttcctcgatgtgaatggaggtgaacacgtcgtcctggacgagcttttcggaaagcaggatggcgtcctcgtagttgtagccctcccactccatatagccgatgaggatatttttgccgagcgcgagctcgccgttattggtggagggaccgtcggcgatgatctcgcccttcgccacgcgatcgcccgtcgaaacgatggggcgctgattgaggcaggtgccttgattggaacgctcgaatttctttaagggatattccctgactttgccgtcgtcctcgcggatcttgatcatattcgaagaacagttcgtcacgacgcccgcttccttggccatgacgatgacgcccgaatctttggcgatggaggcttcgatgcccgtcgcgacgatagacgactccgttttcagaaggggcacggcctgccgctgcatattggaccccatgagcgcgcggttggtatcgtcgttttcgaggaagggaatgagcgcggtcgccacggaaacgagctgtttgggcgaaacgtccatgtagtccattttttctctcggaagttcggtgatgagatcctgatggcggcagccgacgcgctcgttgacgaagcgtccctccgcgtccagaggctcgttcgcctgcgcgacgatatatctgtcctcttcgtccgccgtgaggtagtccacgtggtcggtgacgatgcccgtgtccttatccacgcggcggtacgggctcatgatgaagccgtattcgttcaccttcgcaaacgtcgccagcgaggagataagccctatgttctgtccttcgggcgtttctatgggacacattctgccgtaatgggtatgatgaatgtcgcggacttcgaacgtggcgcggtcgcggttcaagcccccggggccgagcgcggagagctttctcttatgcgtgagttccgcgatgggattggtctgatccatgaactgcgaaagctgcgaggaaccgaaaaattccctgatgaccgcggacacggggcggatgttgatgagtcccgacggcgtgatctccatgggatcctgcgtcgccattctctccttgatgagccgctccaagcgggcgatgcctacgcgcagctgattttgcaggagctctcccaccgaacgaacgcggcggttgcccaaatggtcgatattgtctatcgtgccgatgccgtatttcagatcgagattggtggagatggaagctacgatgtcgtccacggtgatgtgcttgtggcacagcttatccgcgagcgggcggatctccttcttttcctctttggtgggaacggggttttcgcgcgagaggacggcgtggaaggtcttgcacgcctgcacgaatttgcggcggttgtcgcggcgcttttcgcggtttttcttctcttcctgcttctcgtccgcctcttcgggcttctcctgcgtatagtaaagcgcgtcgagcgcgtcgacgtatttttccgccacttcttccacggtcatctccgcgcagtccgcggcgatcactttggaaaatctgtaattcggataataaatggtgggcaaaagcccgaaatccttggcgcgcgcctgtaagggaatgtcggaaaccgccgagaaatccaccgtgttattggcgatgatcttgtgcttgatctctccctcttccgcgtcgtccacgagcacgaacacttcgtttacgcccgcattctgaatttccttagcctgcgcctcggaaatcttttcgcccgcctgtacgatgatctcccccgtttcgggattgacgatgggctcggacgccttgcagccgggaaggcgataggcgaggttgagctttttattgtacttgtatctgcccactttggcgatgtcgtagcggcggggatcgaagaacaggttataaaggtgctgacggacggagtcctccgtggggacttcgccgggacgaagacgcctgtaaagttcgataaggccgtccacttccgagcgcgtcgtatcctttttcagagtttcggagatgatcttgtcgccggggaacaaatcctctatcgcgcggttggagccgaagcccaaagcgcgcagaagcacggtgatgcagagtttcttttttctgtccacgcggacgtagagagcgtcctgcgcgtcctgttcgagttccagccacgcgccgcggttgggcatgacggtggtggcgaacatctccttgcccgtcttgtccttcgaagaagcgttatacacgcccggggaacggacgagctgagaaacgatgacgcgctccgcgccgttgatgatgaaggagccgttttccgtcatcaggggcagatcccccatgaaaacttcctggtcgagcacttcgtttttcaccttgttgacaaggcggaccttcactctcaaaggaagcgcataggtggcgtcgcggttgcggcattctttttcgtcatacttgggtttatcgccgaatctgtgctccaaaaagtagagctcgaagtggtcggagtagtcggtgatcggggagaagtcctcgaacacctcgctgatgccttcctgaatgaaagaattgtaactgtccttctggatttccacgaggtcgggaatatcgatgacttcgttgatggaaccgaattttcttctttcatttttgccatacttatagataggtaaatccatcggttaatttgtagctccttacattattttaaaggcgatttaccgagtatatcttttcatcgataaaaatcgaatttttacttcttttggcatcgttcgctttacttttccgctttcttacgctataataatgacgtgaagcgcccccgaaacaggtttttcgttcccccgccgcgcgaaggccgaggggacaatattccatagtaagcataatgatacattatttaattataacggtgaaaataaaagatgtcaagcgatttttgctttccttcggcaactaattttttttatttttcaaaaacgacaaaacaggacaatatctcatgagaatcgacaaatttttaaaagtttccagaatactcaaacgccgcaccgtcgcgcaggaagcctgcggcgaggacaaagtgctgatcaacggcaaaacggcaaagccctccgcgcccgtcaaaatcggcgacgtcgtggaagttctgtacgcgtcgggaagccttaaattccgagttctgaacgtgaaagaaacggtgaaaaaggacgaggcggcgtccctgtacgaggtgatctcttgaactcggcgggcagcgtccgcgtcaccgcgatcgtctgcgcggcgggaaaaggcgaacgcgcgggattttccgaaaacaagcttctgcaaaaaatcggcggaaagaccgtgctggaacgtacgctctccgctttcgattttcccgcggtgaaagagattctcgtaacggcgtccgaggaggattttgcaaagatagcggctctctgcgcccgctttccccgcgcgcgcgcgatttcgggcggcgtcgcgcgtttcgactccgtctacaacgccctgcgggaagcgaaaaacgaggtggtgctggttcacgacggcgcccgccccttcgtcgcgctccaagatattttagggtgtattgcaagcgtgctcgaatacggcagcggcgtctgcgccgtaccttgcgtggacaccgtcgccctcgcggacgaaacgggacgcatcgtcgaggtccccccgcgcgagcgcgccttctccgtacagaccccgcagggcttttatacgaaagagctgctctccgcttatgaaaaggcggcgaaggataaaaaacgaacgtatacggacgattcctccgtatacgccgcattcatcgcgccccctcgtatctgcgcgggcgcgcacggcaataagaaattgactttccgggaggatttcgaagactctttcgcaagagtcggtttcggcgtggatacgcacgcgttcggcagagaacaggactatattttgctcgcgggcgtaaaaattccttccgggagcggtttaaaggcgcacagcgacggggacgtgctcgcgcacgccgtcatggacgccatgctctccgccgcgggactcaaagacatcgggcattattttcccgacagcgacgagaaatggcggaatgcggactcgatgaaaatgctggaagaagtcaaaaggctcgtcgcagacgaaggcttcgccgtcaagaatctttccgcggcgatacaggcggaaagacctcgcctcgccgcctatatagacggcatcagaaattctttggcaacggctctccggctcgatccttccgccgtcggcatttccgcgggcaccaacgaagggctcggctacataggcgaaggcaggggcatcaccgtaaccgccgaagtattgctttgccgaccgaacgcgattgtcttttaacggtgttatacgagaagaaagcgcattgtaatttttcccgtccggcaaaccgaatgttttttccataggcgaaagcgtaggacaaatccgcgcgatttttactcgccgctgccctgccccgtccttttttacatacctcaaaggagtttaccgatatggcaatcaaagcgcccgcctcgcagttcgtctgcgcggaatgcggctacaccactcccaaatggctgggcaaatgtccgggctgcgggaatttcaacaccttgcaggaagaactcgtcaagaccgcggacgcgggcaaaaaagccgcccgtcccgcgctttcggatatgggcggcttttccaaagcgctccccctttccaaagtgggctatgaaaaattcaaacgcgtttcttcgggcatcggggaattcgacaccgtcctcggcggaggcatcgtgcgcggctccctcgttctgctcggcggcgatccgggcatcggcaaaagcaccctgttgacgcaggtttcggcgcacctcgcgggcgggcacaaagtcctctacgtttccgcggaagagagttgttcgcaggtgaaaatgcgctgcgaacggctcggcatcgattcggacaacctgcttttgctcaacgaaacctgcctcgaagacgtggaggcaagccttgcggacgcggaattcgtcgtcatcgactccattcaggcggtatacaccgaggccctttcctccgcttcagggagcgtgggacaggtgcgcgaatgcgccgcgcggctgatgcggatcgcaaaatcccggggaatcacctttttcctcatcgggcacgtcaccaaggaaggcgctttggcggggccgaaggttttggagcacatcatggacaccgtactctacttcgagggacagcaggaggaaaatttcaaacttctgcgcgccgtcaaaaatcgcttcggctccgtgcaggaagtgggcgtattcgagatgaccgaaacgggaatcaggagcgtgtccgactactccgatctgtttttgtccgaaagccgcggcgtcgcggcaggctcggcggtgacgccctccgaaagcggcaaccgctgcatgaacgtggaaatacagaccttaatctctaaaacggcgtacggactgccccgcagaatgaccttgggaatcgattataataagctggtggtgctgatcgccgtcctcgaaaagcgctgcgggattcccttttacacgtccgacgtgtatatcaacgcgatgggcggcatcaagctcaacgagccgtcggtcgatctcgcggtatgcgcggcgctggcaagcgcggcgagcgatattcccatagacaaatacaccgccgtattcggagaggtgggtttgacgggggaagtacgctcagtgacgtatgcggaaaagcgcgtcaacgaatgcgtcaagacggggttcaaaacggtggttcttcccgcgaaaaatatgaagacctgcgaaaaattcaaagacaggatacagctcgtgcccgtcaattacgtcaatcagatggtgaaggcgctgaatctgcgcgcccctttcaatccgcaggcttgacctctttcaagcggcgctctatgacggcgggcaatttttccgcaaaagcattcgcggctcttatccctcttttaaaaacgaaatacgatcccttaatgccgtaaaaaatctttctcggcaagacgagtacaaaaacgcgattccttgcgccatagcagccatcaacgccgtaagggagcgaaaaatcaacgtcaaaaaactttcttcggcataaaagcgcaatttattttcccccgattgtccatgtttgcccggttaaagttcccccgaaaagcagtgccttctcagcggtttggcataataaagaagaatacgcgcgtaaaaacaagcccgacgccttacaagcgtcgggctttaagatagtcagttttcgctttcctccgcttctttttcccgctctttttttcgttcttttttcaagcggcgcagattctgctttccgtatttgatcaattgtttgaaacaatctttaaaaaacgactgagagtcttcgtccaaagcgcgaaaacgcttctttgcttcgcgcacgttgtgcatgggtttcgcccgataatccacgacggtgacgccgtcgtccgcccccaaaatataaaagagcagatcgacaaaacgcggacgattttcctgcatggattctatccaagtgctcaacgtaacgccgagaaattccgactgtgcggacttggaggaaacgcttttgaaagcgccgtctttcccgatcgcccaattataaggatcgtgctgcaaaataaccagaccgcggcacttcaccacctttacttcctcggcgtgaatcagcagcattcccaccatatcgtcgcttggaatgatcttatgcacgcgttctctgagctttgcgtaactctccgtattgaaaacatcggtacggaagccgggaccgtcgtgattgaatacccccgcaatccgttcccgcgcgccgtcctgacaattcatagcggcgtacatggcgagattcccgcccttggagtgtccgccgatatagatctttccctccgtcagcgccgccacttcgttgacgtatctcaccgcttccgcctgcgcgggcacttcgtcgagataagacatattgaaatcctctttccagccgagaagggtcagatcggtgccgcggaagcaaatgtgcagcccctcgccgggcaaaagacaggtgacggcggcgaactgttcgataatcccgtcgtccgtgacgtcgcgcagataatgcagccgcatctctttaaagcgcgggcaggcggcaagcaagcgccacaatttccgattgagcttgggatccatcgtattgacgacgagtcgattgagcacaaattccgattgcaggcgtccgattcccaccgagtctttttcttcgcccaatgcgggaacgaccccgtcgaacatcatatacgacatcgcggacaaaatcaaactgtccacatcggaaaagggtctttcttcaaaagtacagtgtccgaatttttttaaataatataaaatgtttttcatagggaatcttctcttttgctaagatggcgaaaaatttatattcggcaggaacatacattcctgccgagcgaaactccgaagcgaaacgcgccgtaaaagacgccttcattattttttcagaagcttataaatcctgtcgcaggcttctttcgtcgcttccctgctgccgaacgccgtcaaacggaaatacccttcgccgttggcgccgaagccgctgcccggagtgcccacgacctgcgcgttttccaagagataatcgaaaaattcccagctcttcatcccgttcggacatttcagccagacatagggggaatttttcccgcccgtatagaaaagcccgcatttttccatacattcgacgatcaatcgcgcgttttcgcggtaatattcgagattggcgagtatctgtttttcgcccgccggagtgaataccgccgccgcgcctttctgaacgagataagaaacgccgttcgtcttggtggactgtctgcgaaaccacatttcctttaaggataccccgtttcttttcaaagcggcgggaaccacggtgtagccgcatctcgtccccgtaaagcccgccgtcttggagaacgagcaaagctctatggcgcagttttccgcgccttccgcctcgtaaatgctgcgcgcggcgtcgccctgcgcaaaacattcgtatgcggcgtcatagaggatgacggcgtctttcttcctcgcgtactccacccatttttccagctgttttttcgtgtaagccgcgcccgtgggattattaggggaacaaagatagacgatatccgcgtccacgctgtcgtcgggcatgggcaaaaaaccgttctcctccgtcgcggaggcgtaaacgatcttcctgcccgccatgatattgctgtctacgtacacgggatacacggggtcgggcaccagcacggtattgtcccgatcgaaaatttccaaaaggttgccgcaatcggacttggcgccgtcggaaacgaaaatgtcttccgccgccaccttgacgccgtggcgggcataatacgcccgaatgttctcgcgcaaaaaatcgtagccctcataggggccgtaccccttaaaggtgtccttaacgcccatttccgccgcggcttcgtgcatcgccgcgaccaccgcgggcgcaagcggaagcgtcacgtccccgatgctcagtttgatcacctttttttcgggatgcgcggcgacgtactccgccgacttctgcgccaccgtcgcaaacaagtaactctcctgcaaattgaaataattttcgttgagtttcataaaaacctcgctctcctttctctttcgccttcgcaaaaggcgcctttctccatacggggcgtccgaaaaggcggccgccgtttgcgcgctccccgcctgaaaagaaagacccgttctcttttcccgcaggcggaagtttatctttcgcttctcttttccatatacttgaccgcgctcttgataaattcgcggaaaataggctgcgcgccgttaggacgggatttgaattcgggatggaactgcacgccgatgtagaagtcgtccgcaggatattcgatggcttcgcacaaatgcccgtcgggggaagtgcccgcgatcatcatcccgttctcctcgaattgctttcggtaatcgttgttgaactcaaaacgatggcgatggcgctccgcgacctcttctctgcccgaataggcgcgcttcataatgggtccgatcaccttgcagggataagcgcccagccgcatggtgccgcccattttcacgccgtactgatccggcatcaaatcgatgacgcgatggacgctttcgggatcgaattcggaagaattggcgtcgcggtaccccagaacgttgcgggcgaattcgatcgccgcaatctgcatacccagacaaatcccgaaataagggacgttcttttcgcgggcgtactgcgccgccagaatcatgccttcgatgccgcggttgccgaagcccccgggaacgatgatgccgtctgcgacgccgagtttttcctcgacgttctccttggtgaggaactccgtgtccacccattcgatctccactttcgcttcgttttcgtagccgccgtgggcgagcgcttccgccaccgagagatacgcgtcgtgcagctgcacgtatttgccgcagagcgctatcttcaccgtcttgctgcgcgcgtgaacgcgggagagcatctccacccactccgtcatatctatcttcttcggatcgagatgcaggatcttgcacaccaccgtggagaagttgctcttttccagcatcagcggcgcttcgtacagcacgggcacggtgaggttctcgatacaacattcaggctccacgttgcagaacatggcgatcttgtccttgacatattggggcatcggctgatcgacgcgcgccatgatgatgtcgggcgtgatgcccatgccttggagctctttgacggaatgctgcgtgggcttggatttaaattcgtccgagccggaaatgtacggcaccaaagtgacgtggataaagcagcaattctctctgccgacctcccgcgccacctgacggatcgcctcgatgaagggctgactctctatatcgcccgtcgtgccgccgatctccgtgatgacgacgtccgcgttggacgtcttgcctacgttatagataaaggtctttatctcgttggtgacgtgcggaatcacctgcaccgtcttgccgagatattccccgctcctttccttgttgaggacgttccaatacaccttacccgtcgtaaggttggaatatttattgagattttcgtcgatgaacctttcgtaatgtccgaggtcgaggtcggtttccgccccgtcttccgtgacgaacacctcgccgtgctgaaaggggctcatcgtgccggggtcgatattgatatagg

SEQ ID NO: 3794 - DNA, 3963 bp, Unknown
  16S sequences of unknown bacteria
ccgctttgaagagccttgccgtcgtgcatcatggcctctatggtataggtggcctcggctccggcgaatttttccttgtcggttttctggccctttacaacgtcgatggcaagtgcgtcgcggcaaaaatcggcataaacgttaagcatacgttcggtttcttccttggcttcttccgccgtttcgtgcatggtgtggccttcctgccaaagaaattcggtggtgcggaggaagggacgagtggtcttttcccaacgcacaacgctgcaccattgattgtagagcttgggcagatcgcggtaggaatgtattatgttggcataatgctcgcagaaaagagtttcggaagtgggtcgaacgcaaagacgttctgaaagctcctcttcgccgccgtgggtaacccatgcaacctcgggagcaaagccctcgacatgatccttttctctctgaagaaggctttcgggaataaacatgggcatcatgacgttttcgtggccgagagccttgaatcgcgcgtcgagatccttttgaatgttttcccaaattgcatagccgtagggtctgattatcatgcagcccttaagagaggaatactcggcaagctctgcctttcttacaacatcggtataccattttgcaaaatccacgtccatggatgttatttcttttaccattttcttttgatctgccatttatttttccgcctcattaaaaagtatatagctccattatattgtatttcaacgaatttttcaatagaaattttaaacaaaaggcggaagaaaacaaattcttccgcctgaaaattattcgctgagcgctcgcttaagccaaatggcgccgagatcgagagcttcgtaaagaccgtctttttcgcttgactttataatacggtccttggggctcatgttgtcgtcggtgtgaatgagcgaaacggccaccttgtcggcaacctcgaggtcgtcaacctttttggaacttttaatttccatttttatgacgtatttatcggtcatgttgccgtagtaaaccgtctttccgtttctgacgagcggacggtttttatacataagaaaatctttgctttctggcatggaatcccctccggttattttgtgatatagtttttaacaagcgccgaaagcagttcgtcgcggtctatgcggcggataaggcttctggcattgttatatgtcgtgatgtaagtcgggtcctccgacagtatataaccaacgatttgattgatagggttgtatcccttttcgctcagtgcctcatataccgaacagagaatccttttcatctcggcctcgctgtcgttgttaatggaaaaagtgatggtctgatttttgtcctgcatattaacacctccgttaaatataatatactacaaagaccgtataaattcaagcttttttatgctctgagcacggctccgatttttgaaagcgcgtcgataaccttatttaccacatcggtgcattcttcatcggtgagcgtgcggtcgggagcgcgaagcacgagagaataggccacgctctttttgtcggcggaaatgcggtcgccctcatagacgtcaaagagcttgacatcctctataatgccgctcttgaccgaacgaatggccttttccagctgtgcggcgggagtggctctgtcgcagacaagagacaaatcgcgggtgacggcggggaatttgggcaggggagtgtagacaggctgcggtttgcgggccgaatagagggtgtcgagggaaatctcggcggtgtagactcttgtgtcgataccgtattttgccgaaatttcgggatgaatttcaccgaatacggcaaccgtattgccttcgaaaacagcctttgcctgacggccggggtggagataaacctcagccgaacgctcatattcgggagaaattccgaacagagcaaaaacatcctccacagcgcccttaagcgtgaagaaatcctcgtccttgccgtaaagtccgatgcaaagggctggtttttcgtcgggctgctccttaagcggaagctccttcgggatgaacagcttgctgatttcgaaaagccgtgcgctttcgttcttgcggctgacattggtggaaataacggtgagcatgcttgtaatcaactgcgtgcgcaggcaggaatattcgtcgccgagggggttaagaattctgatgcatttacggcggctgtcgttttcgtcaagtccgagtgtgtcgatggcaccgcttgaaataaaggaataggtggatatttctctcatggcctgtccgcaaaggagcgccttaagcttgttttccttttggcgtgcggggagaatcttaccctgcacaacatcgcctctcatgaccgttccgacaatatggtcatagccgtaaattctcatgacctcctcggcaagatcggcgcgcccttcgacgtcgtcgcggaaggacggcacgcggcaggtcagaacattgtttgcgtcaatggaggtttcgatgtggagactgttgagtatttccaccattttttcaaagggaacctcaacgccgagaagatcgttgatacgttcggcgggaacggtcagcaccttcggggagggaagtccttggtttttgtcaataactccgtcgataatgtcgccggcgtcaagatcgtttataagctggagagcgcgttccatggcgaattcgacgttcataatgtcaagtccgcgttcgaaacgtgcgctcgattcggttctcatgccgagagctcttgcggttcttctgacgctgtcgcggcggaattttgcgctttcaaggaaaagctcggtggtatcgtccttgatctcgctgtcaagtccgcccatgattcccgcaaggcaggagggagctttttcgtctgctataaccagcatttcctttgtcagcttgtgctccttgccgtcgagggttgtgatttcctcgccgtcctttgcgcggcggacgatgatgtggttgtctcttatgtcgcggcggtcaaaggcgtgcatgggttgaccggtttcgagcataacaaaattggtaatgtcgacaatgttgttgatgggtctcatgccggctgctttaaggcagcgtttcatccagtcgggtgactctttaatgcggatgtttctgaccacgcggccgtagtaacgattgcaaaggtcgtaatcctccacatctatttttatataatcgtttatgtctccgccgacggttttataggcgggaacaggtgggtggaagggttttcccagcacaaccgacacctcgcgcgcgacgccgagaacactttggcaatcgggacggttggcggttattttaaagtcgattacatagtcgaaaagatgaagcacctcacgcatatcggcccccacgggagtgtcgtctttaagtataagaattccgtatacctcggcgcctttgtaatcttcttccttaaggcaaagttcctcgcccgagcagagcataccgttggactccactcctctgagcttgcctttctttatgtcgactccgttaggaagatgagagccgtgaagagcgaccggaacgacggcaccttcgaaaatattgtccgctccggtgactatctgtatattttcaccggttcccacgtcgatttgacaaatttgaagcttgtcggcgtcgggatgcttttcaatttttacaattttaccggcaaccacatttttcatggtttgagaaaggtcaacaatgctttcgacttcaaagccggccataaccattttgtcgcaaagctcctgaaccggaacgtcgatgtcgacgtagtattttaaccaattaagcgaaatattcattttaaaacctcctgttagtcgtcaaattgagaaagaaaacgtacatcgttttcaaagagcaggcgaatgtcgcttattttatatcttgtggtggtaagacggtcaagaccgataccgaaggcaaagcccgaatattcctccgggtcgattccg

SEQ ID NO: 3795 - DNA, 32759 bp, Unknown
  16S sequences of unknown bacteria
aaaatcaaagaaaggggaaagttaaaatgacagtttcaaagtttttcaaagaagcagcacacagctttgcaaataaagttgtaaataactaattaagaataaaaaggaaaaatcgaaaggagctacgatggctgtacaaatgattatcaaaaatgccgatacagagaaaaaggtagtcggcaagaagaatattattgacgaaatcaacggggtagagagaaccggcgattgtgaaacaccactttgcagaaagcgcgtcgcaggctctaacaacaagattttgttaataaaataatggaaaataataccgaatattgaaacaggattgaagtttgaagttcaatcctgtttttgttttggtttattttataatttgcctgtgacggttgcaaaacagcgattttaaagttcggcaatacctttttaacggcaaaattattgttaaaataaattgtttatatcaagtttcggcaagttatgactggctgtttggctttgaaaaaattgcggctataagggcaaaaatcaggcttgccccgactccgccggcgcaggctgtaaaactgccggtaaaaatgcctataagtccttcggtttctatggcgttttccattcccacggcaagggtgtgcccaaagcctacaataggtaccaaagcaccggcaccggcaaaatcggcaataggtttccaaatacccagagccgataaaataacccctaaaaccacaaatcccactaaaatttttgcgggggtaagttttgttaaatcaattaaaagctgacctgccgtgcaaattaagccgcctataacaaatgcttttaaatatatcattattatttctcctttgaaatttccaccaaatgagctatagacggtatgctttccttctgcattgtggttgtggggctcagcattgcaccggtggcaacaaacagtacctttttgtaccgtccgcttatcaatttcggcaaaatatagcttgccaatacacagccggaacagccccgccctgaccgaccgctttgtacattttgtttttctttgtcaaaaataagcaagccgcagtcattgtgattttttagttggattttgtattcctttaacattaaatcttttaacagatcactgcctacggcgcctaagtcaccggtaaaaataccgtcataatcctccggtcttttgccggtttcaatgaaaaaatcacctatggtttttgctgcggcaggtgccatccgagcccccatattattggcgtcggtaactcctaaatccacaatttgcccaaaactgacagatgtgataaaaggcccttttcccacaggctccaaaaatgcgtgagccgacccggtaactgtccactgagcagtgggagttcgtttgccgccgtagtcaaggggagtgcggaactgcctttccgccgtgcaaaagtggctgcttgcccctacaagagcgttggcaacggcaccccgagacactaaaacagagcctaccgccaaactttgtgccattgtggcacaggcggtgtattgccccaaaaaaggcatggaaatatctcgatacgcaaaagccgttgaggttatttgatcgcacaaatctccgcctatggcaacggccacatcattttcgttgatgtttctctttgaaaacaaccggcgaattgagcgcttttgcatttccgtttcggccttttcccagcttttcataccgaagtaatcgtcacggcaaatttcatcaaatccggcagacagaggcccgtctccctcctttttgcctcccacacaactgaaagcggttatcgcaacgggattttttaaagttattacttttttcattgcgttcacctcatatagggttttataaagtacaaaaacaggccgtaaattaccgatgcgacggtgccgtaaacaataaccggcccggcgattataaacatttttgcccctacgccggttatcatgccttcggctttaaattccattgcagggcttacaaccgcatttgcaaacccggttatgggtaccaatgtgcctgcgccggcacgctttgccagtttgccgtatttgcctgtggcagtcagaaaagccgaaattgccaccaaagtaacgcttgccaacagtcttgcatcgcttattataaagcctctgcttttataaaaggcataaagggcttcccctaaaacgcaaattgcgccaccaatgcaaaatgcccaccggcaattttttgcaacatggctgccggggctgcgttcttttaccatctttgaatatttgtttttatctgttttcaaaaatgtcactcccgttttataatataaaattgataattcttttatattttggggtatatataaagttttatacacataaaagcgtcaaattatggatatttgtataaattttacttgttaatttaaaacccggttgttatagtagaaaaaaacggcgatgaaatttttaccgatttgcctgacagacagcctaaaaaaacagttgaagatctggtgcttttggctttgaaaacagctgctcacgctgaataaaaagcaaattaaagggatttttcgatattaaatttaaaaggtaacacttaaccgaaagtgttaccttttacttttgcaaagaatttgaatatgtaccccttaaaaggggataaatcatctttttacaaatgtggagcaaacagcgccgccggacatattgtttattgaaacattgtctgcacggcaaacggaattatggttgtacatacattcccgagcagagcaggaaatatccaaccgacggttaggttctgtataggccatgttgttttcgtcccctttttccgaatagctggaacaacaggtttcgtcacaacaacaagcgtctttgccgcttaccgcaatgtttgatttgcaacacatattgtctttgtgatttgcacaggagtgaacgctgcatttaagttctgtcataattttaattcctcgctttcaattatattatttgcgtaaaaacgcaaaatattcaccggggataagcaataatcaaaaggggatattgccgtaggtcataaaatgataagatttagacagaatttaaaacaaaacaaaaccgattcccattaaaaagagaaaccggtttgttatttaaaatttgatttttgtcttagatgcgactttttgtactgtctgcagaattttgggcagttcgttttttagatttaaaatttacaggcgcagacctttaatatcttttacacgggataaaataatattgcagctgcaacttataacgccgggcaacgggtcaataacattgtgtaaaaattcttccatttcttccccggaggaagcaacggcgtgaacatgtaatttatctttgccggttacacggtaaatttgcgtaaccgtccggttgttatttaaaatttccgtaacctgcggcaggtaatccggggcggtttcaatttcaaaatagcaggatatcgccccgcttattttttggggatttataatggttgtgtattcttctataatgcctttttgttccatggcctgtattcttgcttttaccgcaaccctggaaatacccaccttttcccctatgtccgaataggaaatacgggcattttctatcagcagttcaactattttttgatccaatttatccaagccgtctaagtacataataaaacctcttaaatattttatataataatatcatttataatttaaaaagtaaatccaatgttgacttaaaacaaagcaggtgttataattcttacaaaacgaaagattaaacttacatttcggaggcatatcaatgaaccgtgatttaacaaaaggccctgttataaaatctatgttgctgtttgccatacctatgattttaggggatcttcttcaacagtgctataacatagccgacacccttattgtggggcagttcttgggcaaaaccgctcttgcggcggtaggttcctcatttacgcttatgacatttttaacatcaataattttgggtctgtgtatgggcagcggggcgctgttttcaatccgtttcggccggcaggacgaaaaaggactgagagaaaatatttctgcttcatttttctttattctgcgggcaacggttttgttaaatgccctgtcatatatttttcttggaaagctccgtgtgtttctcagtgtgccgcaggaagtttggggggatatgcgctcctacctgtttgttatttttatgggcatacctgcggtttttctgtacaattattttgcatcctttttaaggtcgataggcaattctgttgttccactggtgtttttggctgtttcggcaattttaaatatagctttggacttgcggtttgtgctggggtttaaaaggggagtagcaggtgcggcggaggccacggtaatatcacaatatctttccggtgtgggcataaccatatacacatttatgaattatgaacaggttcgtcggattttaaaaccaaaaaacttacagcggagcagaataggcgaggttgtctctttttctgctcttacctgtgtacagcagtcggttatgaacctgggtattcttatggtgcagggtcttgtaaacagttttggtacggtagttatggcggcttttgcggcaggggttaaaattgacgcctttgcctatatgccggtacaggacttcggcaacgctttttccacatttatcgcccaaaactacggcgcaaaagaggacggaagaatacgccggggcttgaaaggtgcggttgccatatcaataacattttgtgttgttatctctgcccttgtgtacatatttgcagggccgttgatgggtatatttatagacgcccgtgaaacggaaattatcgccgagggcgtaggttatttgaggatagagggtgtattttaccggggaataggctgtttgtttttgttgtacggcttgtacagagctttaaaaaagccgggaatgagcgttgtgctgacggttatctctcttggtacccgtgttgccttggcttatattctctcggccataccgtctgtaggcgttgtaggaatttggctgtcggtgcccatcggttgggcattggcggacattgtgggtcttgtgtattttaaggcgaaaaaggaagaattgctgtcttgggaaaagtaatgttcccgtaaaaacagtcttttgccgtatttgcacggttttcgtataattttttgtaactctattgacaatatatatgccctgtaatataatgggcgtatcggattggtcaataatcgcaattattacgaccggataagatgcagggtgcgccctgtccttcttatccggccttttattacgatctaaatcactatttggcaaagaggtaaaaaatgaacaacaatcacaattttacagaaggcgaaattttaaggcctatgctcacattccggggaccggtgcttttggcaatgttcttacaaagcctgtacggtgccgttgaccttatggtggtgggtaaattcgcagaagcggcagatgcatccggcgttaacaccggcagccaggttatgatgatgctaacctttgtggtaaccagcttttcaatggcggtaactattttaatgggtcagcacataggtgaaaaaagcccggaaaaagcaggggatgttatcggcacaggcataattatgtttgcggtcatggcagtagcaatgacctttgcaggggttgtattcgcccccgaaatagccgccggcttaaaggcaccacgggacgcatttagtcagacggtaagttatatcaaagtttgctcctccggctttgtgtttataatcgcttataatgtaatgagcggtgttttcagaggcgtaggggattcggttatgcctctcatctctgtgaccatagcctctgtatttaacataatcggcgaccttttctttgtaaaaggcatgggaatgggcgcaaagggtgcggcgattgccacggttatggcgcaggtaataagcgttattctctcgatgtttattataagcaagagaaaaatgccatttattctcacaaaagacaagctgaaaatagacaaatcaatcgcaaagagaattttctcgttaggcactccgctgctgttgcaggatatacttgtttcagtgtcatttttgtttctcctggcgataaccaattcaagaggggttattgtatccgctggcgtaggcatagcggaaaagctttgcggctttattatgctggtgccatcggcattttcacagtcggtttccgcttttgtggctcagaatgtaggtgccaaaagaatggacagagccaacaaggcattgaaatacgccattgcggtttccgtttgcgtaggctttgtaattgcctatgtggcatacttccacggtgatattctctgtgagatattctcggatgaccctgcaattatcgcagcggcatgggaatacttaaaggcatacggcatagatacggtaatttgcacatttatgttctgttttatcggctactttaacggcagaggcaaaacaatgtttacaatggctcaaaacgttatcggctcattctgtgtcagaatacctgtggctcttatcgtcagcagaatacccggttcaacggtattccaaatcggtctttcaacaccggcatcatcgcttttgcagatgaccatgtgtcttgtttactttattgctttaaagaaaaaagacattgaagacggtttgaacgtacggcagtgatattttatagaaaaaatcccttggaaatttccaagggatttttcttttatttatagtgtcggaagtttagaaatcaatagttttcttcgtgtacttcaaaatatgactgtgggtgagcgcaaaccgggcaaacggcaggtgctttcgtgcctacaacaatgtgaccgcagtttctgcattcccaaactttaacttcgctcttttcaaaaacccgggcggtttcaacatttttaagcaaagctctgtatctttcttcatggtgcttttcgattgctcccaccattctgaatttggctgccaaagccttaaagccttcttcttccgcaacctttgcaaactcctcgtacatatctgtccactcgtagttttcgccgtctgccgcagcggaaaggttctgtgctgtgtcgcctatgccgtcaagttctttaaaccacatttttgcgtgttctttttcattttctgccgttttaaggaaaagtgcggctatctgttcatagccctcttttttggcaacagacgcaaagtatgtgtacttgtttcttgcctggctctcgccggcaaatgccgcttcaaggtttttttcggtttttgtacctgtgtatttactcataattaaatcctccgtataaatatgtgttaagacaatcctcttaattgtctttataacctctttgttttgttttacattcgccacaaacataaaacatctttaaatcatagccgtcaatatcaactccggtggcttttttcagttcccgggttatatcatcaagataaaaatccgccaatttgccgcactttgaacaaacaaggtggtcgtggcgccgtattttgtcatagtgatccggggaaccctctacggttatgcggcgtattgcgccgttgtccgttaatttgtttaagttgttataaacggtggcaagaacaattttgtcaccgcggtttttcattacggaataaatctgttccgccgtgtaatgctcgtatgatttattgataatgtccagtatttcctctgagtatcttgccatctttttgccccctttattggaattgttctaattctaatataacattttttctcgaatttgtcaataggtatatgtgtaatttattgacaacggccccgggtaatgttaatattatcttatattaactttattgcttgaaaggagcaaaacaatggacccggacgggacaatttatcttatacttaattttataatcagctttattttatgcctttatatcggcaccgtaataaagaacgaacaggactttgagggcaaacttggggtaccgaataatcggttttccggatttttgctttttctgttaaacttttggcggctgtctgtgactgccttgccaaaattcaacatttatgcggctgtcgtattgggggcattatttgttatggcggcggttattctgccattttgccttgggcttgcagtgtacgaaagccctggggcaaagtttttgtacagagccgtgtcattttttacaaatattttaaatcatacggttacgcctgttttgatgtttcttacacacggaattttccgtctttttaaattggaaaccgatgacgaagtaacccggcaggatgttatggatttggtggaggacgccgacgaggatgttatcgacgatgaccaaaaagagatgattgaaaatatctttgaacttgatgacaccaaggccgaggacattatgacccaccgcaccgatgtatttgcctttaacggcgaagaaaaatgccgggatattatagacaaggccatagaaagcggcttttccagaatacctgtttatgacggcactattgatacgataataggctttttgtattcaaaagaccttttggcggttatgggacatcgggaaaaaatgaaccggccggttaaaaactttgttcgtaaggcaatgtttgtgccggaggcctgcggtgcaagggaactgcttgttcaatttaaaaagaaccgcacgcaaattgccattgtggtggacgaatacggcggcacaagcggcattatttcaatggaagatattcttgaagaaatcgtcggcaatattcaggacgaatacgatgacgaagaagaacttttcatcaaaaccaagagcggtgcgtatatctgccaggcttcaatggaagttgacgaccttttggaacttatgggcattgaaaagcgcacggaagaagaggaagacctggacgattttgacagcataggcggtttgattataaatcgtttagagagaatacccactgccgacgaacatccgaaaatcgcttataaaggtcttatattcacggtgcttgaagttgcggagagaagaattgtaaaagtcaaggttgaaaaagcaaccacagaagacagataaaatatgaaatttcccggttcggttttataccgccccgggaattttatttttaataacaaatttacaacgccatagcaataccccggggcggcgaatatttttaatatccgttaccccggggcactgtttattttaatttaattgtcggcttaatttagaataccggtacgaatacaccgttgtactgtgtgttgatgtaatctctgatttcgtcacttgtcaaaacctttacaagtgcctgaacagcttcgttgttttcgttgccttcttttacacaaacaacatttgcataaaggtctgcggcttcactgtcgcttgcttcgcttgcaagaactgtgtccaaaatacctgcgtcaactgcatagttaccgtttacaacggcaaagtctacatcggccaaaacattaactgtctgtgcggcttcaacttcgtagaattcgatgttgtgtgggttttcctcaatatcaagtgttgtggcggcaagaccgacgccgtctttcaatttaataaggccttctttttccaaaaggagcaaagctcttgcttcgtttgtttcgtcattaggaactgcaataacagcgccgtcctgaatttcgtcaatagatgctgtcttgcccgggtacaagcccaaaggttcaaagtggatagcggctaccgaaacaatgtgtgtgccgttttctttgttgaagttatcctggtatggctgatgtgcaaagtagtttgcatcaagtgaaccgtcttcaacagctgtgttaggcattacatagtctgtaaattctgtaatctgcaaatcgtaacccaactctttaaggggttcaacgcactgttccaaaatctgtgcgtgtggtgccggtgatgcgcctaccttaatcgggatcaattcgccggactccgaagagctgcctgaattccgtgatgaacaacctgcaagacccaatgcaagggcgcctgccaatacaaaactaactaattttttcattttacttacctctctgaaaataatattaaaattttattttgtttttatttatatacacatctcttattccggatttaaaagatgtttataacttgttttacagaacgtttcttctgtctgaatttttggcaattctgtcgaatatccgctgaattgcacaaacgattaccaaaattattacaaccgaccgatacataaccgaaggtgttctgcggtagtaaccgtatcttatagctatgtcgccaagtccacctgcccctacactgccagctatggcgctgtaacctacaagggttattgctgtcatggcaacgcctcttataaggcttggaaagctctcgcttaaaataactttaattattgtgccttttttagcacccatacactgacaggcctcgataacgcctttgtcaatttcccgcaaggaggactgcacaagccttgccacaaatgggcaacaacctattgtaagagtgaaaaccgccgctgtccgtcctattgcctgccctacaataagccttgtggcaggaatgagcataactatcagtatgataaaggggaaagagcgcagaatatttacaaaacccgagaaaacagtgttaaaaggtttgttttcaagtatgccgcccttgcctgtggaatatagcaaaactcccatcggcaagcctaacacataaccgaaaaatgttgaaaggaacaccatataaagggtatcctttgtgccttgtacaagcaaggctccgtattgtgcccaaaattcattcatcttatcacacctgccagtctaacaataatttagtgatttcgctttggggatttgaaaagacatcttttacttcccctttttccgcaacttcgccgccgcttattaccgcaacacggttgcatatttttcttacaacccctatttcgtgggtgattattaccaccgtaacccccagctttcggtttatatcctgcaaaaggcttaaaacctgttttgttgtcatagggtcaagggcactggtgggctcgtcgcacagtaaaatcttcgggtctgttgccaatgctctccgtatggcaaccctttgcttttgtccgccggatagctgtgagggataaaccgcccgtttgtccgccaagtcaacaacctgtaaaagatattttaccttttcgtcgattttggctttgtctgcgcctgctatttttagcggaaatgccacattttcatagacggttttttgcattaacagattgtacccttggaacacaacgcccatgttgcgccttacctgtaacagccgtgagctttttgccccgacgattgaaacaccgtcgatttttatgtctcccgaagttggggtttccagtgcggaaaggcatcttaaaagggtgcttttgccggcaccggatataccgattatgccgaagatgtcgcctttttctatgtgtatgtttacatttttaagtgcgtccaccgaagtatttgactgcgcaaatgtttttgaaagattttctattctaatcatttaatcaccgatttcaaaatttattatataaaacaaaaagcccttgacctttggattaaccaaaagtcaagggcgaaataattcacggtaccaccttgatttacgcttacattactgtaaacgccttatcggccacggggtgacttaacaccattatggcttattgctgtaacgggcaaacccggcgcaaactacatatcgtctgtgcggctcaaagaccatattcaactgcaatgcctttaccccttttcagctcacggggctctctgtgaaagaaatttacaatctactcttcttttcaacgccttattgtgtgttgttttatggcactaattatagcctgaaaaattattttgtcaacactgttttgtgatttttgttaaaaattaaaatttaaaagttcttttttaaagtttgttgtaaaaatgcacaaacagcatattaaagttacggaaaaaccacaaacaaaaacgcagggaacagtgccctgcgtttttgtgagaatctgtatatgaaaaagcaattcaaaaaattatattattttgagcacttttctataaagcgttttataagcctgcgctgacattctttgtcctgcattctctccgggtgccactgaacggctataatgctgccgtcccgattttcaatggcttcaacggtgccgtcgtcggctcttgcaacaaccttaaagcccggtgcaacaagttttattgcctggtgatgagctgtgtttgtgataatatccgtttcacctaaaatctctgccagcttgctgtccttgtcaaccgttacatggtgggtgtttacattttcggcactgcctatggagtggtcgatttccgagggacattccgtgggcatatcctgatacagcgtgccgccgtacatggcatttacgatttgcagcccacggcaaattgccaaaaccggcttgccctgttttaaagtttcttttataagtgcaatatcataattatcatctgcaaggtttgtcttaccgcaggtgggctttttttcacagttgtataaaaacggtgttacatcgccgccgccgggggctaataaaccgtctatcattgcaacaacttgcggcacattttcgcagtttgtattacagggcaacaaaacggtctcgccgccgtttgcccaaattgcctgagggtatgtaactctttgcatatacatgctgtcatcaaaaatattaacggcacttacgcctattataggtttcttcataaagacacctcctatgatatttatttcattatagtttatcaaaattgtaaattcaatgtgaataatgtacgaaaaatatatcttttttttgtaatagtggtataattaagtaaatcttaattatttggtatatttatatttaatggaaaaaatcggataatgtaattgcggaggggaaaagtatgtataacattttgatttgtgatgatgaaaaagacattgtaaatgccttggaaatatatctcggcaccggcgactacaagatttttaaagcatacaacggcaaagaggctcttgacatactggaaacacaggaaattcacctggttttaatggatattatgatgccccaaatggacggaattgaagccttggaaaaaataagacaacagtacaatatgccggttataatgttatcggccaaaagtgaggacgtggagaaaatcaacggtcttaatttaggtgctgacgattacataacaaagccctttaatcccgttgagttgcagcggcgtgtaaaaagccggctgagaagatacacacggtttggcggtatggcacggcctgcaagtgatattatcaccgtaggcggaattgtgcttaacaatgtttcaaaggaagtcaccgttgacggtgatccggtaaaccttacccctacggaatttgatattcttcatcttttgatgagcaagcccaactgtgtattttccccaaaggatatttacaaagcggtttggaaagaattaccctacggttcggaaaataccgttgttgtacatataagacatttaagagaaaaaattgaaataaacccggcggaacccagatatttaaaagttgtctgggggcacggctataaaatggagagcaagtaatgaataagttttttgacaacgaaataacctgtgcggcggcggtgtttctgctggggatagacgcttttgttattctttgcgccggtttctattcaactttccaagtacctatgtttgcttactgcaatatgtatatgggcacaggtatttccaccgagtttaccggtgtgcttatgctgtcccttttcgtactgcttgcggtgataattcgctcggccggtcattaccgagggagtgagcttgccaagaatacggtaattgacagaataccaatagaaattgtatatacggtactgggcacggcttttttcttcttcggatggggcgttgcggagttttccatgcagatatacgatatgtatgtggaggccggatttcctcgggcccttttggactcatatacaggaataacagccgatacactggcaaattacatactggatctggttccgttcccggtatttgccctttgtttcagtgttatgtatttttcactgatatttatggtaaccaccaccgtgcggcgattaaagaccaaaacattcctctccacaagcattttgtggattgcctgtgtttggtgtgcaaggctgacgatcagatgttttaaggccttgaacagatgggcaaaaggattattctatacattttcggatgtaaaaattaccgcaaagtttacgatagcatgtgtgattttatatataatcgagttttatctgcttattacagtaggcgattggaatcccggcggattttggatttggtcaacaattatttgcataggcgtttatgtgacctgtgcaaggtggatattggggtatcggaaaatagaggatggaatagagcatatttccaacggcgaaaccgattaccaaataagcaaaaaatatatgccgaaagggcttgaaaaaagcaccgacagcttaaataacataagccgggcggtggccgccagcgcacaaaagcaaataaaggcggaaaggttcagaaccgaacttataacaaatgtttctcacgatcttaaaacaccccttacatcaatagtaaattatgtggatttgctcagcgcagaacctatggaaagcgaaaagcggaaagagtacatagaagttttgcaaagacagtcgtcaaggcttaaaaaattgttgtttgaccttgtggaggcgtccaaggcctcaacgggcaacataaacaccgttattgagcctacaaatatatccaccctgttaaatcaagcggcgggagagtacaccgacaaggcaaggaaacggggcttggaaatttccatggatttgccggaaaacgatatttatcttaataccgacggccgtctcctttggcgtgtgtttgacaacctgcttggcaatgcctgcaaatactccatgccgggaacaagaatttatatgagccggcagaaagaggaaaacgggcggagtgtcatatttaaaaatatttcaaaagacaggcttaatatttccgcagacgaacttatggaacgctttgtccgtggggattcttccagaaataccgagggcagcggtttggggctttcaatagcccaaagccttacggaaatattgggtggcaagctggagattagcattgacggtgacctgtttaaggctattgtaaaaatcgaaaatcgggaaaaacaagaaaattaggattcagaagtaaaaataagaggaggagtatttatggatatagatattcgggtttttaattccataatcaaaattctgtttatggtaatatttgcctatcagattttctatgtaatagttgcctttgtcaaaagacagccgaaatatacaaatccgatagtatatcacaggtttgcggtgcttatctgcgccagaaacgaggagagcgtccttggaaatttaatcgagagtattaaaaccggggactatccgcaaaatttggtggatgtctatgtgatggcggataattgcaccgacagcacagcccaggtggctgaaaatcggggcgccatagtttacacaagggaaaacaaaacccttgtgggtaagggttacgccttggaggctctgctgaacaaaatagcgggagatgcgggagtggataaatacgacggctacttcgtatttgacgccgataatcttattcggcatgactacataaccagaatgaacgaaaaattctgtcagggctacgatgtgataacaagcctgcgcaacagcaaaaattacggggataactggcttactgccggctgcggtctgcggtttttaagagagtgtaagtttttaaacctgcccagagatattctcggcacaccctgcccggtaggcggcacgggatttctgttttcccgcaaggcacttatgaaccgggacggctggcactatcaccttttaaccgaggatatacagttcagcgttgacaatatcataaaggacgccaaaatgggctactgcgataaggcgatgttctacgatgaacagcctgatgatttgtcacagagcgtaaaacagcgtatgcgttggcggaagggtatttttcaggtggttgcatcctacggaaacaagctgatagagggcatgttctcgggtaaatttgcctgctatgatatgcttgcctgttttgcggcacctgcatttctctcctttttatgctttggtgcgaatgtgtttacactgtcgctttatgccgccaacggattatcagaaatgtttattgcaaagtgtattttcgatttgattgccggcagttatttaaccatgttttttataggacggcttacaacaatttcttgttggaaaattctccgttgtccaaattacaaaaaagtcctttatacatttactttcccattctttatgatgacatatctgccaataagcgttatggcattgtttacaaatgttcggtggacgcctataaaacataaggatgctaagaagattaaagaaatataatattgcgttttataagttaaaaggtaacacttaatgctaagtgttacctttctgtttggtaaaataagatttttaaacaggttgttttgcgctttgtttatatcaagttcggctgcaaataatcataataagccccgcttgtaaaaaagcgggacttatcaggtgttaaattttagaaatctttttttgagtatatttttgcggaaacatttaatgatacgataaaacacagcgccgcaacagccgacaaggctataaatacagctttttcatttgatatgaaaatcattgatatgcctatatccttcgctacgcttgcaagaagaacaatcaaaaatatcggaagaaatatggcggcaaaaaatatcatacgggctttttgcacgccgtattttacatacacaggcaccaataatgacatatacagtattgccgcaacagccatagaaccgccgaaaataagggcctcgggtaaatctttttcaatgacagcgtatataatcgcactgtaaacaaaacctatcacatcaaagagtaaaaaacttacatattttgcgccgactgcctgttttgcggtaaccggcatggtaataagcatcatatcccatttggaactttcgtcataagcaatggaatttataaggcaggtgcttatcaaaatcattatggccgcacctaaatatcccggggatttcatcactatggccataacggtaaataatacagcagatgtcaacgcagattttaatgtggttttagcggtgtatagctcttttaaaacaagtcctttcatattcttacctccttacatagaaaaccataatatcttcaagagttggttgttcgacggtgaaattttccccttttggcaaatcgtttttgtaaaccaaagcccgtgaggaatagtcggttatgtgcttggaaattattttatccgggcttatcaagctcaaatccccttttactattgcgtaattgtcctttattccgtccttttcaccggacaggagaattttgcccttgtctatgaatgtgatgtaatcgcaaattttttcaaggtcggtgataatgtggcttgacacaaacacggtgtgattttcgtcggatacaaaatcaagcagcatatcggacatttcttctcttgcaaccgggtcaagaccggcggcaggctcgtccaaaattaaaatatcccgattgtggcaggttgcccgtgcaaaggaaattttcattttcatacccttggaataatcttttatctttgtttttgctccaaggtttgcccggcggcaggcagagagaaatttttccccttgccaatttttgtatattccggaaaaaactttttcaatttccgtgtaagtcagcaggcccggcagccggcaatcgtcaaaaaccaccgctattttttctttttcttcatcggtaagactgcttaaagacttgccgtttattgtaatattgccccggtgggcttttgtgaccccggtaagcagttttatgacagtggatttgccggcaccgttggcacctataaatccggttatataccctttgggtatgtctatatcaacattgtcaagagtaaaatctttatatttttttacaagtcctctggcctttatggcatattccatggttattcccccttataaatccgcaaaataatatcttgaagttcccctgccgatacaccccgcagttttgcgtgttcagccgcctgtgtaagatgttcttccatttgaagaaggtgattttctcgcacaagctcggtgttcttttccgcaacaaaacagcctttgcctgcaacagttactataaaaccctgtttttcaagttcttcataggctctttttgtggttatcatgcttatacgcaaatcctttgccaagttgcgcattgacggaagggcgtccccctctttcaaccggccatttaaaatcatggcttttatttggctttcgatttggctgtatatgggccgtgggtttgagtttgaaatgattaaattcatgaattttctcttttctgtttaactgtatatatcaagtatatacagtatatacacatttgtcaatgattttttgataaaaaatactgttatatttttgaattatatgctaaaataaaagcagaataagtaaaataagttgacgggagatatggcaatgagtattttaaccggtaaaaagaatatacactttgtgggcataggcggcagcggtatgtatcctattgtacagatacttgcaagcagaggctacaacatcagcggcagcgatgtgcttgaaggggacattataaactacgagcgcaacatgggcataaaaattaacattccccatgacccaaaggcggtagaaggggccgatttggttgtttattccgctgcaattttcaaagataatcgggaaattgcccatgcaaaagagctgggtattccatgtgtggaaagaagcgttatgctgggggaggtaaacagatttttcagcgagagtatctgcgtttccggcacccacggcaaaacaaccacaacaagtatgattacccaggttttgattaaggcggacaaggacccggcctgcgttataggcggtaagttgccccttataaacggctacggcaaggacggcaagggtgataatatagttatcgaggcatgtgagttcagcaacacattccttgaacttgcccctcacatagcggttattttaaatatagacaacgaccatttggatttctttaagacatttgaaaatttacagaacgcatttaaaaaatttgcggctcttgccgacggcggaatagtaatcaatgccgacgacaagaacacaacaagcgttataaaggatatgcaggtgcctataaccacattcggcattgacggcggcgactaccgccgggttaatgtaagaaaagaccacccggctttttactctttcgatgtggagcataatggggaaattttgtgcacgataaatctttcggtgccgggcatacacaatatttataatgccatggcggcatttacagcatgcacattggcaggcttgaccccggaggaaattaaaaacggcatagagacctttggcggtgcaggcagaagatttgaaatttacggcgttgtaaacggaattaccattgccgatgattacgcacatcatccttcggaaatagccgcaacactgagagccgcaaaggatatgggctttaagcgtgtttgggcggtgcatcagccgtttacctattcaagaacaaaaatgcttttaaaagactttgccgatgctttaagcatagcggacaaggttgttatgacggaaatcatgggcagccgtgaggtgaacacctacaacatttatacaaaagacttggcacggcttatacccggcagcgtttggtttaaggactttgacggagtggtaaactactgcaaggaaaacgcacagcccggagatttgattatcaccttgggctgcggcgatatttacaaagcctcaaagaggatggtaaaagagttttaaaattaaatacctatgcggcttattaggttgatttgccgcaaaaccaataataatccccggtgcatatcaaatgcaccggggattattttgtgtgatatttaatttaagtcaagattttcaagttcgccgataatttccatatctctctcgtaaaacataagctgttggttgtgcttaaaatattcttcgttgccgtatttggctataaactgcacgcagtagtagccggcggtaagttctgttacaagcataagttgctcgccgccgtcagggaaagccttgtctgcaaatttaaacatattgtccatatttgcgcttgcccgggcagccttttctttgtttgcacggacttttgcaacatacatttccttgcattttgcaaaggcggtttcaccgtcaagcatctctgtttcttccgccattttttcaaggcttgttataactttaagcagatttttttgggcagaagaggagagagttcccgatgccttgccggcttcaaattctgcttttttgtctgctattttaagttgtaaaacctcataaggggtgcggctgctgtcggcaaaccggctctccaaggatttaacttcttttttcagcatggcaagcatttggtcttcttttacaacttcgcttgttttgcccgtaatagcgtccaacaaaaggcctacaaccgtaactttttcgtcaaattttgcattttgggcacgggttactatctcttcgtcatagttgccctcaataatttgagaaatctggtagtcgctcttgtatttgttgtaaaggtcatagtaccgggcaaatgcctttgcaaccttttggtgttgcaggtattgacctacaagctcctcgtttacttctatgccgtggtattcgtaaagttttatcatccggcttaaatcttcccagcctctggcggttacaaagtttttgccgtcaacggtggattccactatgtagaagtaatcctttttaatttcaaggaatgatataatagcctcgtgtacgccggctttgtaggcgtattctttccacacatcaaaatctgcgtcgacgtcaattcttttaagtctgtcccaggttacaatgtcgtaatctctaacggaattgttgtattccggcgggttgccggcggttacaactatccaacctttcggcactttgtgcctgccgaaaactttgtattgcaaaaactgcaacataaccggggcaagggtttcggatacgcagtttatctcgtctaaaaacagtatgccctcttttacgccgcttttttccataagctcgtaaatggcggatatgatttcgctcattgtgtattcggaaacatcacattccatgccgtcgtaatttttgtgtacgataaaaggcaagcccatggcgctttgtcttgtgtgatgagtcattgagtaggacaaaatacccacgcccatttccgcagcgatttgctccataatggcggttttgcctatacctggaggccccatgaggaacaccggtctctgtttttcgatgggtataacataattgccggtttcgtctttggtgaaataggccttcatggcgttttcaatttcctgttttgcctgttttatattcataaaatctgttctccctatatttcttccgaagtcagcaccagctttattgcccaaaccggcacagacggattattgtaattgtcatctaaaaatacaaaggcggtgctgtactccggctgcacctgcggaaatgttccccagccgtcggtaaagtatataagccctttaaggtcggaaaattcgtgatttttaatcaacttatccacatattcaaacaccgggcggaagtccgtgccgccgaagccctttaaggtcaaattgtccatataccggtcaaagtcctcttggtttgttatcttcacgtcctcgtgtatttcgctgtcacattgtattatgtgcaagtttatttttgtaaagaaactctcttcactttttaaaatattgtatgtcttttccacaaacttgcgaaccaattcaccggaaaccgaaccggaggtatcaatggccaccacaaattcctttacctttttaacctctttgtattccaaaggctctatcaaaggcatatttttgtaaagggaaagaccgtaggtgtaaaagatgtagtcgaactcatcgtcgtttatctgcatctgttcgccgtgtacggaaaacttgcgcaaaaagtctgtgtaatcgtatttttcacggtttaccgcagttaagttttgcataaggtcgcccatttcgtcgccctgttgctttgacatggtctccatatccgtttgcacatactcggaaatctcgtcccaaagctcccgcatttccgcttcggagaggcttggcttttcgtcctcttccggggctttttctccgtgaccgccgccgctgccgatttgctcttcttcctcgtcctcttcttccggcttttcgctctctttgctgtcaccgttttgctgcgttccctgatccgggtcgtctttttcgctttgttcctgttccgcctcatccgggtcaacatcccctttggtgggtttttccgggtgccaccgactgtggttgtcaacggaaaaggtctgctccaaaagctctatgtatgcggttgggtatggatttgtttttaaaaagccgtatattttttccgccactgccatgccggcgtcacgttttatttgccgaacaaaacgccgtttttcttctctgtcccctatgtccagggaccgatcgtccatttgcaggataacggcctcaacagcaatgtcgcaggccaaatcccaaagaggggcgtttacatctttgcccaccataaaatgtttaaaaagccggtgtaaaaccatgtgcaatgaggcgtggtttaggtaattcctgttggctttgtatttgcgcaaaatatatttttcgccgtagaagatgtactcgccgtttacggacatacttttttccagccccagccggtcgtaaggttcccgataggggcatattttaagccggtttaaggcaacatcaaggtatctgaattttactgccaatgtggtttttgccccggacatggctttagccgcaagaatggatattttttcgctgtcggtgagaggggctttgccgttttcgtatatatccgacatctgccgtacctcctttcggttttgtcttatgttcttgtatcgatactattctatcacattttatatgcaaaaggtacagtttttttgcccaaatattgggatatttttttgtcaaatttcgataccaaaaaatatacgccccggctttgtaatttttctgcttttatagtataatatttttaacagtatcatacgaaacaaaagacaggaggaacggacgtgtacaaaaacaaaaaagtgtggggcatagttcttgccgcaggcaacggcacaagaataggatttgacaaaatgttgtacaaaatagacggcacatcggtgcgggcaaagtctatggcttgttttgaaaatcacccatacgttgacgaaattatagttgccgcaggtaaaaattatgacgaaatttgcggcatagcaaagagttttaaaaaggttaccgcagttgtaaaaggcggagaaaccagggcggtttcggtaataaaccgggtaaatgcactgccggaggaggacggtataattgccgtacatgacggggcaaggccctttgtttcccggcaggtgataaccgacgccgtagagggctgtttggaaaccggggctgcggtgccatgcgtaaaagttaaggacaccataaaaaacagcgacggcgcttacataaataaaacttttgatcgctcaaagttgtttatcacccaaacgccccaggtgtttgatttgaaactttaccgccgtgttgcgcaggagtattttgataaaaatatcaccgacgacgcccaattatttgagcgccgggggattaaggtgaaaattaccgccggtgattacgaaaattacaaaattaccactgttgacgatataaaggagaacatgaacatgagaataggccacggatatgatgtgcataaacttgttgaaaacagagatttgataatgggcggggttaaaataccttacgagaaagggcttttgggtcattccgatgcggatgtggttttacacgccgtaatggacagccttttgggagctttggccctgggggacataggcaagcatttcccggacaccgacgaaaagtacaaaggtgcagacagccttgaacttacaagacaggttggcaaaataattgccgccgcaggcgcaaccgttgaaaatgtagatgttacaatcatctgtcaaaaaccgaaacttgccccgtatatagatcaaatgagagaaaatatcgccggcgctttgaattgtgccgttgacagaatttccgtaaaggccacaaccgaggagcatctgggctttaccggcgagggcttgggcatatcctgccattcggtgtgccttttgaacatccattaatttttaattaaattattattacaaatacagctttttactttaaagtagcatataaatatgttattataaaagaatagttaatttgtatcggaggcggcttgatgaattttgctgacataataaacaagattatcaacatattacagtctatcggcgttaatgatgttatagatatttgcatcatttgggcggttgtgtactatgttttaaaacttgtaaataaaacaagagcatatcagcttttaaaatttttggctattattttatttgtgtggggtgtttcttccatacttaatttaaaagctactttaatactgctgcaaagcctgtcgcaaataggctttatcgctttgattgtaatttttcagccggagttgcgccgtgttttggaacaggtgagcaatatggactttttaaagtcatcttttctgataagaaaaaccgccgacgagagaaccgttgatgaaatgaaaaaatccattgcggcaatatgcgacggtgcggagcaaatgagcaattcccgcacaggggcgttaattgtattggaaaaattttccagtttggaaaccgtcaagcgctccggcaccgttgtaaatgcggacataacaccggagcttataggcactattttttatgagggttgccctttacatgacggcgccatgattatacatcacaacaaaattacccatgcggcctgcgttttgccactttccgacaatttggaaataagccgtgattacggcacaagacaccgtgccgccttgggtttgtcggaggtaagtgacgctttgtgccttgttgtaagcgaggaaacaggcagaatttcttactgcaagggcggaactctcaccccgaacaatggccgtgaggaattgtacaatgttttgtgcaacgaatttattcagcctattgtggacgcaaatcggaagatgccacgttccggctttttaaggaggagacagtgatatgacaggtgaaaaactgcaaaaacttatcgggggaaaatatttcctgccggttctctcctttttaatagctctgtgcatttggatttatgttgttgtttttgtaaatacacaacacactgtaacaataaacaatgtgcctgttaatatgcagtacaagcaaagcgtttatcaaagcatgggtcttgatgtggtggacggcggcaatatgaccgttgatgtaaccatcacaggttcaagaagtaccacagccgacataaccgccgatgatattttggtttatccgaatataacaaatatagaaggttccggcacatacacatttacccttacggcggaaaaggtatccggctttaaaaactttgagataagttctctgagccgtgacaccgtaaccgtaaggcttgacaagttgataaacaaagatttcaccgtgacggcggatatttcttccgttgtagttgcggcggactgtatggcggatatgcctacggtaaacccgggtacggttaacatttcggggccggagtacaaaataaactccattgcaaaggttgttgccgttacaagcgaaaacacaaccgtaagccggtcaaccgtacttacgggccttataaaactgtatgatgaaaacgatgcagagatagataaatcactccttacactcagctttgaaaccgccgatgttaccgtgccggttatgaaagaggtaactttgccgataaaggttgaatatgtaaatgtgccggagggctttaacacggatgttttgcatcagtctttgtcggtatccgaacttaaacttgctgtgccggcacagtatgcggcgtcacttagcgaatttgttgtgggatacattgatctttccactttggaaaccgacaaaccatatgaatttgatgttacactgcctaccggctaccgcagtatggacgatgttaaaaaggttatcgccacaatttcaggggcaaatcttacggaaaaaaatgtaaatgtatcggagataaagattatcaatgatccggatggtaaaatagaagttttgaccagcgttataaataatgtagtgcttgtaggcgagccagacgccatagagaatttaagcgtaggcggtgtaatcgcccagatagatgccgcaaggctgagccttgcgcagggacagcagtcggtttccgcaagctttataatcccctccaccgacagagtgtttgtaaagggaagttatacagtttccataagggcgtaatttatgattttagtaaacaatataaaacttgatataagccgggacagccggcaggcctttgacagagcattgaaagcgcttaaactgccaaggggtgcggttcgggatatttgggtgcataaggtgagcatcgacgcaagaaaaggcgatgtgaaattcgtttacagcgttgcggtgaaacttgcaaacccgggagatgaggcagggtttgccggcaaaaatcgtgatatacaggttaagacacagccggttataaaatttgccgtcggcggcgaaaagatgaacacaaggccggtggtatgcggcttcggccccgccggttttatggcggctctctgccttgcaaaagccgggttcagaccaatagtaatagaacagggacagagtattgacgagagaatgaagtctgttgaaaaatttgaaaaacagggacttctcaacaccaaaagtaatattcagttcggcgagggcggcgcaggtacattttcagacggaaaattgacaacaagaattaccgacgaaagatgcggctttgtaacggatacatttatacaaaacggcgcaccggcggaaattgccaaaatggcaaagccccacataggcaccgacctgcttgtaggggttataaaaaatataagaaaacaaattatcgcccttggcggagaagtgatgtttgacactgccctgacggatattgtgattaaaaacggcagagtggtgcgggttaaaaccaccgcaggggaaattgcaacggacaatcttattcttgcaacgggacacagcgcaagggaagtgttttatatgctccgtgacaggggtattgatatgcaggcgaagcctttttccgtaggtgtcagaatagaacatctgcaaagcaaaatcgacgaggggttgtaccacggcttggccggacacccggcactgccgaagggagaatatcagctgtccgacacaagcggaaagcgaggggtttatacattttgtatgtgccccggcggcagtgttgtcgccgccgccagcgaggaaaataccgttgtagtaaacggtatgagccgccacgcaagggacggtgcaaatgcaaacagcgccttagttgtgtcggttttgccggaggacttcggcggtgatttcgcaaaagccatagaattccagcgcaaacttgaaagagccgcttttatggcaggcggcaaaaactacaaagctccgtgccaaaccgtaggcagatttttaaggggtaaggccgggtttgattttgggagagttgttcccacttaccccataggtgtaacgggggcaaatttcgacgatattttacccgattttgtaaccgacggattaaggcgcagtttgcctattcttgacggcaagctccggggctttgccgccgccgattcggttttaacgggagtggaaacaagaacatcttccccacggagagtactccgaggcgaggatttacaaagcaatataaaggggctttaccctgccggcgagggcgccggttacgcaggcggtattatgagtgccgctgttgacggcgtaaaaatcgcccaatatatctgttcggtgtacaagccgtaattttaacttatctgaggtacaaatgctttatcgcaagtggaaaataaaacaatcttcacggacaggggttcggtcgctgcaaaatcggttgggaataccgaaattggcggctcgggtgttgtgctcaaaggggataaccgagccggagaaggccaaaaaagtatttttggaggacacccctctctcggacccatatttaatgcttgacatggacaaggccgttgagagaataacccgggcaatagaaaacgaagaaaaaattgtggtttacggcgactatgacgtagatggcgtttgttccgctgcggtgcttttttcccatttggaaaatttaggggcaaatgtattttacaagttgcctaatcgtgaaaccgaaggttatggcatgaataaagccgttataaaaaggctggcggatttgggagtaagccttattattacggtggataacggcatagctgcccttgaagaggtggatttggccaacgaattgggcattgatgtggtcgtaacggatcatcatctgccgaaagaaactttgccaaaggcctatgcggttgtggaccccttgcgccccggtgacgaaagcccttgtaagatacttgccggcgtaggggtggcatttaaacttgtgtgtgctttggacggcggcagctgcgaagaaatgcttgatttttacgccgatttggttgccgtcggcaccgttgcggatttgatgctgttacaggatgaaaaccgcacaatagtaaaagcggggctggaaatgttaaacgacagcccaagttgcggttttgaacatcttatggctcacgcaggccttacaggcaagcggataacggcggaaaatgtatctttcggcattgcgccaaggataaatgccgcgggacgaatgggggacgcctcaaaggctcttgaacttttgctttccgacaatgatcgggaggcggaggagcttgcatctttccttgaaaaagaaaatgccaaaaggcaagaggtgcaaaacaaaatcgcagaagatataacccgggaaattttaaaggataaatccattgttgacgataaggtcatcgttgttcggggggaggactatcacccgggggtcataggaattgtggcctcccgtttagtggaaacctatggcaaaccggccatagtttgcacaaaagacggcgacgattataaaggcagcggcagaagcgtgccgggatttaatctgaattccgctttggtatattcttcaaaatacttggaaaaattcggcgggcatgaacttgcggcgggacttactttgcaaaaggataatatagaaaacttccgcagagcgataaacgaatttgcaaaaaattacccggatttacggttcagccccgaattggaaatcgactgtcttgtgaatttcgcagacatagatttacagtcggtttatcggcttgatatgcttgccccttacggcaacggaaatcctcggccggtttttgcggcggaaggtttgcttgtgacaggtgtgttcccggtaagtgagggcaagcatgtaagggttaagatgtctcaaaacggccgtgaatttgcaggcatattttttaataccacgccggggcagtttgcctacaagcccggggattacatagacgcatgcttctctctctccgtatttgagggaacaaacggcggtatgatttccataaggcttaaagaggttcgcccacggggaatgtcggacaaagtgatagacgcatataacctgtacagcagatttagatataattttgagctttcaaaggaggaaaaagctcggctttttcccacaagagagcaggtggctgcggtttaccgtaaaattgcggccggaaaaaccaacagccgggatttaaggccgctgtttatggccgttccgccggcagaaagcggaaaaatacggataataattgatgttttgacggatttggggcttattgaaaccaaaagcggcccttacggagattgctttgcaccggtggcggtacagggtaaaagagaccttatgtccagcaaaattttaattgcactgcaagggtaaagaggtgtaacggtatatgacttatgaagaattgaaaaagcggttgacagaatccggaaagaaatacgacttggaaatgattgacaaggcatatcgccttgccaatgaaaaacacgccggcgttttcagaaaaacaggcgagccgtatatcgagcatcccttggcggttgccggacttttggtggaactgggcatggattctacctcaatagccgcaggcatcttacatgatgtggtggaggacaccgatgtgaccattgaggacattgaaaaaatgttcaataaagatgtggcactgcttgttgacggggtcacaaaattaggtcagattaagttttcctccttggaagaacagcaggcggaaaatctgcgtaaaatgcttttggctatgagcaaggatgtcagagttatgataataaaactctgcgaccgtttgcacaatatgcgtaccgcccaagggtggaagcctcaaaagcagctggacaaagctaaggagaccatggatatttacgcccctatcgcacaccgtttgggaatgagcgccataaaggacgaattgcaggatatttctctgcgcatacttgacccggtgggctacgaagatgtgcgacattccatagaccgcaacggcacggcacaaaaatttgtggattccatagttaaaacagtaaaggaaaaactggacgatttcggcttaaaggattccacggttttcggcagggttaaaagcgtttacggggtttataaaaaagtgtatatccaaaaccgtgatttcagcgagatatacgatatttacgccgtaagaataatcctgaatacagtggcggaatgttacaatgcccttatgcttgtgcatgatgttttcaagcctattccgtcaagatttaaggactatatttcttcacctaaatcaaatatgtaccagtctttgcacacaagcgttatcggtaaggatggcataccttttgaaattcaaataagaacatgggatatgcactacaccgccgaatacggcattgccgcccactggaagtataaagagggtattcaaggccaggataacatggaggaaaaactggcatgggtgcgccagcttttggaaagacagcaggattccgaggacaatgtggaaattctggcaggcattaaaagcgaccttgtgccggacgatatatttgtgtttaccccaaagggggatgttataaatttacctgccggggcaacggtgatagactttgcctatgccattcactcggcagtgggcaaccgtatggtaggggctaaggtaaacaacaagatagttcctattgactataaagtttccaacggcgagattatagaagttatcacaggccctcgggataaggggccaagccgtgactggcttaatattgccgtaacaagcgaggccaagagcaaaatcaggtcttggtttaagaaagagcgccgtgaagaaaatattgtagagggtaaaaatatccttgaaaaagaattaaggcgcaaccttataaatgttcccgacgacaagtatgacgattttatggaagaacttgccaaaaagcaaaaggtaaacaaccgggaagaactttacgcagctttgggctacggcggtttgcaggcttcaaaggtaatgttcaaagctaaagaaatgtacgataaaatgcagaaggaagttaaaaattccgacggcgaaaaaatcgtacctatcaaaacagcgccaatcaggcgttcaaaatcaagcaacggtgttattgtagagggcttggacaactgccttgtaaagttttcaaagtgttgcaacccgttgcccggcgatgaaatcgtgggatttatcacccgtggctttggggtttccatacacaaaaagagctgtgtaaacgcccaaccggaaaatatagacgaagaaaacaaagcccgttgggtaaatgcctactgggcggacgatattaaagaggactttaaggcaagccttgaaattgtggcaatggataacggtatggctttggcggaaatttcaacggtgcttaccaatctgcgagtgccgatttttgaacttaatgcaaaaaagaccgccgaccagcgcaccacaatgaatgttaccataggcgttgcaaataccgaccacttaaacagcattattcaaaggctgaataagacgaaatcggttatttccataacaagaaattaagaggttgatatgagagcagttattcagagagtaaaaaatgcttggattacagta

SEQ ID NO: 3796 - DNA, 2489 bp, Unknown
  16S sequences of unknown bacteria
agctcgtcggtcatctcggagcgcagaccgttgtctgacactttgtcgagaaggtttatgatcgagtctctgcccatgattgtatttttgtagacctcgttgagaagttcttcgtttttgttaagcatacagtttctccctcaaaaaaaaaatcccgcgggaaaatcccacgggataagtatgcgcatatctctctgtcttatgagagctcgccgaggtcgtacggcgtgttctggtagacgaaatagttgagccagttcgagaagagcaggttcgcgtgacctctccagacgttcggcgggcgcttctccgggtcgtcgtccgggaagtagttgtaggggacgtcgatatcgagtcccttcgccttgtcgcggaaatactcgccctcgagcgtgtcgttgtcgtactcggagtgaccggtcacgaagagcattctggcgtcgcgcgcagagattatatacggtccggcaatgtcgcttttcgcgacgatttcgagttcgggaaccttcagaatatcctcctcgcggacctcggtgtggcgtgagtgcggcgcgaagaaacgctcgtcaaagccgcggacgatcgggtggcgcgggcttgtcacgtagtggctgtatatgccgaacatcttcttcggaagcgcgtatttcgggacgccgtagtggtatttcagccccgcctgcgccgcccagcatatgtgcagggtcgagaagacgtgtccgcgcgaccagtccattatctcgcacagctcgtcccagtacgtgacctcctcaaaatcgaggttctcgaccggcgcgccggtgattataagtccgtcgtagcggtcgttctttatcgacgagaaatccttgtagaacgcctccatgtgctcctcgggcgtgtgcgtcgagcggtgggtcgcggtgcggagcagggtcaggtctatctgtagcgagctgttcgacaggagacggatcagctgtgtctcggtagttatcttggtcggcatgaggttgaggaccgctatcttcagcgggcggatgtcctgatgctcggcgcggaaatcgttcattacgaagatgttctcgttttcgagcgtgtccccggcggggagaccgaccggtatctttatcggcatttctttgtcctttcgctttcttttatttcggtataagtctattataccagaaaatcattacaaactcaacagtgatttagaaaatcatgagaaaaatcaaaaaacatttgcttttcggcgcgaaaaatgttataatatccttatagattacttgcccgaggggaggaaaacggctttgacaaaacaaaaaagagtgatcgcggcgcttgtgcttccggtgcttctgatggcgctgttcacggttatggcgtcagcggttgacacggatctcatcatctccgatttcgagccggagagcgcgtctctcgccctctggtcggcgggcgacaacgtccggagcgtcaactcgggcgccttcactcccggcggcggggcggaatacaactgcctcgaggcggcgggctacgacgtcacggtcaacttagcgcgcagcatccgggcggaattcacgtcggcgctcgatctcaccgaataccgctctgtgcggttcaatatctacgctctgaaatacgcgaacgattccctcgccgagtactacgcgcgggtgactctcttctccgcggacggcgggactaccgagaatatcgtgacggtcagacccggaagatgggaggacgtgtcggttgatatctcaacgtgggttggaagggatcaggtcatacgggcggagatatcgctcagcgtctcgacaaacgtctacggctcgaaccacaacagcttcttcgtcgacgatctcagggcctcgggcaagatcgaccgggagctcaccgcgagattcatgttcgacacctacgagatatccggcggaagggcgcagatgacaagcgacgagctgaagatcgacctctcggaggacatgacgacaatgctcgaggcgacagtcttcgcgccggaggtcgactgggagctcgggatgttacggctcagactgaaaaacgagtcgtcctgcgagcttctgattctgcactactcgacctttgacaccgccgcgaacagcgaggagaagatcctcagcgtgaagctcgagccgaagccctcggacggctcggcggtcatgaccgactattatctcgacgtcggggacgtgacgaagctctccgcggtgaagttccagttccagagcgggagcggcagcgtgattatcgactccctctgcggcgtatcggtctacaggcgggagaatgttcagacctgcggaagcatcgcgacctgtaaggtcggggacgatctcatgtcggtgcgcttcaccggcgaggtacagcgggacgaggcgctcgccaaccagaacgggcggatcgagatctactctctgccgtcgggcggggatattgatatctcgtcgctcgacagtctcgaacctatagcttcaagt

SEQ ID NO: 3797 - DNA, 32759 bp, Unknown
  16S sequences of unknown bacteria
gcagagcgggcggttgttaaagcctgcttcgcagtcttctacactaaagtaataataaaaaatcagtcccctgtttttgtaaacgggggactatatattttcctcaattattctttttaatatatctatatatttttcaacctgttccgaaattgttatatcttttatttttatccagccgagccgcataaaatcattggcgtcttctatcggtacggacttcaacctgttatcgccgtacccttccggcagtattccgcttccggcagatacacagtcggtatttgccaatatattatagcatgaagccctgtcacccacataaataattcttttaaatttgcctatttccgttaatattgcctcttccgaataattaaaggaatcattattattcctcgaaaaagcaacgtacggataatccaataggtcatttatatttatgctgtttttatctgaaagcggatgatttatatttataaaagcccttggttttactcttgtaagttcgtgaaattccaaatcgtttgccgcaagtaccctattcataaacttttccgtcatgtccgataaaaatataatacctatttcgcttttcctttttgaaacattttctattaccttatccatttccgcttcaatatagctgaagttataccttgacgtattttcactttttaaaaattccacaaaagctttagcgcaaaacggataccgctgtgctgatatattgattgacgaaaaatcgcagttatttttatcggcatagtagttttctaccattttttgctgctccacaatgggacggatttgcattataaattccttcccgtcctccgtaagggcaatccccttgttactgcgattaaatatttctataccgagttcctgctcaagttctcttatggaactgcttaaacttgactgcgataaaaataatttttttgccgccttatttattgatccgcaattataaatttctataatgtaattcagctgtaaaaacgtcatattattacctccggcgttacacattacatcagtacctgttttttattataacattaacttaaaaataattcattagataaaatcaataaactgtttaaataatcaatatttgtcttgcggacaaaaaatacaaggtctcaaaccgtatagtcagagaccttgttgtataataaaattttaaatttctatcttagcgcccattaatttgacaaaatcggcaactatagccgcatctcccggccatgcaggcgatgtaacgagatttccgtcaacaacagttttatctgcgtcaacctctacatatgttcctcccgcaaggtttatgtcaggtcctactgccgcatatgcagtcgcttttttgcctttcaaaacattagcggctgtaagtatctgcggtccatggcatatagccgctacgggaatattgttgttcatgaagtactgaacaatttctattacccttggatacagtctcaaatattcgggagaacgaccgcctgtaataaaaagtcctgcataatctttttcattaacagcgtcaaaatcagctgtaagggcaaaattatgtcctcttttttccgtataagtctggtcgccttcaaagtcatgaattgctgtcttgattacatcaccggcttttttctcaggacatacaacatctacctgatatccgagcatctggagacactggaaaggcaccattgtttcataatcttcagtaaaatcaccggcaatcattaatacttttttagccatatataacttcctcctcatatagatttgttcatttgctttacaagcatattatataacaaatcaaagaagatgtcatcatattttatctatttataacatatatttaaagaagaactaataaaatcatttatgtatttatcaatgaatatataccgaatattatgataaaagcaactattcgacaaaagtaaaatctaatacaaactcatctgattatccaaacacaaaaataaattcattaatttttaagtttgctgtcggttttattttggaacttttcatcttcaacaataaatctttcatgctcgcactcgcctattataccaacctcatcacttgctgatattttaaacacaagctttcttccttcaatggcaactaattcgctttcacatataaccttcatacctatgggcgttgatgcggaatggcttaaattaagctttgttcccactgtacactgacctttttctaaaaaaggggcaacgcttttccatgccgttttttccattaaagcagccattgcaggcgtggcaaatactttaagcgttccgctttccatagcaatagcgctgttattttccgttaccataacctcttcttttcctttaattcccatttcaagcattgtttttcctccataatatttaattcagaaaaagccttgaacaaatcatgtcatataaagctaaaagcttttgtctgcatatacggcattattcatccaaggcctgttttattttatatttaattagtttttacattattcataaagcggatatttctttgtgagagcgtcaactcttctgatagcttcttctttgaaactttcaaagtctttaagagttccggctattatagcggcaatttctctcatatcttcttctttcatgcctcttgttgtaaccgcaggcgttccgagacgaataccgcttgttacaaaaggtgaagcaggatcgaaaggtatagtatttttattgcatgtaattcttacttcatcaagaagtttttcagcgtcttttcctgttatatttgcttttctgaggtcgacaagcataaggtggttatcggttcctcccgaaactatatcaaggccttcttctataagtccgtttgcaagagcttttgcattttttacaacctgattaatatactccttatattccggagtaagagcctctttaaaacaaactgcctttgccgctattatatgcataagaggtccgccctgtattccggggaatatagccttgtcaatctgtgcggcatattcctgtttgcacataatcataccgcctctggggcctcttaatgtcttgtgtgttgttgtagtaacaaagtctgcataaggaacaggcgaaggatgtattccggcagccacaagtcccgcaatatgagctatatctaccataagataagcccctacctcttttgctatttcagacattttcttaaaatctataatccttgcgtaagcgcttgctccggctacaatcattttaggtttgcattctcttgcgatttttgcaaattcgtcgtagtcaatatatcctgtttcatctactccataaggaactacgttaaaatattttcccgaaatatttacaggcgagccatgtgtaagatgtccgccgtggcttaagttcattccgagaattgtatctccgggattgagcattgcaaagtaaaccgcaatattagcctgacttccggaatgaggctgaacattggcatgatcgcagccaaaaagctgtttagctctgtctcgagcaagattttcaaccacatcgacgtttacacaaccaccataataacgttttcccggatatccctcagcatatttatttgtgagatgtgtacccattgcgtccattaccgccggagaaacgaagttttcggaagctataagctctatattgtctctctgacgtttaagctctgcctccattgcagctgctatttctggatcttctgcggctattcttgaaaagtcaagtacattcatgtccatatgtcctccttataaatacattattccacctatagtgtaatgtaataaaaattatataacataaatccgctgatgtcatcattgattttaaaaaaaattattatttgtaaaattagcattccattataaataattctgtaaattttttgttgacttttcaatcaataggctaaataataaatagaaatggaaaaacactgtaaacaatatatatacttacgcaaacagttatcacaatatattgtttttattatttaaaaaggagtgtataaaattgaataacagggcaatcctggagtttgccgttacggtcggagaacgtatgctggcaaacggctgcggcacccacagaattgaggggcttatcaaaaaaatactcggaaactgtcagcttaaaaactatgagatttttgttactacaaccggtatagtcgttacaatcgattccgaaaacgacggtgttataacaatggtaaaacaggtccccaaaaagaaaatgcatacggaacatatttctctcatagaagacgttgttaattctttcattgccggcgagctgacggcgcaggaatcaataaaagaaatacataatgttgaggcaaaagccacatatccttactgggtaacgataattgcattcggtatggcaggcgctttcagaacgctgatgttcggcggtcagataatagacggcatatcctctcttataataggaatgtgtatgggtatatttgttcaggctcttaattcaaataatacgtttacatttctcgttaactgctgcggaggattcgttgtcggtttcatgtctgtattacttatgcgctttggtataggttgcactctcgataagattattataggaacgctcatgcctatagctcccggtgttccgtttgttcattcggtaaacgatatactgcacggagattattcatcgggaaccacaagggcatacgaggcacttcttacagctgcagccataggaacgggtgtggctttcgctatgataatctggaaaatgcttgggggtgctacattatgaaaataattataatagaattttttatggcatttatggcttgtcttttctttgccatagtatataacacgcccaaaaaagaactgtttttctgcggtctgttcggtggattgggatacgccttgtactattacctttcacgtatttgcggattcggaatatctgccaatttctttggagcgctgctaatagcttttatggcaagaatattatcgatttacagacaaatacctgtaatgttatatgttttaccgtcagtatttccgctttcaccgggagctaatatgtataatgccgcctacgccataataaaatcggatatgtttacagccggcatacagactatgatttgtattaaggttgtaggagtgtgtgtaatagcaatccttattatactttctcttcccgaatttctttttaagccttttaagaagaaagcagtttgaaaatagtttgattatataactccgtacttttataaataatgcggcaggaattttatttcctgtcgcattatttttctttaatatatttccataaaaaatcattttacggttatatttttaataattccccacttcacaccttcagaaccgtcggctttttgtagactgtcggcaacaactgcgtatccgtccagaaacggctcagccttgtcaaaaataggacttattataaattttcctgttttatcagtatacccatacgatttgctttgtttatcatacataggcgaaagtccttccgaaagatttacttttaatttatactcatcataggaaatttcaccattatcatcataatgtctcacaacatgagaatggtctgcacctgccaaatcttctataataatctctgtactgaaaaggcgaccgtctttactgaaactgactgatgcatttctcacattctcaatatatttcagtttttttcctttattgtcaataatccatacctcgccgctgtcagccgtaacagcaaatgcttttccgtcagcaaaatttcctgccgttttaaacacaggctcgatgactgtttcccctttgttattaataaatcctactccgtcatttgtacgtaccattgccaaaccttcacaaaaatcaccgcagctgtaatactcaggttttataacaaagtttccgtttttatctataaatccccaatgtttatttcctgtttctcctaccgctactgcagctaatccttctgaaaaccgcttcgcctcatcaaactgtaagtccacaatcatatttccgttttcatctacataaccgtacttataagaatctcctacaatatttcctattgcagccataccgtcggaaaactgttctatacgtttatcgtccaaattaaacaatatatttccttctatgtctgaaatatattgtttatgcttctctgtcgtaacacaaaactttccttctcctatatattccaaatttcgaacaacatgaggaggaaaattcatataaaccgtaccgttgctgtctataactgaatactcgcagtcatctcctccgatatatgttcctaatggctggtcttcaccatattttacagcaacaaaatatccttttccgatgttttttatttcatcatatttctcggaaagctccaacgcatatacaggctcttccccttttcccgaaagtataaattcgtttggttctttcgtatctacttttctttcagtaatttttataactgcttctttgttctcatcattccaaataatgtcttcatctgtaattttatatcccaaggtgttaaaaatatccttccaatttctgatcggtataaataatcacccgtcttttatcgctattttccccgatacaggaatattttctccgttaatttctattttatttttctctgcgttcagtaaaatatgatattctccgattaatacgctcgcatttttatttttttcatcccaattaatacgtgtatttttatttactgatgtaaaaaatgtgcgaacaggcagcattatacagtcgttatcgagatatatttctgcctctgattgtattctttcctcatttttaacaatgtatttattccctattgttactcgatatgtatttattttctcttctattacaggttcgcctgcatgtaccgttacagtaccaataaccattattgcgcttaataaaccgcatatacttttcttcataaagcttcacccttcccgtttctgccgttatgtaaagtttcactgtaaattcagtatatcatatattttaatatcgtatatctttgaaaccaaaacgtaatatttcttttatattacgcaaaaatgaggttcattctgaacctcattttatttttatcattagcattgcagtataagccatgtattttcgaaattcttatttttgagatcttccttcaatatataaaaatatattctgccgcagtcgccgaacataagcccaaaatcgtccttttcaacggtatccaactgtaacagcaaagtccattcttttgaagcttctgcaaaacgttccttttcttcatctgtcatattcggatatccgcttcccgtataaatcccacgtctaccgcaaagctcacattccgacagcatatcattttgtataatatcggcataccccaatagctttgttctatattcgctttccgcgtcttccgcaactattttctcccttgcattacagtattcttcccaatcaatatctgtttcgttatattcagcatattcgctccaatcagggacatcttttctgtttctgaagcttatatttatttcgggcgtaataaactccaaatctttcgggcattctctgctcatcaaattttcgcacgtaccttcgtaataataaactttagaacaacctctgtcctttgggtcaaatccccatttttgcgagcctaactcatagaaaaaatataacattcctttttttggaagcagtccgtcatcatcatatacagatacttcctcacagtttatctgcataagaaacgacagcggtctcggcttaatttcactgtcctcaaatgtatcggttgtatagtacggccaattaaaatttgatggaagatccgggttaccaccgaattttgaagttccattcttagcttttatattatttttttgatcaaaaactatctcaattgtatttaattttatctgttcaaaaatctgttccggattcatcggaaacacctcctttttttaataatatcatacagagttctatattacaacatcataaactaactcttatatataaagccattctcatttttatccgttttgtaaagcttcttatcgtcagtatttttcttttgttgcagtctatcctcagccaatgtataattaagttagcagataaaaaataactacactaatcgccgaaatacggaaaaggagtgttaataatgggattttttgacgatatggcaaaaaaggtcggttccgtagcaaacgaggccggttctaaagcaaaagacgctgcaagtattgcaaagctttcagctgaaataggctccaaagaaagagaaatggcaagattattcagtgagatgggacaaaaaatgtactatgaatacagagattgtattcctaacgacatcgaagaaacagccgccaaaatagatgatataaaatcattaatagccgagcttaatgagaaaatcgaatatgttaaaaacagttgaaatcaagccgcaatcaataagaatatatgcaaaatgaaaatttttaatcgtatatatctaaagcaatctgatttttgaaacgggagcgtgttcggatgtcaaaacaaaataactgcaaaaataacagcaccagactgctttgtacagtaacatcaatagaaaaattttgtcttataaaaaacagactaaatagcaatggcatagcttacttggaagaaactgtaggaaatcacaaaaccggtacttttcttacacaactgtttctcaacagccacgcaacatacggcatgcatggtgaacatgacataaactactccgtgtatgttgacaattctgtttttgaaaaagccatatctttgataagtgatcttttataataaaaaccactagttcactggtggttttctcagaccttagaagggtcagttattgctgacccctcagaggggttatgaaagtttgtcatcacatcacttgtttctttatctcacccttggtagaaccatgggttttattgccgctaaatctcaaataattgataaagccaacgtttaaaacgttggcttttactgttttttgatttaattcattaattacttagcgtcaacctttgcaatataactgatgaggtcaactactttgttgctgtagccccattcattgtcataccagcttacaagtttcacaaagttatcattgagagcgatacctgcttttgcgtcaaaaatcgatgtatgaggatctccgaggaaatcgcttgatactacatcgtcctctgtatagtcaagaattcctttaagttcgttctgagacgctttcttaacagcagccttaatttcatcgtatgttgcgggatttgcaagtctgcatgttaaatctacaacagaaacgtcaattgtaggaacacggaagctcatacctgtaagttttccgttaagttcagggataaccttacctacagccttagctgcgcctgttgatgaagggatgatattagcagaagccgctcttccgcctctccagtccttctttgacggtccgtcaacagttttctgtgtagctgttgtagaatgaacagttgtcataagaccttctacaataccgaaattatcattaataaccttagtaagaggagcaaggcagtttgttgtacatgacgcatttgatattacattcatatcagacgtatacttatcattgtttacacccataacaaacataggcgcatccgatgaaggcgccgaaataacaactttctttgcgccgcctttgaaatgagccgaagctttttccgttgttgtaaaaagtcctgtagactcaacaatatattctgcgcctgcttctttccaagggatttccgcagggtcaaataatgagtatactgtaatctcttttccgtttacgacaagcttaccgtctttttccgatacttcaccctggaaacgaccctgagcggaatcatatttcatcatataaaccatataatcaacgctgattgccgggtcattgatagctactacctgaacgtcatctctcgtaagagaagcgcggagaacaagtcttccgatacgaccgaagccgttaattccaacttttaccataattattcctcctagtaagtaatgtaataatagatttgaaaaatattcttgtccatttgctaatctatttaggtttagtatagcacaatctggaaatttataaaacagctaattaataaaaatttgtttataatatgataaaatacccatttacacattcaaatatacttgtccttatgacaataataaactacaatatattccgaggtgataaaatgttttttattatgggaataacagaaggaagaaaaaaatttgaacagcttgtaagtattgtatgtccatactgcggaaatgcgggaaaagccgtagtttatatgacatacacttgtttgagtctgtttttcatacctttttttaaatggaataaaaagtattatgttgagatggaatgttgcggaagtctttatattttaaatgaagaaagaggaaaggaaattgcgaaaggtaaagacgtaattatttcgtcatcggatctgacgcctgtaaataacggatattatgaaaaccgctgtccaaactgcggaaccatagttgacagaggatttgattactgccctcgctgtggaaaaaaattaagataacgatatatgtacgaagcccatcagggcttccttttactattcattttagcgcttattttacccagtgcctttttttctattctggaaacataggaacgtgatatgttcatcatttttgctatttctctttgggtaacttcatcaccgccgccaagggcatatcttaaataaattatttttctttccctatcatcaagtacttctttcatgtcgtcaagcatttgtataatctccatttttgtacttacctgttcgggaacgggatcatcgtctgtttttactatatccatcaccgttatttcatttccgtcaaaatcatgtccgacagggtcttgtaaaaaaacgtcgttcatatattttttcgaacttcttatatacattaatatttcattttctatgcatcttgccgcataggttgcaagccttacgtttttatcggtattaaatgaatctataccttttattaaaccaatcgtacctattgacactatatcgtcaaagtctatggatgaaaaacgccctcctgccgtatattttttagccacatgggcaacaagcctaagattgtgttctatgagtatatttcttgcttgcgtatctccgtttttatacctgtctaaataacgggtttcctcttcttcgcttaacggctttggaaagcataccgacgatccatggaagaatacggacaaaaccgttcaccccttaaattaacggtcttttatataatatgcattacattatcgcaaaatgaacgaaaaagcgcggatttttaaaaatccgcgctttttcttatatctgtctgtttaccgatctgtattcatttctatatctgaaataatggcaatctccgaaattacctgttacaaagtcatacatctcgtcttcgtctaactccatatcacagtagtaataatcgtattcgtcatcataaatatagtattcacacatctcacagtttgattttatctgtttcatatccgattaatgatttccgcagttgtgtccgccgcatccatgttctccgcagtttccatgatgttcatgttcatgatgagcacattcaatatccggattgaatgaaagttttccttcaaggcaagcctccacagcctcatcagcgcttcccgttactcctccgaaaagctcgattcccgcttcggcaagagcagcctttgcgcctccgcctattcctccgcaaataagcttatcaacttttctttccttaagaaaatcagctaaagcgccatgtccgcttccgtttgtatcaaccacttcactgttttttatttcagaaccttctacctcgtatattttgaactgttctgtatgtccaaaatgctgaaatatatttccgttttcgtaagttactgctattctcatattatattcctccatttgattataaaattataaactgttatttgcagcgcatttcctgtggcatgattcacatctctttgctttttcttcgcaaaaaatataatctccaccttcaatacgcagttcatacccctttatcagacacaacgccaacttgtatctggcattgttatatatggactgggctgtggttctggaaacattcatgctttccgcacattgttcctgactcatattttccaaatctatgagccttaccgcctcatattcgtcaatagtcattaccaacacttcagcccgttcattttttgaaacaggagcaaaactatagttttccggcattgaacaaattcttcgccttttacacggtctgggcatatacaaccccctctcataaccggcatatgctatttataaattaagtatagcacatttccggcatatgtcaataatatattattagattttatttctttttatatttgtattattcataaaaaaaaatcttatccaaacatggataagatttttttcattttacggcgcatatttcaaacaaaggggtttctgaataaagttccagttcccaatccgaataaagttcctctccgacattcaggtctgtctcaatatttttaaaaccgatttctttaagaactttaatgtcccatttcggtctgactatatttgacaacggaagattttcaaatatagaggtgtcgtcatcataaaccttaaattcttccccgaaagcctcatagtattttctttcattttcccttactctttccatcatctcattgttataaaatggtatatgccagtttgcgtcatatattattaattttcctccgcttttcagcttattataaaactcttgataaacatgctcgggattatccaatgtccaagttacgttacggcttattataatatcaaacgtatcgttcggaaaatctatgttgttaatatccatacatataaaattcggataaacattcaattcttcggcgttgagacgcgcatatttcagcatatcctccgaacggtcaattccaatcactttgtttccgtcctcagataaaatacatgaaaaaaatccgggtccgcatcccgcgtccaatattttcatcggcgctttaatatgcagatttattctttttttccatttttgctttctatcgtcatttaattcactataaacataattttcatagtctgctccgtcttcccagaactctctgtttttatcattcatattttttctccgttttattttttatggaaacagcctttgctgcctctataagcctgcaagtctgttcatgtttaggaaaattaagtatattttcttttttatcgcattctacaatgctccctttatccataaccgctattctgtcgcatatagccgcagtcaaaggaatgtcatgagtaataaacattatggacatattcgtatgatacttaagctttttcaataaatccactatctgagcctgcataagcacatcaagcgcgcttgttgcttcatcacatataagtaatttcggttccgatattaatgcgcgcgctattgcggctctctgacattctcctccgctcatattattaatttttacatcggcatattctttttttagtccgacataatcgataatttccaaggctctttgctccagttcggcttcactccatattttatatgacgccgccccctgtttaatccctttcaacagcgtatctcttgggtcaaaagagtccgtcggattttgaaaaatcatttgcattcctctaccgacaggtttcagcaaaataccgttattgatttttttcccgtcaaatataatatttccgctgtcttcctttataagtcttgcgattatccctgcggtcgtactttttccacatccgctttccccgacgataccgagacattcacccttctctattgtaaagctgacctcattaactgcggtcagctcaatcttattttttttaaatttcttacttatattttttacttcaagtaatgccattagcatgtaccccctgattgcagatgaaaacattttgctctatgttcgggagcaatatatacatcgctcggctcgtcttcaaaacatcttgcctcagcctctgtacaccttccagcaaacggacagcctttcatatcctttgtaaaaacaggcggataacctgtaagacctcctgatattcttccgtccatatcaggcattgcctctataagagcttttgtatacggatgagacggattataaatcacattctccgttttcccgtattccaaaattttaccgccatacataactgccatatcgtcagaaatcatagatattactcctatattatgggagataataacggctgaaactttaaaattatttttcaagtatttaagctggtttactacttcttcctgagatgttacgtcaagggcgcttgtaggctcatcgccgagaagaagtttcggtgaattaatcattgacgcggctatggcaaccctctgacacattccgccgctcagttcaaacggatatgattttaaaatcctctctggttcgtttaaaagcagccttgacataagttcgacggccttttcaaaacattccatcttttttgcatttgcgttatgaaccttaactgtttcaaaaaacatagaagctatggtttttgtcggatccatagataaaaaagcattctgcggtatcatggctatttcattgccgcgtaactcacgaagttttttctccgaaagttttgtaatttcttctccgcaaaaatttataaatccatctgttttagaattttttcttttaagcgccataattgaattaagcaatgttgtttttccgcatccgctttctccgacaatgccgagaaactttccctcttcaacagacaggcttacgtttcttacaataggtatatcattataagaaacaacaaggttatttacatctaatatcttcatcaaatcacttctttaattttcaatataaacattggaatccagaaggtaatattcggaaggatttgtatggagtccctttaaatcagaattcattacataataatattttgaatgacctacgactatgtatcctgcgtcgtctattattttctgctggatttcctttgccaattccgtacgtctttcgctgtcaaactccacgtcaagttcttctataagcttatcaacttctgcatttgaatatcctccgtagttactgcttcctcccgtacggaaagctatatcggcaaaatactgaggatcgcctgtcgggaccattgtaaagctcaccatcattaaatcaaaatcgcctgttttctgctgttccgctaccgattcatatacttcaaccgatatgtcgattccgatattttttgccgaagaagcaatttcattacagaaatttgcaagttcggcttttgtactgtatgtcaaaagcctaagagaaatgtcctccccgttcagttctcttattccgttgccgttgccgtcgattattcctgcattatcaagcatggcattggcgccgtctatatcgaatttatatccgtctgctccgccgaatgccataaaatcaggatagagtcctgttgcaggaacagaggctcccttatttataatatcggcatagttttgcttatctattgacatacttaacgcttttcttatttctgtattctgtaaaaacttgttgttgaaattcataaatattacctgtcctctagaacccggaacaccgtctacattatacaaagatgtatcattaaacagttccaggcttgtagatggcatacttacggaaacatcgctctctccgttttgctgagccattgcaagcgtgcttgtatcgccgattatatttataacagctccgtccagttttggttcgcctccccagtattcgggatatttttttacttcagctcttgttttcacctcgtagcttacagcctcaaacggtcccgttcccacaggtgaaaccgaaggatctccttctgcgtcaacatcaataattcccgtaagaggttcgcataatccgttcataaaagccggcacgggtttggaagtattaaccgtcaatgtctgtccgtctgccgccatattgtcaatgtaaagcagttcattaaatctggcgtttatctcgcctgttctttcccaacatttttttacgctttcggcagtcattttgttaccgttgtggaaagtaacatcgtccctaagatttataacccatgtatcctcgtcaatcatttcgcatgactgtgcgagaaacggttgcggttcaaggttctcatcaagtttatacagcgtttccgttattccccagcgcgatgtataccagctgtcccagctctgagctaaatctaagctagtcggacattgtgtatccgcaattattactgtatctgccgaaacagcttccgcttcattatttgcattcgcttcgtttgtatcggaagaacatcctgacaacgccaaaacacacaccgatacagccgctaaaacagcttttaagtttttcttcatatttattctcctattcttttatattatctcggagtttttctccgaaaaagttaaacactgccgctgcaataaatacagctacggcaggtataataacaagtctgacattcgtctgcatatagcttcgtcctgcgtttatcatggctccccattcagccatagggtctttaactccaacacccaaatacgaaagcgcagctatttccataatcattgaagccaccccgagacttgcgttaataatcaacggatatattatattcggtataattcttccgcatataattttaaaatgcgattctccgcaaattcttgccgccttcacataactgtgctgtttttccgtaaatgtaaaacttctcgccattctggcatactcgacccattcgaccatgcacagcgcgattattgtattttctattcctattccgagcaatccggctatggcaatagccaatataattttaggaaaagcctgcattatcgttataagcttcgataaaactgcgtcaaccgctcctccgaaataacctgccgtaactcctataaaagttcccgtaataaacacaacggctattataaataagcttgaaaaaaccgatgttctcgctccgtataaaactctggacagcatacatctgcccaaattgtcgttgccgagtggataatctgcgcttggttttgcctctgacagcataatattcgtaacattaggatcattcggagccaagacaggagccagcaatgctgttgccaaaagaatgataacaagaataagcgatattttaaaacctatattttttctcatttttattctcctttaatcattcccgtattttattctcggatcaattaatgccgatatgatatccacagtcaaattgacaataagataggctatcgcacaccataaaacaaatccttggagcatattataatccagtctcgcaaccgaattaacagccattttcccaagaccgtttatagaaaatatgccttctataatggtcgacccgcctaaaaaaagaccgacatatatgcttatacatgtcaaaatcggtgcggcgcaatttttcagcacatgtgtgaacaaaatcctcctatagcttacgcctctcattacagcgccctcaacatagggctgttctaactgttccaacactatcgcccttatctgtctaatcatctttgaactgcattgtattacaagtacggctgacggaagcacgagtcctttcaacccgacaggcgctattaccggcataattttcagttttatacaaaacagccataaaaaaacaagagaaatgacaaacgacggaacagaaattcctatgaaagaaaatatcctgaatatattgtcgatccatctatctttataaacagcacacaatattcccaaaggaattgcaataataaccgttaccgcaagtgaaacagcagtcatctccacagtcggagccatgtgttcttttatctcctgagatacgggtcttttcgttacaaacgatgtgccgaggtctccccttgcaacattcagaagccaattaccatactgcactataaacggcttatccaagcccattattttttcctgtttttctatagcctcttcggaaataattcccacgttgccgtcagagcctgccagccaaagctccgcgggatttttcggagacaaatacataatagaaaacgttaaaagagttattcctataataacaatcaaaaactgaactatttgggacaatattttcctgaaaacgattttcatacgtcccatgtcagtgcgtcctcctgataaccgcaaaaaattcagggaaaagttcatattgcatttgttctttttcattatatacatactgatttatattttcataaatctcacattcaaatccgttctgagccctccagaattccctgtcccatacaggtctgtttttatatgtcataggaagcgacattgcgaggttttccaaatttttagctttaccgtatgtaaatccgccgttctcttttatctttcttctgttttcttccaattctttcctatattttgcgtctctgagatagtagtaccattcggcgtcaaaatatatcatcgttccgccgaccttcaacttatctgcccaatgacgaagttgtttttcgggatctgttaaagtccatgtaacgtctcttgacataatcaagtcaaaacttttattttcaaaaggaagcatacgtccgacatgtttaaaatttatatcggcgcctacaagtcttgcattttcagctgctttttcaagcatatcgggactcatatccgcagcggttacgttatgccctctcaatgccgaaagaattgcaaaaaaaccggggccggttccgatatccagtatatctaaacgtctgttttccgttacctgtccgaaaatcaaactttcccaagcagcctttttatcagaaaaaagctgcgccatattttggtcgctgtaactttcagatctgtcctgccagtaatttgtcattccgttttcaagcatttgtttaatatcaggtgcggtaaccgtattatttatattattttccagtattgataacggcatttatttcagtcccttccgatttatggtaaaaaatataaaaaggccactaaaaacgataacggtgcgtttttaatgaccttcttgatcacattcaaattataaataagcaaaaaaattaacggcttctgccgatttgagcatacttcgatgtatacttcgttatgtgttatattataatatatctgcgtaaaaatgtcaaaattttattaaattttatatgatatatgttaatatacaaacttaaaatgtaaagtacgccttattcgataattattttaataggcgaacattttccgctgttacagtcgctttcagaaacactgcatgaggctattcccagcttaatgtccatcagcgcttttaatataattttatctcctgctttagaaatcggtttctcaactgaaatactgccatcggtatttatttttgtattcataaataagttaataggcgtaataataggtcgatgttccccaagcgccccattgatattattaagacaattgggggtgtccgtctccgttattataaaaaaagtcatacatttcttttctacagcacgggtggagcaagtcatgttcttctacatcgtcatatattactttcatcatcggattatacaaatttgtataaataatgtcattatttttcaattttaaagactcattacagtcaattgttacgcctgtcgaaagaaattcatctttatttccgcctacttctgcaaaaaaatcgactacctgtccgccttcaatatcaatgacttcaatattttgaccttttttaacatcaattttcattccggaacatgccgctattacatattcttcaatcattttttcatcttccttaatttggttttatataattattgtttattcaaactgactatatacatgacatgcggaacaaatcagtatcacaaatcacatatctgttccgcataaatatatcaaatattaatatgtaaatcctgttctgaaaattccgaactctctgtgtcccagtgcttcggcttttgtatactcgccgttacaaacatttattatcatatcataaagttctttgcccatatcctcaaggcttactccgtcggtaattatttttcctgcgtttatgtctatattatcaatcattttattataggtttcggtattgcccgtaatttttattaccggcgctatggggcttcccgtaggtgttccccttcctgttgaaaaaacgataatctgcgctcctcctgccaccatacccgtaatagaatctatatcttgacccggagtatccataaaataaagaccttttttatcatgcggcacttcttcggcatattcaagcgctcgtaaaaatgtgctctttccggctttatacatacatccaagggacttttcttcaatagttgtaagtcctcctgctttatttcccggagtcggctgaccttctcttaagtcatgacctgcggcgtaggatctgtcctccactctctttaccatagatagaaacttttccctttcggtaatgtctgcaaatctttccgccagcaagtgctctgcgcctatacattccgtagtctcgctcaaaatactgcttcctccgtcatttacaagcatatccgaagcaactccgattgtcgggtttgatgccaatccgcttgtagggtcgcttcctccgcattccaatccgagaattatttcgcttatatcaaactccgtcttattctgtttagcaagttctcttgacattttgcctgcaatttcgactccttttgcaaccgttttgcacgttccgcattcgtcctgtataacgatgtagtctacaggttttccgctctctgctatttcatcggcaatctcctttgcctgtattccctcacagccgagacctaccacaagaaccgctcctacgttgggattttttccgaaacctaccaatgttctttttgttgtttcaaaatcgtcgcctatttcgcagcagccatgctgatgaggtatggctattgcgccgtttacaagctttgctatattgaccgccgtttcgcttgcacagacggaagccggtattataagaaggtaattccttattccgtatgttccgttttctcttttatatcccattaatttcatggcaaaatcccccttattttttatctcctcttccccttgtgctttcacagttatgcacatgtacataatcgcctgtttttatttcaactgttgcttttcctattacctgaccgtatttatagcataatccaccctcggctatatcgtttacagccattttgtggaatttaggtatatcggagtttgatataatctttttcccgaaaacatcaaatgtttcgccttttttcacatctctcaagcatgtaaccagattatccttttcatcgatacgaagtaaatcttccataaaagcacccctttttaaatattattatccgtatggattttagaacatttttgtataattatatatacacaaattataaattaataaaacgatatattcaattgttatttgacacaaacaaacaaaagagttactataaatacaaaaatgcaaatttaaggagcgattatatatggcaaaggtttcaacagacggtaaatcaacggaagaaaaaatggctttggctgacgaaataagccgcggatattttcgtcagggacttaactgcgccgaatgtgttcttcgcacatttatggacatgcacgatatagaccttcctgatgatataatcaaaatagcgtcgggtttcggcggaggaatgggacatacaaaaaacacttgcggagctataacgggagccgtgcttgcacttggaacagttaaaggtcgtgatccctttgaaaaagaagaaatgaaagaccgtattcatcagcttcagggagaagtatatcctacattcggaagcatggtgagtgaaataaaagaaaattacggaacgctcaactgtgatgaactttccaatccttttggcgatttcgcaggaaaagcaagaaagaaaaactgtatggaaatgattgcttactgttcagccatcgctgaaaaatatgcaaatcagtaaataatttacttataaaaacaaccacggtttcataataataaatcgtggttgtttttataaagtcatatagcctctgacatctttatatattttctttaactatcgcttcttgttccgtcttcagaaaaaccttctacctttgaaagttctatccatctgtttatagcctgcatacgaaaatccatttcatttatttcttcggaacattttctgaggctttctgaaatatcagccgaaaccgattcaggaagattttttttatatcggagtttatgttctatgcttgcccaaaagtccatagcaattgtcctaagctggacttcaaccggaagcctctttttctcctctgtgaaaaatacaggcacttcaagtataagatgcagacttctataaccgttcggtttgggatttttaatataatctttcttatttaaaagtttaatatcgtcctgcatacatattttctccgcaagtcggtatatatcttcgggaaaagaacatacgacccttattccggctatgtcatatatattattctggatactgtctatggatatttcaaacccttttcttttaagcttttccataatactgaccggtcgttttatacggcttttaataaattctatagggtttctgtccccatataaggaaagctcattatttataacttcaaatttagtctgtacttccagcattgcacacctgtactgcatcatcaatttttggaacggaatagtcgactccaaaaattcttccgggtcattgcttgaaattaattcttcaaaagttaactgcttatcttcaaatttcattatttatctcctttatcctcttttgcaattccataaaatataatatcaaaaattctctgtatttcaattttaaatatttattattacgtattaattgtaattaaaacattcaatttatacattaacgaataattaaaaaatcttatatattggtatcattgttaaaatacatatattaataattccttttatcatataaacagttcaaatatctctcagtatattattcaccaatccattaacgtaaaagacgagtaagaatttttcgattcttactcgtcttgattttttattccatattcaattctgtatttttctatattatcaaaaactcttgatgctaatctttgattatggaaatttgttttttaccttttatctttcagtcagcatgataagtactacttcatttccataagtatatcctgttacattatacttacttgtattcattgccgtagcaagatttgtctgctcatactgcttaggacctgtcttaacatagcactgtacgtcctcgcttacatcatattttctgcttccgcttgaagccgtaccatagcttatattgctgagtgatacagatgtgagtcttccgacatatataagcttatcatttctaaactggaaataagcggcgccgctgtctccgccaaagtcgtctcctgaaaccgtagcagttcccgactgtccgtttattatatagttatatatggttgatgtaggctcttcagatgttccgtcagcaccatatatttcttctttgcttacaactataccaaactgttttccatcgcttgtaacatcataaagtatgagatctgttatttctccgcttccgtttgttacataatataatacattgtccgatgttatttcttttccggcaagtttagatgtatatgttaccgaagctgaataatcctgatttacattaattatattacatcccgatgctaaagtatgtgttccgagttttgttccgtcggaattgaattttccgtttattctcttaacagcctctttctgaacggtattgctctgaccgtcaaatgatatggaaacaacatctccgaccttaaacttatcagtatcggtctgatatgatcttacaacgccgtcagtacatgttacatatacaacgctttctataaccttagcgccggcctcgttcgtatatgaatcagaccctatttttgacacgatacccgcatagcttccgctgaaacgtgatgttgatactacatctacaaccgttccgtcttttccgagaagcagtgtaactgtgtcgcctattgtataagaaccgaggtctgaaagtttatacgctgctgcactttcaagagtataagtatttcctgctacagttgccgatgtaggatttgcagttgacggagaagccgccgtatatcttcctgttacactgttagcataaatccataccgtcttaagagcttcattatagtaatatacatcataaatctgaacagctgaaggtgtgctgataataccgtttctgtaaattgtagcgtctgcagctgcaaacggtatatttgcaaatatgcttcctgtctcgtatacataaggacctttaagttcgcttgatacaagagaagaataatttatatttcccgaattatcaacagtatatccgagttttgttgcatatacctgtccatcagcagtttcggctttaagaagattatagaatatatttacacaatctcctcttgtaatatactgcccctgtttaaggtttgtattgtcgtccagtcccagtgcctgaaattttgaaatctgcgccgacgggaatacccccttaaatgttgacgggtcatatccgagaagtttaagaactgccgtagcagcttcttcatattttattttgctgtccggacggaatgttccgtctgaatatcctgtaaaccatccgttttcaaccgctactcttatgtactcgactgcccaatggtctttttttacatctttataaagagagctggctacttcatctcccatctcgtccttataaacagatgcggaaatcatcatttttgcaaactccgcacgtgtaacattcgacgacaggttcatatttcccgctccgtctccgccgattatgccgagagcctgaactgtctgaagcgccgtttggctgtcggcggcatgtaccggaacagcaaacgcagaaacggatatcagcgccgcgcacataagacttgcaaattttttaagtcttttcatcgtcttcctcctttaataaatttatccggttatcagtctgccgaatagatcggattaatcatatctcaaagcgtctatcggatttaatcttgctgcctttttagccggcatatatccgaagaatatacctatagcggcagagataccgacagataccagaatagcaaacattgtcggagcaactgtaagaggttcgcctaaagttataaaaataaccttggaagctacaaacgaaagtatatatccgactacaataccaataatacctcccagtgcgctggttgcggcagcctcaataacaaactggctcataatatatctttcttttgctccgagcgctttccttatgcctatctcttttgttctttctgtaacggaaacaagcattatattcataattcctataccgcctacaacaagtgaaattcccgcaataagtgtaagtatagtaattaacatatttgtagactgattcatcatatccaaaacttcagacatactctgaacataaaatgcgtctgaagatccgttgaaatattccgtaagagcattttcaagtgttgtttttgcctctgctgccatttcttcatctttaaaagtaattgtaaagctgtcaacgtcccttatattcatcattcttgatactgtagaataaggaacatatattgcgtcatcggcagaatattccgtactgtcggctttttcttccaaaacacctactattgtaaagtctcgtccgttgagttttatcttttccccaagagcctgacctccgaaatattttaaatttataaaagatcctactacgcatacgtttgttctttgtgcaatgtccaaatattgcagtgttcgcccctgcgctatatcaagcttatttatatcggcaaagtcttcgcttactccggtaacattggaattcatactttccgtaccaactctttttgagccttggaaggatacggatggagtcattttatcaaaatattcagagttttcatcaacgattttttgcatatcgtcaaccgtcatcttttgacttcctcgtcccataatatacacagataatgtgtcagttcccatactctcaaactgttctctcatatacttttccattccgcttccgagaccggtaattactataacggcagcaacgccgataattataccgagcatggtaagtattgaccttgtcttgcttgaacgtatgtttttcattgccatagagaaagcttcataaaaattcatttacttcctccttccccgatttcagcgtcatcatcggaatcgtccagattaaacgtaggctgtacaaacgcattcggatcgctggtaggtccatcgtataccttttttccgtcctcaagtcttataaccctttcagcagttgccgctatggaattatcatgcgtaatgagaacaacggtattccccgccttatgcagtttttgaagtattttaagaacctctcgtcctgttctggaatctagggctcccgtcggttcatcggcaagtattaccgacggatttcctacaagcgcccttgctatggaaaccctctgctgctgtcctcccgaaagctgactcggcagatgtttggctttttccagaaggcctaccctctgcaaggatttttcagctctttttcttctttccgctcgtgaaacaccggcatacataagcggcatttcaacattttcaacaagattaagctttggcagaagattatattgctggaatataaatccgagcatttcgtttcttatctcagccaactcgtttttattcatctttccgacatttcttcctgcaagaaagtattctccctcactgggaacgtctaaacatcctattatattcatacatgttgatttacctgaacccgactgtcctacgatagcgataaattcgcctttatatattttaaagtttatatggttggcggctcttattatgtcgtctcccatcttatatatctttgatacatctctgaattcaataagaggatccatttatatctcctccttatcccatagccatcattgcgccgccatagaacatatcagatgacgagctgaatatataagcaatttcgtcgccttcgtttatgccgctctttatttcaacataactgtcattgcttatgcctgtttcaacctcaacatattcatatccttccggaattgacggatcttccgaactgttagctcctgtttttacaagaaccatgtttcctcttgtaacagctcccacgggaatagctataacgtcgtcagcctgtgaaactactatttccgtacttacattcattcccggcagaagatcttcatcagggttatctatctgcacttcaacgggatatgttgttacgccgtttgtagtcgttcccgccatgtttatttttgtaactttacctgcaaaagtttttccttcaacagcgtcagccgttattgtaacgtcctgtcctacagatattttatttatatcaagctcatctacattcatcgtcatcttaagataagataagtcgtatatagtacagagttttgcacccgcgtcaatagtatcgcctgctttgacaagcttttctataaccgtaccgttaatgggtgattttacagtatagtcctcaaggttttcgtactggttttcaagacttatctgcgcgtcctttacattatcggaagctgactgaacagaatcagtaacattgtcgctttccaatcttataatagtgcttccgtcagaaaccaatgctccttcatcgtttactatttcaacaacttctccgctgacctcggcatttacacttctgttttctttatattggaattttccgctctgtgttgaacctgatgttcctacttcagccgttgccatctgctcttctgaaatagctcccggattgtctacatttatttttacatttttaacaatcatatttcccggcataacctgtgtagctccgcttacggaagcaactgttccgcttaaagtttcaaaagaaccgtaaagcgttacttctgcgctttgtcctatgtaaaacgtatccgcttcgtcagcagggaacggaagttcaattgtcattacggaatcgtctctgacttttgcgatttcctgtcctgcgcttacttcatcgccgacctctacaagaacatccgttacagttccgcctacttttgtttttacattcagattatcaagcgcttttacagctgtattatagttgcgctgtgccgacgaaaccgaaatctgtgctttttcaatgcttgtttccatatctgatgagtctatctgatagagagtctgatcttccttaactatatcgccctcttcaaaagcatcgctgagtacgtctccctttaacagcgttgtaactgtatatttatcagccggctccaaagtaccggttcccgtaatactctcgacaatgcttgttcttacagccgtatccatagtatatgttgacgcctgcattgcatcgtttttaccttttccggagcaagctttaacagccacaattacgattactataaccaatataagtgcaattattttttttgttttagatgttccggaaaacttctttttaaagttattcatttttccgtttttttcatcaagttcaatttcatctgtttccgatttatcggtaacttcagtgagctcatcatttaatttttcttcatccatattttcattcctttcattatcagctgaatatttttatttgatctttcttaattacaaatcaagcaatatcataagtatcagttaataaatttcaatgtaccgcttatgtccgtcctcctttctgattaaataatggcaaataaatctgttttcatacgtaaaaataatacattctttagtatataaaagtcaatgaacatacgcttaaattatcttaagatttatttaaaatttttcacgacatttaattttgttatatatattaaaaaccactccgtaaagtttcaattaaaattgcaaagtcaaacattgagtaatgttagcttttttattgtatatcttcaatgtaaaacaatttaaaaagcggctgtaacattaaatcccagccgcataataaaattatttaattttcttcgtttggatcaggtaaaaatcttaatgctatcagcttatggaaaatatatgcaaatacatatccgataactacgccgagtatcgtgtctattatacgaatgataaccgctccgtgtataccgtaaattccggctcctatcattaatgctccgaaacagtttaatgccgtcttatatctgtactttgtacagaaaccgaggcacagaccgcctaaaggtccgataagcggctgaatggattccggcataatctgaaaaataacaaagaatgcagccgaaccgataagtacgcccaaaacacgctgtccgaaacgtgtttttgtatccggagaatacggatactccgacaacagcgatgaacatgcaaatcccatccacataaaacgttcaaccttaaatatgcttccgattgataaaacaagagtaacgcctattgccattctcagctgccataaatgtgtaggatttttaagggtaaatcttttaataacatgatggaatctcgtttctgaatgtatgtgcctgtgctttacaaaaagtataacagcgcagataatatatccaaccaatgtcatcattgctctttgtgtaagtaattctccgcttacggggttgccaaccaaatatatgtatgcaaaactatataatccaccgtttccgagttccggtctttggcttgttatacaaagtattgcaaaaatagcaataaaatgaataaacgggataagtattgtaggcaccgaaataagtattgcaggaacaaacagcaatgttgcgaacgctatagccagtgttaccaacgaatctcctatacaatattcaaagttgacaaaacgtattcctaataaaatacaaaatagaactactgccatcggcgtattttccgttccgaaaatatttgacagtgtagtgataaacaatattgcaaatgcaactatcaatatagctctgactgtaattgccgcccaataataaactttttcttttttctcattactttgtgatatttttttctttagtacagaaggatccatttgaagcgcatcataaaaactcataatcaattatcctctctctttctttcatcttctatattccgaactatattatcagcatactgtaaaaatttttcaaaatcagatcctacgtttctccataaatcgtaaaacggctgtaatatatttttatatcctttctctaattcagcgcaaccgaaatcggttataaataatttatagcttcgttcgtcgcactccagcttttcttttcttatacagttcttttcataaagacttttcaggcagcggcttaccgcttcctttttcataccactgtactggctaagcataatcggcgtatttccctcgggttttaaataaagccatgccaaaagttcacattcccctgcagtcagttcctcttgtttggaaggaagaagcatacgtgaaagtttttgaacctgttgacgataatggaccatatcaatccagtctatatccataatcagacctccgaaactagttaacactgttaattatattgtttattattacaattgtcaaattatagttacattataaacaaactgttgatttttagcttcttccgtgttatatttttttatatattgatgatttgaggtgaaaagatgttcaatttttcttgctgataatttttgcataacattatttcaaggcagtttatacagcctgtttttttgttatgccatgcggaaaagttgaatgtctatacgcttatataaaacggatatttttatccttattttgtgctgcggatcaactttccgcagcatttttgttatttctggagggataaaaatgtcactaataaacgtatctaatcttacattcggatatgacggaagcgaaaaaaatatttttgaaaatgtaagttttcaaatcgataccaattggaaactcggattaacaggaagaaacggacgtggtaaaacaacattttttaaactgcttttaaacgagtatgaatacagcggaacaataacatctgatgtttcatttgaatatttcccttttccggtacgtgatgaaagtttgtatacgattgacatacttaataaaatatgtccggatgtacccgaatggaaaataataaaagaggtttccttattggactctgactgtgaagtcctatacagaccgatggaaactttatcaaacggagagaaaacaaaggctctactcgcggcgctttttcttaaagaaaataattttctattaatagatgagccgacaaaccatcttgactacactgcaagagaggctgtaagctcttatcttaataaaaagaaaggatttatattaatttcccacgacagagccttcctggacagctgtatcgaccatatcatttctataaacaaaactaatatagatatacaaaaaggcaattttgaatcatggttttatcataaacagcttaacgataattatgaaacagctcaaaacgaattgctcaagaaggatataaaacgtcttgaagccgcagcaaaacgaactgaaacgtggtccaataaaaaagaagcctcaaaattcggctctaaagcagacagaggttatatcggacataaagccgcaaaaatgtcaaaacgctcaaattctattaaaaatcgtcgagttacagccattgaggaaaaatcgtcgcttatgaaaaatatagaaacaaacgagccgttaaagcttactccgctgaaattccataatacacagcttgttgtactgaaaaatgtttccgtttattacggtaataaatccgcatgttctgatataagccttaccatagagcaaggcgaccgcattgcggtgaaaggaaaaaacggcagcggtaaaacaagcatactaaagctgattaaaggcgaaaatatagagtacactggtgatataataaaaaatcccgctcttaagatttcttatatatctcaaagttccgattttctggagggaagtttggacgattatgcaaatgatcttgatatagatacaagccttttcaaagcaattctcagaaaactcgatttttccagggacctttttgaaaaaaatatgaaaacctatagcgacggtcaaaaaaagaaagttcttattgccggaagtctctgcgaaaaagctcatttatatatatgggacgaaccattaaactatattgatgttatatcaagaatacagcttgaggaattaattttaaattattctccgactcttatatttgtagagcatgataaagctttcacggataagatcgcaacaaaat

SEQ ID NO: 3798 - DNA, 11423 bp, Unknown
  16S sequences of unknown bacteria
gctttttcgtcaaaagcggtcggcaagttttaacgtcccgacaacgggaacggtcttaaaaatttttctctttaaaacgcggcggcaacggaagttttcccttcccctttcctatacgtacagaaaacggctcaccacaacccgcagccgagatcgttttggaatgcggctgctattttctcgtaattgtcgggatagtcgtaatagaaatacgtctgcttgcaggtattgtccgcaaaataaattttgacgaggaatcctgcgccgtcgtcgacgacaagctgtgtttcgtaacgctccgcccaggaataaaagccttgtttttctacatattcaaaaaagtctttctcgtcggcttcggaaaatcgcgcttttacctcgggcgtattgaattccgcccgcagttctgcgatatacgcttctcgttccgattccgtcgcgtcgggagttctttcttcgtaaagagagatccacgtttgaaaatcctcttcggaaagctcggtttcgtccgtgacgatattattttcaaagtcgaacgcgcgtatatagcgccgggaagaaaacatctccattccctcccaggagatccgctcaatccttacgacggacgcgccttcgtaaggagatttcggcgcgcaggcgcccgcgccgcagagaaggattcccgcacagaaaaaagctgcaaaagtttttcctttttccgaggaacttttttcatttctcattctttattcccttccccaatcgttcgcccacgcccgcgcgatcccggccgaccgccgaacaaaaggcgacgaatgaaaatctttaaaaccgcttttcaaaaaacggggtgccgggcaaaactttcgcgcgcttaaaagtcggatctcaaagcgccgcctgccgtttttcccttttccgcgcagaaaatcgcctttccgaataaaagatttttcttttctctgcgtccgtacaatcgacgctttgcctttttactcttttacctcctgcgcatagggcaccgcagggcgctccttgccgtcgtacagctcgccgatgacgcgcacgaggcaggaattgagatattccacaacaaactcaccgacgacgggtttgtcgtgtccgttcccgattccgctgtcatccgtcaaaaacacgtacgtgccgcccgtaataagagccgtggaacgcagtacgtactgcgtcggaacgtctacgccgctcgccgcgacgggaacggcggcaattcccttttccgcggcttggtatacgagcgttccgtactcgccgcggatatcccgtttcgtgccctgttccgttgtggaatcgtgcgggggcgcgtcgagaacgggaacgagaattttgcgcgcgtcctcccgccaggatagacccagggtttcggcgagcgcttcgtgcaccgcctcgggatagtccccgccgcccgcggctttctgctttttcaagacggtttgctgcgccgagatatccgaagtgaaatcaaaacttttgacgacgtactcgtccccgaaatcccgataaaataccaatccgagccgaatatccgcgttcggcagttccgtctgtacgcgggaaatgacgtcgcccacctccgcttgcagataaccgagttcgtcgcccatagaccccgtcgtgtcgatcatgaagcacagatcgagctgcgtaaaggcgcggctttcctccgtcagagtcacggtatatccgttttcatccgcctgcgcgcgggcggttaaatcttcgccgtagcccgcgatcacgtcgtattcctcgacggaaagggaagggaacagataggcttttccgttagcgtccgttttcgcagcgcaataggcgccgacgctcgcttctccttttgcgaccagcgccaccgacgcgcccgcggcgggattgccgtccgcgcccttcaccttcacttccacgcggcgcaaaggactcattccccacgtttcatgatgcacgacggcattctcgtccttaccccacacctcgtcctgcgcatacggcgtaaaaatgttttccttatagataaggacgtcgggaacgttgccgctttcgtcgggctgcggcgcaatgatctccttatcgaacaaagatttaaaaaactcataatttttattgtcgttccactcgcccgcggtgagttgccccgcctgcggaagcggccgttcctgcgttccctcttcctcgcccgcggaatcgggagcgcccgtttcgtaatcccccgccatatctcccgccgcgcctccgtactttgcgtcgccgctcgcgccgcacgaggcaaacgcgaacgccatacataatacggcaaacgcacacggcaacattctcctgacaagtcccttcatcctttttccctcctaattttttcgtttataaagttcctttaccggcacaccacttccacgttttccgcgctcgtcctctccgtttcgatgagaaaacaccacacgttgatggcgccgtcgcaatcgccttcggacggaaaattccgcgctatcgtcaccaccgccttttcgtttgaaaccgtcacttcctccacgttcacttctatgctcctcgacggctcgaaacggaggaggacaatcaacgttttcgccgtaaaatagtccgaatcgtaagcggcgagcgcttctttcagcggttcgctttgcgccaatgcatcggcatacgaacaaacgtcttcctcgcttttcaaaatcgccgttttgagtcccgcgcgttcgtaatcgccgtaatggagcggagccgtgacgacggaaaaaatctttgcgccgtaattcggcgcggtcgttgagaaagaatcctttgcgccgcagcccgtaaacgccgacgctgtccataataaaaagagcacgaccgcgcttttcaaaacttttttcatcttgttcccctctcctaaacgttaaaaattttattcgtttccctccgacagggaatcggattgcgaagagtcttccccggaagattcttcggacgagtccgaaggaaggacatcgtcgacgtcgaagctgtatccggcttctccatccgcgcccgcactccccttgccgccgaaagcgcgaaggacaaaggcgacgggcagcgacaacacgagcgcaaaagcgacgacgacgccgcagacgcggagggcggcgcggcgcctgcgttttttcgcccgctcgtattccccgattttttcaaacacctcgtcagaggtttctctatatgttttcatagtcgaatccctccgcggtcaaaagctctctcagcgcagccctgcccctcgccaaaaggttatacacctgtttcttccgcctgcccgtgacggcggcgatctcgtcgggggacaactcctcgaaatactttaaatacagcgtttcccgatactcctcgggcaatttttccagcgcgctatgtaccgacgccgcccgctcctttcctaaaagcgcactctccgcgtcctccttcgcgccccttgcttccgcggctttcagcgggcattcccgcctgcgggaccgctgtttgacggcgttgagcgccttgttgcgcgcgatcgtgaaaagatatgtcttaaaggaggcgcccctttcgtcgaagggctttttccgcttatacagctcgaaaaaaacgtcgatttccacgtcctccgcgagcgctttgtcccgcacatagccgtcgatgaaggcaatcagggcgcgctgataaagagcgacgagctcttcgagcccctccttatcgcccgcaagaaaacggcggtagcagccgatgccgttgtcctcccccataccgacctcctttgcgcgttcggcggggcgttttctcatgccctttcacctattaaacaacgcccgcgcgcgctttactcagctttttacgaaaattttttgtagtctataaagtatcccaggtttttctgccgagaaagtaggaatcctcattgcggagagaaagcgctctaaatagatccgcggccatggcagtagtcgtaataccagcacttatagggagattcgcattgcctgccgacggaaatttttggttcctccgcctcctgttttttcagtttcgaaaacgtccagatattcttgtccgccatgcgttcaaagaggcgcgcctccttcgtttcgtccacgattctgaacgtcacctctgccctgcccccgtcctcttccctttccgcttcgttttcgccgcgcaaaatgagaaagcagcgttccaggagcaccccgctttttcggatgagatagctctgaaagcccagatcgatgagaaattcccttcggggacgaggagcgtttttcacttcgtacagttcgtatccgctcgcggtctttttaagaatatccgccgcgcaataattgccgtaccaggaaaacgccgcctcgcagatgacgggcgtgcccgccagcaggcaccgctccgtccgctctaacatcgccgcataatccatgcgcccgtcgggacggtaggcggtggtttccacatagtccccgaatatcgccatcgccttgtcgccgaattcgttgccgagatcgagtcggcgctgcaccgccgcgggaatgtatttttcctcgggtttatgactgtccagccaaagcattttggggcattgcagtccccgcacgaagtccgttttcgttacgcccatgatccctccttctcttttttctccattataacaaaaaaacgggatttgcgcaagcgggcagccgcatttcccctatttccgtgaaaaaagaatgaatttatttaacctttcaatcattatgttaaaaatcgggtgaaatttaccccgacggtattgacaatcgcttcgaaaagtgctacactatttattgtttgaaaattaaatttttggaggaaaaacatgaatcgtttacaaggcaaaacggcagttattacaggcggcaactcgggcgtaggcgaagcggcggcgcttctgttcgcaaaagagggcgcaaacgtcgtcatcagcgcgaggcgcgcaagcgcgctcgacgccgtggcggaaaaaatcaaagccgcaggcggcagcgtgctgaccgttcccaccgatatctcccaggatgcggactgcaaggcgctcatgaaagcggcgaaggacaaattcggcgccatcgatattctcgtcaacaacgcgggcgttttggacacgggtctgaaagccatcgataagtatctcgacgaggacgcggaaaaggtcatcgccatcaacgaagtgggcaccatgcagtgcatccgcgccgcgctcgaatatatggaaacgggcgcgtccatcgtcaacgtggcgtccgtagcgggctataacggcggaggcggagccgtttacgtcgcttccaaggcggctatcatcggcatcacaaagcataccgccctgctgctcgccaataagtatatccgctgcaacgcggtctgcccgggcaatatcgccacccccatgaccatgggcttgaatcccgcggcgctcgatatgggcatgatgggcgccatgagcaagcacggcgatctttccctcaaatcctgtcaggcggaggacgtcgccaatatccttttgttcctcgcgtccgacgaatccaaggcgcttacgggacaaatcatggtcagtgatttcggtgtgaatctgtaaccttctaccaaaggaacagtgatgaactttgacggttttaacgggattgaatggcaaagcaactcccatggaaaacaaggccgagatttttggttacgttttttcgttgtgttgatgatggtatttttatcgataggatttgcgatgtggagcaaaaaaccttggggactttgcccgctcataatttctacgttcctaattgcaatctatgcggggttctattccaaaaaagcttgttggtataattctaagatgatttttgcggcaagtaaccagggaattatgttttcccagaagctgaacaattcttacttccatgaaaccttcgataatgtttccggttatgcctatcgcaacgaaacaagtaatttaacttccgtgatcgtttatttcaaaaagcccgcagaggcaggtgccatgggaaggctgaaagaaataagaatgatcaaaattgaaaactttgacgacttaaaaaaagtgttggaaaataataatattccacaaacgccttatccgtccaagtaaattttaacagtcttgccgcaaaaaacagagcgtgaagcctatcacttttttactgtgaggaataaaaaactatctgtcaatagagccgcgaaaaggtaagtaccgatagggatcttattccaaagacgggcaaaaaaaatataatccactatacgtcccaagggacgggtagcggatttttattttaagcgatattgccgtcccatcctcttcgatattcctcgcgtccgacgaatctaaggcgcctgcggacaaatcagggtcagtcacttcggcgtgaatctgtaaccttcaaaaatttacccctgcccgtgcgaacgcgcaattttcgcggtcagtaaaataaagtctgaaaatcaaataacccctttttcaaacgaaaagcaaataacggcgagcggcttctgctcccgctattttctatttatgaaaaaacgccgaaaaaaacaagcgtgtaaagatccccgtttgaaacctgcaaaaatcctttcgccctatttctttttagacgcaaaaaaagcttgcctttttaagaacgccatgctataatttagtatgatatcagaccaatcgggagggagcggcatggcagtcgataaagaagtcaacgaattggtgaacgcctattgcggtctgcgagacagacagcacgcggtttacgaccggtgtgcgaagcgacataatctgaccgtcaacgaattgtttgtattggacatcctttggtttgcgcccgacggctgcacgcagaaggaaatctgcgaacgcctttccgcaaacaaacagacgatcgcggcgattacgggcagatttttgaaaaagggatatattcgtatggaagaggtcgctaaggacaggcgaaacaagcgcatccgttttacggacagcggaaagacttacgcgcagaccgtcatccctcccgccgccgacgcggaaaacctcgccatggcggaactggggataaaaaaaatcgccgaactcgtgcggctgacggcggcgtttaccgaaaatatggaaagggaattttcaaagctgtccgctatataggaattgggagaaacaagctatgtattcgcttttacttgctcttatttatatcgcttttatcagcctcgggcttcccgattcccttctcggctcgggctggcccgtcatccataacgacctgaacgttccgatctcctttatgggcgtcgtttccatggtcatatcgggaggaacgatcgtatccagtcttttttcggataaattgacgagaaagctcggcgcgcgcatcgtcaccgtcagcagcgtatttcttacggcggtcgcgttgtttggattttccttttccgaccgattttggatgctgatcgtttttgccgttccttacggtctgggcgcgggagcgatcgacgccgcgctcaacaactacgtcgcccttcactatgcgtcgaaacacatgagttggctgcattgtttttggggcgtgggaacaatcgtcagtcccttcgtcatgagctacgctttgacaaactcgacatggaatcaaggctatcgaatcgtcggctttatacagctgggcatcgccctgcttcttctcgccacgctgcccgtctggaaagtccatcaaaacacgaacgggcatcaggaaacaaaaagcctcgggttgaccggcgcgctgaaaatcaagggagtccccttcctgttaatcggctttttcgcgtactgcgccgcggaagccaccgcgatgtcctgggcgagcacctattttgtcgaggtgaaagggataaacacggaacgcgcggcggaattcgcttcgctgttctatataggaatcaccgtcggaaggtttataagcggattcgtcacggacaagctcggcgacagaaaaatgatcgtcatcgggacctgcattttgtcctgcggagtcatttctctgctgattcccacgagctacgagatcgtatcgctgatcggattcgtcgttatcggattgggctgcgcgccaatctatccctgtatcatccattccacgcccgacaatttcggcgcggaaaattcgggggcgatcatcggcatccaaatggcgagcgcctatgtcggctcgacgttgattcctccgctcttcgggcttctcggcaatttaatcggcttcaaaatactccccgtctatctcttagtgtttattattctgatgattacgatgacggaattaacctttaaagtcacggcccaaaaaagcgatcgggaggaaaataaatcgtgattatcaacacgggcggacgaacggacaccgttcaatattatacaaaatggcttttaaagcggtttgaggaaggatacgtctattcccgcaatccgctttttccgaataaagtaactcgctacgaactcacgcccgaagcggtagactgcgtcgtattctgttctaaaaactatcggccgatactccccgaccttccgaaaataacgagtcggttcaatacctatttccactataccatcaccgcttacggcaaggatttggagccgggcgtaccgtctgtcgaagagagcgtaaaaacgctgaaagagctgtcgtcgattgtcggaaaacagaggctcgcgtggcggtacgaccccgtgctgctcacgaaaaaatacactctttcctcgcatatagaaacctttgcgcaaatggcaaaagagctggcgccctatgtggacaggtgtattttcagcttcgtggagatgtataaaaagctcgaaatcaatatgcccgaacttatcccccttgccgaaaaagacaaagaggctctggcctgcggtctgggcgcaatcgccgcgaaatacggattgtatattcagacctgcggaacgaacggggactactcccgatacggcgttcattcgtcggggtgcatgacgctggaaacgctgggaagagccaacggcgtcgccttcaagaatttgaagcataagggaatgcggcagggctgtcgttgcatagagagccgcgacatcggcgcgtacgacacttgtctgaacggctgcaaatattgctacgccaataaaaacccgcaaaaagcgtttgaaaaccgtactcatcacgaccccgattccccgctcctgctcggacatctcgaaaaggacgacgttctcgcggaaggcaaccaaaagagctttctgctacacgcggaaaagggcaaacaactgcgtttcgaatgagaaaaagaaagcgactcgacgacggcattttttaagccgcaggaatcctcccccgcgttttgcgggggagttttattttcgtgcggacgacggcagaggcttaaagccatgcccaagatgttttcccgaaggagcgcttacagtttacagcaccaccacgggcttgatgaggtctttgggcttgtccttcatcagcatcagcgcctcttccatatgctcgaaacccttgaatttgtgggtgaggagcttggaggtgtccagccgtccgtattgcatgagggaaacgagtttttccatgcgcagtctgccgccgggcatcagcccgcccgcaatcgtcttatgccccatgccgcagccccattcgacgcggggaatgcgcacgtactcccccgagccgaggtagttgacgttgccgatccgtccgcccggcttgaccattttcaccgcctgaataaaggtgtcgttgtcgccgcccgcgacgatgaccttatcgacgcccttgccggccgtcttttccatcacctgatcgacaatttccccgtccttatagttgataatgtccgtcgcgccgtaaaatttcgccgcttccacgcaattggggcgggagccgaccgcaaacagcctgcccgcgcccttcaacgcggacgccgccaccgccatcagtccgacgggaccgatgccgacgacgcacaccgagtcgccgtattccacttgggcaagctccgcgccgtgaaagcccgtaggcaccatgtcgctgagcattacggcatccgccacgttgacgccgtcgggaaggcgcgcgaggttagcgtccgcttcgttgacgtggaaatattccgcgaacacgccgtccttgaaattggaaaatttccagcccgccagcatcccgcccgaatgcatggaatacccgccctgcgcctccaaactcccccaatcgggcgtaatggcgggaacgatcaccttatcccccgttttcagatccttgaccagctttccgacctcgacgatctctcccacggcttcgtggccgagaatcatgtcgcggcggtcgcctatcgcgccctcccagacggtatgcacgtccgacgtgcagggcgataccgccagcgggcggacaatggcgtccaaggggccgcactcgggcacttccttttctatccagcccgtttttccgatgccgagcattgcgtaacctttcattttcatatcgatttttcctcctcgaaacaaattcgttgcctatatcctatcacgtccgaaaaggaaaatcaacgcgcgttttgcgcttttttgtcgggttttgcgaaaaatcgctcccgcttttgcccgctttttaacgcacgcctgtattctttttccgaaaacccgcgccgcaaaaaacaacccgtattcccttccgtttccccgcaagcttgcgccgcgaaaaaacaacccgcgcgcttgtcgtttttttcaaaaagggcagtaaaaacaaaacgttccccgctttgaacgacggggcggggaacgtagcatattcaaaaaaacgcttattcgcgacccgttcccgcaggatccccgaacgccatgccgcgcttttcgtgcggcttttttacttcgcccgcgtttacctcgtccgaatccgcttccggaccgtaatcgaatacctgcccgtagttttctttatccgcttcgtcgatcggcatcccctgcatcaaccccgtgcactcgttggcgctcgcgacgtcctcgaaaatcgtttccgtctgtgcggacggttctttctcctgcgtaaatttcgtttctttattcttttccatgtttacagtatgggaattttatcgcgaaacgatacctccgctttctccgcccgccccgccgaaagattttctgtttcggacgaatctttcgcttccctttatctccttcctcctttttccgcattttttcaaatgacgcggacaagcttctttctcccgctcggtctttccgcatttttctttaaacgcttcggacacaaacgcccttcctcagtcctttccctacgcttcgccccaagagttgcccgccccttttttcggacaattttcccgccccctcttttaaaagcgcggacaggctttcgccc

SEQ ID NO: 3799 - DNA, 4730 bp, Unknown
  16S sequences of unknown bacteria
aaataaaatatatttaaacaaattatttcctattttctattgtaaaaacacccaacaaatttatcttattgagaaaacttttctttttcattatatataataaattaatactatgtttgaaaacataaaaatataaaattctacattattataaatgaaagtaaagcccaaatattttccataaataaaattcctctatttcggaagctttgattctatatatggtatagaaataggaaacatatagatatcatgatacaatactctatccccacaatattctgttaataaacagctttgttcatatccggaaatagtaaaatattttatcttttttacttttttcgcagaccgcaggaagaatacgcgtgaaaactttaatatattatagatgcatatcttccgtttataacatttattatgtttcttaaagtgagtatcaaagaacatctgtcacaatgatttcctttttggagtgtaaaaagaaaaaatggattctgtatatacagaatccattttaaaaaagactgcaataaaattatctttttgagaactgtggagctctacgtgcgcctttaagaccgtatttcttacgttctttcattcttgggtcacgagttaagaatccagcctttttcagagtaggacggagattctcagaatcatattgaagcaaagctcttgcaacaccatgacggattgcgccagcttggcctgtaacgccaccgcctgcaacacgacaaacaatgtcgaatttaccttctgtttttgttagatttaatggttgacgaacaattaattttaatgtttccaaaccaaaataatcatcaatatctctatcgttgattgtaactttacctgtaccttggtatagtcttacacgagcaacggagctttttcttctacctgtaccataaaaataagactctttgttatacatattccaatcctcctctcttatttatcccaaactgttggttgttgtgctgcatgaacatgctcagcacctgcgtatacacgtagtcttgttagctgttcacggccattgtgtgtgctaggaatcataccttttacagccaattgcatagcaaactctggtttttcagccattaatctgtcataacctacctcttttaggtgaccaacgtaacctgtgtgacggtagtattttttgttttgcaacttattacctgttaaaacagcatcagcacagttaatgatgataacatgatcgccaccgtcaacatgtggtgtataagttggtttgtgtttaccacgtagcaaaatagctgcttgagcagctacacggcccattggtttgcctgctgcatcaataatgtaccatttacgctctacttggcttggtttttgcataaaagtagacattgcatttcctccaaacattaatattctttatcattgatagctcccattttttaggttgggaaatcgttcaaaacactcataagtgttaacatgcatttatgatattaccatacacgatttacagtgtcaacccctaattttcatttttttaatttaccaaataaattgcttctattatctcctgttttctctttatatctcttatattctcgattgtcatttttaaaaaattattttacttttataaaaaatatgatatgatatgcgtaatttaaaaatcgcgttacaccgcagttatgcgctattttttcatatggaggtcttttatgcagcaaattatgagccaaatacgagctgccgttgacagttatcaattaatccaatcgggcgaccgtattgcagtgggtatttccggaggtaaggattcccttgttctactctgtgctttagcgaatatgcgcaaatttttaccaatgaaatatgatttggttgcaatcactgtagacccttgttttgataatatacaaactgactttcgtcaggtggaagaactatgccgccggctacaaataaaatatgaaatacgccgttctcaacttggtaacattatctttgaacaaagaaaagaaagcaatccctgcagtttatgtgcccgtatgcgccgtggtattttgcatgatatgagtaaaaaacataactgtaacaaacttgcgctaggacatcattttgatgatgctgtgcaaactttttttatgaatctgttttatggcggtaaaattggctgtttttctcctatgtcatatttatccagaaaagatttatatttaatacgtccaatggtgttttgtgaagaaagcaaagtagaatctgcagcacagcgttaccatttgcctgttgtaaaaagtgaatgtcctgtagacggacatacctgccgccaaagtacccaagagctaattaaagatttagaaaaacaatttcctgatttacgaagaaaagtcatgggagcgttacagcgcgccgatatcgatggctggggaaaacacaaataacttttatcttgtgctgacatcataattttagtagaaaaacatggagaaattttaaaaatttctctgatacaaggagctttataaaaaatttgctcttgttttataggaaacaatatccagctttagaaaaaaggaatctatttatgaaactgctctcttttccgttttgaatcaataaggcagaccggaaggcctcttatgtatcatcagacatacgaatattgggacaaaatcaaatttcaatcaaaacagtatccgtttcaaaatataagtcggcggatttgaaataattcctgattataaaatttcaccatatccacagattacaaagcactcattttaatgggaggtatgtcttggaatataatatcgctttacaaatgggccacttatagagtaatgtcttctccaatcaaaaaattctggggaatttgtgatactaccacttttttggcgtcattggtgtattgaattatgctgcccaataccgaaggttttaaaggtgcgagccagtgcatcgttataccaatgaaaaaacttatatgtacaggcagactgtgcgtgctcataaccttattactacaaatagtacagggacattaccatttgcaaaggagaactgttagtatgaaagtatcttctgaaaaaacaattcaacagtggtatctttataaaccaggtacatcatatataaaagtgaaaatgcgtgagaatgaccgcttacattctcacgcattttttattctaaaataagatgataggttaccgcactcacagtaagtcttacatttctctattaaaaatatttgccatttgtcctactttttgcactaaatctgcaaaagcttcaatgcttaactgctgtgcagcatcactgattgcctcttttgcatttggatgcacctctacaattaaaccgtcagctccggctgcaatacctgccaatgccaatggagctacataacgttctttgcccgctgcatgagatggatcgataataattggtaaactgctgcgttctttcacaaccggcaccgcagaaacatccagcgtatttctggtagccgtttcaaaagtacgaatacccctctcacacaacacaacattgtagttgccttcactcataatgtattctgctgcatccagccactcttcaatggtattggcaatgcctcgttttagcacaactggcacttttgatttaccaatatctttgagcaaacggaaattttgcatatttcttgccccaatttggaacatatcgcaatacttaattgcagtatcaatttgttcggaagccattacttcacttactactttcagcccggttgcatccgctgcttttcttaatagctttaatccttcttcttctaagccttgaaatgaatatggagaggttctaggtttataggcaccgccgcgcaaaaatgttgcaccagctgcttttacgccaatggctgctttcataatacactcttcattttctactgcacaaggtccacccatcatgaccaattttttgccaccaatgacttggtcacctacgtgcacaaggcgtccgtctggacacatatcacggcttgcaagtttataagagtgcataatcggcacacagttttcaacgccgtccaatagggtgatatccaaaccgcccagtttgcttttatcacccaaaataccaataatagttgcttgggtaccttcagatacatcggcacccaatccacatttttttaatgttttcactacttcttgtacattttcttttgtacaattttgcttcattaaaataaccataacctaaaaccttcctttctaaaagtagcctaagactattttacactttaaagcgataaattgcaagtattattaaagaaaaaagcgaacaagatgaaaagacagttaaatccacaaaaaagtaagggagaaaggaaccctcaaaaaggctccttctcccttgcatactgaaactgtaaacagcagagcagttgtatttatctgtcaaagaaaaccatacgtgctgttatctctgctttttacctttggaaagcgtatataaaagcactcctgctgcacatgccgcacatatacttactgctgtaataactgcaaccatactgtttgtatctcctgtccggggactatccattcctcctgttccttccatatcctctgtctgagcaccgttcattccacctgtctcaggagtttctcccggtgcttgtggttgttggctttgggcaaataccacttttaccgtcactgccgctgacggcatttggaatgtatattgat

SEQ ID NO: 3800 - DNA, 17557 bp, Unknown
  16S sequences of unknown bacteria
acatcttttctcagcgtaacagtatcacctgacttcgcagctttaagagcctctgacagagtatcatatactactttgccgatgctcgcttcagcgtcttcattttcagcttcggcaatagtaacgccggacagatccatatggaacttaaacacatcagttattgcagtttcactatcattgaaaaattgtactgcacaataagtcttaggattatccgcaccggcattgacatagaatgcaatgccgtcattcgagccgtcaacactcgcttccagagccgatgcctcgctcagcgtaccgagtcctgcttcatttgcggcaaacgcatacttcatttttgttgccttttcaggcgcaattaccgacaatccgcaccagtaacccagagtgccctctgcattagtgtgctgcttgaggttcgtaattgcgatcgcaatctcattgacaatgtccgccgtaatgttttcaggtacagtcactttgtagctgtctgcatcatacagttcacctacatcatttccactttgatccgcaataggcgctacagcaatatcttttgcggcgagcgcgtattcatagcttacctcgatattcgcagttccctctgccaatacagcaggctccccttcggaaacaactgtctccaaacggaatgtggcggtatagatgccagccttatcaaaagaaagcgtcaaaggcgtttctgcattatagttagcctctactttaaagccctcggccggtccccactgcttagtttctgctaaattatacgtattttccattgtgtctttcgccagaatctgaggtttagccccctccggagccgtcacctcaattttgatcaccgcatgctcgtatgtttccgcatcttcggcgcccttcagcgtagcactggcctccgtaaactcctcacctaccgtcattttttcaggcgcagttatcacgaaagaatatccgctttcttgcactgcggaactattttctcccgatgaatcaaccgcatcttcaccgcccgctgcaaatgccgccggcgccatcgtcagcaccatgaaaagagcaagcaatgctgacaacattcgttttttcattgtgttctcctcctttgttgatggactgttgcaggtttataacatcctcacaaacctcaaccacagtttatttggttcagctctttaagtacaataactgaccttttcaggaaagtgtaccttttagtaaactgacttattaagcccaaccattaccataataacatggattcgtagattttaccatacccgatgagcaaaaagattcactgttccgcgacaatagaaataattaggaaatgcttactaaaacctacactttttagtaaacctgtttcaattacaatttggcagacttttcgtaaattcccacacgataaagaaatgtagaaagcggcatattgcaggctttggccgccgctgttcctgttagctttccggatctccattgctggtgaacgctgttaaagttttccggcagcggtttaggcgtccgcccaaactgtacccctctggctttggccgccgcaatcccctccgcctgccgctgacggatatttatgcgctcattttctgccacaaaagacagaacttggagcacaatgtctgataaaaacgttcccattagatctttgccccgacgggtgtccaaaagcggcatatccagtaccacaatatcaactcctttctctttggtaaggattcgccattgttccaaaatttcctcataattgcgccccagacgatctatactttttatatatagaatgtcgtctttttttatgcgccgcgtcagttttttgtaattaggccgctcaaagtttttgccggattgtttgtccatatagatgttttgttccggcaccgctatctcctgcatagcaatgcgctgcctgtcttcattctgctccctggtgctaacgcggatgtaaccgtagatctcgatcttaccgttctccaattcgcctctgccatacaatatcatagcctaaggcatcggccagctcgacagcctcgtggtagcgcagggagccgcgcctcagcttaccggacagattgggaaggctggcgctccatccgtacttatccgccagtttctccaacacctcgttcatggtcataccctcgcgtacgatgtacgctttgatttcgtttcttgtatccataaatgtatcctcctccttttgttatcttaccggcaccctgtcctgcccatgcaggcaggatgctctgctaaatacggccttgcggccgatacccatttgatagaaaatgcttctgacaaccctgtccaagggaacgtgttttaaatttcacaattcaacgtaaaatcgcacgaaactataaaaacgcacattcagcgacgtaccctgtttgccgccgggcgcaccgctgtttgctgtgggtttcgccataaaagttgcattctgctcatccatttcattgctccgcatcttttcgccaaagctgcggttttgcgaaaatcctgttatgacctcgcttctccgtatggcatatctcttttagatgtttatatgtttttcaagctacactatatcctgacacatatattttagcaaaaaaaaatgcctggcctcccatatatccaagaaaacggaaaataaaatccttaacgtatataataactgccgggaccgaactaacattaaaaacagcaaaaaaggcgaaaaataaagaaagctctgtatatttaccatatggcaaatacatagagctttcttttataacaaacctgtctgtcagataccttgcgctcacaattttttcaatttatcgtcttaccggcgctgtccgcaaaatgcacattcttctttttatgtcttaaaacgcccaattaccgcgctcgaatatctgcacgcgctttccgtctttcgtaattcccactacagaaagatcctccgtaccgatcataaagtcctcgtgaattatcgagtcattaacacccttttctctgcactcttcaagtgtatatttatcgtaatctttgatgcaattcgtaaatcccataccgagtgccaagtgacacgccgcattttcatcaaacagcgtgttgtaaaaaacaattccgagcttggaaatcggtgaatcatatggtacaagcgcgcattctccaagatatgccgcgttctcatccatcgaaatcagcttcttcaaaagctcttcgttcttttccgcgtgcacctctacggccttacctttctcaaaccgaatccaaaaatcctctataagctcaccttgatacgaaagcggcttgctcgcataaactataccttctgcttcacctttcttcggcgatatgaatacctcctccgacggaatgttggcattaaaatctatgccgccgagcgtcttttcgttggctccgagaaacatcgaatcttcgataagcccaaccttgaaatccgtcccgtttcccgctttatactcaagcgccgtaagcttgagcccgttaagatactcgcactttgcagttaaatctctattgtgctcctgccaagctgcaatcggatcctcgtctgcccgcgccgcaaagagtatagccttccaaagaagttctattgcagtattttttggcacacccggaaatatcttttttgcccaggctgctcccggtaccgccgcaatacaccactgctgcctgttttccatcgcatctttataaggttttattatcggatattttgcctgtcttgcctcggccattttctcctgatttactccgacaagcccgtcgggatcttctgacattatataaagctcgcatggcaatgtttccgactggtacttgagtttttcctcttcccagcttgtcacttccgacagcgttttcaaactctgatgttttacatgcagttttgtgagcggctgatagctccattccaccattacttttcgcgcccccgccttataacattcgtccactgcatatttcacaaactcaggctggtcgagctctgcgcggatgagcacatcttgtcctttctgcacattcagtcccatcgtcacaacaagttttgcataattcttaagcaacgtctttttcatattacgtctcctgttttctttcctgtatttattgtttatatattaccacattttgtgcagaaatacacataaaataccatcctcactttgctccgcaaacgctgaccgtgctccttaaatgccagccgcatctcccgaataccttacagctgcgaaatatcttttttgtatttctcaatatctttcatttcaactatctaaaaataaagctaatttacttttttctacagacaatgataaaaaaagcgcgggagcattatcacccgcgcaaaattcggttttgccattttttatctgtcaaattgcagtatgcctataatcccgattacaagtcttctgccattcttctgtaggccgcgcgttttttcgccttatacactgccttgacaataattatggcaagtatcgcggcaatcggcggcagtccccactttacaaatgagcctccttttgccattacctcggtccatagttgatccatcagcagatttgtttcctcagaaagatggataaactgctctgagttttctatgacatactccggaggatatatggcctcgtcctcctgcacttcggaatcgagaagcgcatatgccgcaaggttaggcgtggcatagcctataaactcggcattttctgctgccacattgggctcattaaggaaatttataaacatttccgccgcctccttatgctgcgaattcttaggaatgcaggctgcatctataaacaaattcgtaccctcttcaggaaacgccactgctatattttcgttatacggcatcatcagcgtcgcatcacctgcataatatggagcaattgcggcttcattgttttccatcttatcaaatatttgatccattacatatgcctgcacgagcgatttttgctctattaaaagctccgcagcttcgcgcagctcctcttcactctccgtattcatcgaatatccgagtttcttgcaagctatagcaaacgcatcgcgcgaattgctgaacatcagtatctgccctttatacttttcatcccacaggatatcccagcttgtcggttcttcgtccactaactctttattgtaaattatcgccacggtattccaggtatacggcacactgtaacgcgatcccgggtcgtactccggatctgaaaactgcggatcgatatatctcatattcggtatattgccgtgatcgagcggcacgagcatatcttcctctatcattcgcgcaaccatataatcagacggaaaaattacatcgtaaaccgtatttccgccttttatctttgcgtataactcctcattggtggcaaaattcgtgtaatacaccgttatacctgtaagctccttaaactcttcacagatatccataagatcatcgctgccatccgataaatactcaccccagttgtagacgcttatggaaatatcctcaccgcgaaagcgtccgtaatactcttcatcataatttgcttcatattcttcatcactggcagcttcgtcatccgtgtccgcaaaaacaatcggcatcactatcgtgcctataacgagaagcagcgcaagaaacagcgcgagaacgcgaaaaaccatcttgccattcctattcatcaaacgcagccccctttcttctctgctgtttttcacggcgcgcatcgttgacatttacaattatcagcaccgtcagcacaactatgaagattatcgtagaaagcgcgttaatttcaggactcacccttcttctcaccatcgaataaatgagaatcggcagtgtctggaatttatcgccgctcacaaaatagcttacattaaagtcatcgagcgagaatgtcagcgccatcaaaaatcccgtgactattcccggcattatttccggcagcattacttttacaaaggccatcgccggcgtacagccgagatccatcgccgcatcgaaaaggtgtttgtccatctgtctcagtttcggcattacggacagaattacatacggaatgttaaatgttatgtgagcaagcacaagcgtcaccatacccgacttcataccgaaaagcgcaaagagcagcattagtgacacacccataactatttccggactgacgataggaacatatgtgaaattcataattgccgactgcgattttcgtttcatcgactgaatgccaatggccgcaagagtaccgataagggttgcgcatacggccgatactaccgccactatgagcgtcacggcaagcgcactcattatcgcgtcgttgtttataagctccttataccagcgcagactaaatcccgcaaagtgactcctgcttttgctcgaattaaaagaatagagtatcatcactgcgataggcgcgtaaaaaaatatcataatcagcattatataaacgccggagagcacgctgtgcgattttttatttttcataacagcagtccctccttttcctcagaattgcggaacaggtctgtgagcgccatacttactaatataatgagcatcagcaccatcgagatcgccgcgcctaaattaggattataggcgttgccgagaaattccatttctataaggtcacctatgagcataaatgagccgccgccgagcatacgcgaaataacaaatgtcgacaccgatggcacaaataccataataatacccgttgatatacctggcatcgaaagcggtaatatcactcggcgcatagtatcaaccgcactgcatccgagatctgccgcagcttcgatgagcgagttttctatttttaccatcacggaataaagcggcagtatcataaacggcaggtagttatacaccataccgagcacgactgcaccctgtgtgtttatcatttcaaacggtccaagcccaaaaagtccgaaaaatttgtttacgagcccattgttttcaagcagcgtcatccatgcgtatgtgcgcagcagaaaattcatccacattggcagcattaccagcatcaccattgtgcgctgtctgcttttcgagcgtctcgaaatcgcatatgcaagcggatatgcaagcacaaggcatattgccgtggcgataatcgagagccatatcgagttgaaaataaccggcgcgtattcgagtgaatttttaaaattatcgagagtaaagccgccgctcgtgtccgtgagcgcaaaaatagccacgagaataagcggtataattatgagaataagcgcccataaaaggtacggcgccgccgttatttttgatttcatagcgcgcctcctattctgcttcagccgctgcgtcttctgcatcctcaattatcgaatctgcttcgagcgcgccgagctcaagggtttcgtctttccccattttattcattatatgtatgtattcaggaattatagaaagacctatgcggcttccgggacgatgttcctgcgtcgtgtgcaccataaatttaacgctgcccgtatcgacaatattctcaaagtgaacgcctttgaatacagttgattccacgaccccgttaaatataccgctgccatcctcgcttatttcccagtcctccgggcgtattacaacatcgacaggtctgttttttccaaagccgctgtccgagcaaggaattgtcacgccggcaaaggacacgacaaagtcttcgttcattataccgtctattatgttgctttcgccgataaagtcggcaacgtatgcgttgacaggctcgttatatatatcggttggcgagcctatctggagtatctccccatcacgcattacaactacacggtctgacattgtcagtgcttcttcctgatcatgcgttacataaaggaatgtgatttcgagctgctgctgtatgcgtttaagctctatctgcatttcctttctgagctttaaatcgagcgcgccgagcggctcgtccaaaagaagcacgcgcggatgattgacaagcgcccttgctattgccactcgctgctgctgtccgcccgaaagactgccaacctcgcgcagttcaaaaccgcgcagatttacaagcgcaagcatttccttgactctttttcttcgctcttcttctgggattttgctgattttaagcccaaattctacattttcatatacattcaaatgcgggaaaagtgcataccgctgaaaaacggtatttacttgcctcttatgaggcgggagtccgttaattttctgtccgtcaaaaaaaacatcaccctctgtgggttcgacaaatcctccgataatgcgtaaagtagttgtcttaccacagcccgacgggccgaggagtgtaacgaattctttgtctccgatatcgaggtttatcttgtcgagcaccctcgtgccgtcgaattcaacggatacatttctgagactgattaaagtatttttgttgtgcattttgtgcatccccctttgcggatttagtcatgcaggctgcttatctcctgctatggcccggagcctttgataccacgccccgcaaagggttttcataaggtggtacattagcttccgtatactgccagatgctcaatattaaatattgctaaagcaatcaacattgtatcagtaaacagcccaaaaatcaatgggtttatagaaaatagcaaatattttatttgttgagtttcctataagcttatgcgtcttaatttttatcatctttcccggtcttgtttgaccactaaattttttcataaaattttggttgacgaaaagtgcttgcaggagtagaataaatatgttacacatatcataatatgtaaagtaacgggatgtggctcagcttggtagagcgttgcgttcgggacgcaaaggccgcaggttcaaatcctgtcatcccgaccacatcggagcaaagtttgctttgctccgacttatttttttgacaaaaataagtcatccgcccgctttcttgctcttcatctttcgtgaaaaatcacgctcagttcgtctgctcgtttgtaaacgcactcgtaactcctcacaatcgctaccaacttttcacgatacagcgccttcggcgcagccaaaatccgctgctcctcctctttcgcaaaaaggcacgttcgctttgactattaggttttaaacgctatcataacgactttgcttcactaccgcattttgcgatattgcgtattttatgcgctcaaaaatcgctgatttcaatgtgttttttgtcaagttctgtaagatcgcccgcattagcaatctccctttttgctcaccgtatttttgcgtaaaaatacgtcttcatattatcatttgccgctacttttctgcacctttcttcatctatagttttttaaggcgaaacttgcagttttgccttacattaccttgatttttataaaactgcggtttataatattaccatcgtatatcaaaatactaatataaacgcttatataaaaaatagaaaggagaatttcactatgaagtatgtatgcaatgtctgcggatgggaatatgatgaggaaaaaggttatcctgaaggcggaattgagccgggtacgaagtgggaagatcttccggatgattttaaatgcccgttatgctcagtagataaaactcatttttcagaagcataaaccagttaaacagtcagcattacgcttaatatctgattgttttttaccagaaaaagctgcggcaaattatgagccgcagcttttttatatacaagtttctcaaagttcaaaattacattctttatcttttggcacgcgtaaatatatatctttatctttggtttatactgagtgtaatagtcacattgcctgttccaagaatatgtttcatttcttcctgactcacattgtctattttaccaaggcgcgttaatgaaaatgaatttgtatcgtaatatattacaaagctgctgccttgatataaaattaagtctcccgcctgtgtagttatttgttcatcatttgtcggaagcgtcgccccaagcggaccgactttttcaaaatttgaatagtcgtgcatatctatcgtaatctcaccctccgccagcagtttcttaagtgcctcaaccgaagagttttctgcaagtgtagccgtccattctgcattttgcgcgccttctacttttatatacaattttccatcagccatattgtcttcatcagccatactttttatcgactcataaatatcaagactctttacccaatgctcaacatcagcctgcgatgcactgccactgaaacgctgccccacaagccagctggcgccgcttgccgactttttcagattttctgcgctcgagccaataccgctgcctcccgatgtacagaaaggtacaatagttttacccgtaaaatcataactttctacaaatgtgtacataattttcggcgcctgtgaccaccagataggataacctaaaaatactgtatcgtaatcctcaatattgctgacggagcctgaaatttcaggtcttgcgctgtcatcgtgctgttctatattggctctgcatgaatcattgctataatctaaatcctcgcttgtgtaatgatcttgaggcactatttcatacaagtctgcatctatattgtcattttcaagcacagtatttatatagtttgctatattttctgtattatttgttgccgagaaatatgcaatgagcaccttgctgccggatggcgagtctgagccgtcttgatgtttaggcattggattatctatgtcgctctgcacgccgtcttctaattccgcattgttcataaggattgccgctacctcagcgcgcgttgccgcgcccttaggatcaaatctattatcgggcttgccgtttatcactccgtttgcgcttgcccaattaacagcatcagcagcataaggggagataccctcctcatctgcaaaatctcttgcctgcacattatctcctgtctcggggcgtcctgccatacgccaaagcattgtcactatctgctcacgcgttaccgaatcatttgttccaaaattcccattactgtaccctgttataatttcctgctgtgaagcccagcgcactgcatttgaataccacgcgctatcagcagtatccggaaaatcatcgcttccgctgacgtcaggacttcccgcctgtctgtacagcgctgtcgccagcattgcgcgcgtcatattaccgtttggcaaaaagctgtcttcactgacgccgctcataagtccgttttcatcgcaatactgtatagcctcggcataccacgcgttttctgaaacatcggtgaatttattttcatactctgccgcacaagctgttattaccgttgcaaaaatcataacaaatactaagaaaaatgcccccagatgctttatcatctttgtcatattaccacctctttcaattatctttattctgccgctttgttcacacacgctattgcgttaaggctgcgcggataaccgatatatggcaggcactgcgatatgacgcgcagcagaaaatctttatcattgccaagattcatattgccctttgcatgccctgtaagctgcggttcacagcctccctgcgccgcgagaaagcaaaacgttatcatttcacgctgtcttaaatcgagtccatcgcgcgtgtaatagtctccaaagcagtttgccgccagccagcgatttatatggctcgtcttccacatttctttcatatgctcaccaaaaatttctgcctgcgcctcagcacccttttccagcctgttttgcggcgttaccgtttgctgtccctcaagaggcaaagctatgccgcgcgcttcgaggatttcatttgctgccgtaatgaatggcagcaccctaccaattccaagataggctgttgcctgatatatgatttcctttacggaaacaggcggcagcccggcctcaagtgcctccggaagcacctccttaaaagcatctatgccgccgcatccaagcagcgttgccagaatagctgtataacggatatcttgcggcagctcctggccctcttcatttatgacctcatttaaggcaaaattctcaaatattctcgcaaattcagggtccttttcataaaaattcacaacaactcccccttttaaccgagcttactgtaagcttcatcatcgacaggctcacaccactcgtttcttgtttcttcaccaggaacctcaaccgctatatgcgaaaaccagctgtccgctttcgctccgtgccagtgctttactcctgccggaattgttattaccgtgcccggtacgaggctcacagcttcttttccttcttcctgataccagccgctcccggcagtacaaatgagaagctgtccgccgccgctctttgcgtggtgtatatgccagttattgcggcatcccggttcaaatgtcacatttgcgagaaataccgccgtatcctttggatttgtcagcggattaagataggaatttccgataaaatactgcgcataggcgctgttctcctgtcccaaaccaaatacattttgctttgcaaactcttctttactcatcgttttcataatgtttttctcctttcttttttcagtcctttactctgcacttctgtgctaagctttactttctttgcaatctgcaaaccgctgcttttctttttgcagttcatatcttaaatagtctatgttctctatacatctttccagttcgtgaatatcgcagagagtctcacttctttttcgtctcagcattgccattctcttctccgctgtattgcctccttcaagtaagaggcgtatatattcttttgtctcgtcctttccaaatcctatatcgcgcagtgtcatcataatactcatattctttatatcgctatcatcatacctgcgctcttcttttctttgtccggacacactatttacaaaaccattttctttacttattttacttccagctgcttcgctttcatattcttttaaaatttccagcggaatgccgtacttttcaattatttcttcctttatcattgctgtcccccttttcgcatctttccaaaataaaaatgcagctgtctttcaacaactacattctatatttaaacgtcaacaatgtctaatacctatattcaattattagtaatgcctaaacggcatttttaatatgctcaataaacattttagccgcatcgggcaacgcttgattctttttccatactaccaccgagcccgtttcacgcatcggcttcattggaataaagcatacatcctcataaaaagcgccgaggtcaaatccaagcgctgcacctactccctgctgcaccatcgccaccgcattgatgccgagattgtatgtagccgctatgttaagctcatcgtaataatcgccaaaccagcttgcaatttcatttctcacagcttctcgcatagacataatgagcggtacttcggcaagctcctccggcgttaccgcatccttttctgcaagaggcgagtcctttctcgcccagataccccatttttctttttccggcaagcgcaaaaactcgtattttcctatatccacaggctccacgagcagcccgatatcggcgatgcctttctcgattctttcttttatatcatcggcaatggcactgtatatgtcaaactgcaccagcgggtgcttttcccgaaacgatataatgcagtccgaaagaaatgccatgctctttgtctctccacagcctatcgaaacttctcccgatacaatttcgtcgcggtgtgaaagctctgaaaccgtcttgtccgcaagtgagacgagctcctgcgcgcgccgcttcaaaagcattccctcctccgtcagactcacattgtatttgcctctgttaaagagcttaaccccgagctcctcttcaagctgcatcagctgtctcgacagtgtcggctgcgtgatgtggagaagctgcgccgcgcgcgttatattttcttcccgcgccgtcatcaaaaaatatcttaaaacacgaagctccataagccgctcctttccctttatcatttttgatcagcggttaaaattataattctccgtacataataccacatatatataatgtttgcacgaaaaagtactcttcaatatcagcaagaataacaaattttaaaataatttggccactgtaaaaagtttattcgtctcgattttctttaccaatgaaattattctatattcatatgttataattagtttaaacacttaaacaaaggagttgatagttatggatattttagatattatgaagtctcgtcacagtgtcagacaatataccgacaaaaaaattgaggatgagaagcgaaatattcttgatgcgtttgccgcagagtgcaatgccgaaagcggccttaacatccagattatttatgacgagccgacatgttttaattccatgatggctcattacggaaagttttcgggctgtatgaattacatcgccattgtgggaaagaagagtaaggatttacaggagaaagccggctattacggcgaaaaacttgtgcttaaggcacaggagatcggtctcaatacctgctgggttgctctgacgcacggaaagagtatggcaaaaattgaaaacgatgaaaaattagctatcattatttccttgggctatggcgaaaatcagggtgcagcacataaaaacaagccgctttctgctgtatgcaatataaccgatgaatcgccggagtggtttgcaaaaggaatggaagctgttatgcttgctccgaccgcaatgaaccagcagaagtttaaatttgttttaaaaggcgatcaggttgaagcagcctccaccggcggcttttattccaaaattgatcttggaatcgtaaaatatcactttgaagcagtttccggacacaaggtgaactgatggataagagcacgatatctgcaaaagcagctatagaaaagttatcctccgattttaaaagctgtcagaaaatcctttgcgccatcggagacgaaaaccgccagcatctcattttggaaatgatgaagatggaaaaatgctccggtgtcagagtcggagaaattacagaaaaaactcatctttcaaggcctgcggtttctcaccatcttcaaattttaaaagaagcggggattttaaaagtaagaaaagaaggcacaatgaatttctattattttgacccggatatggcttcctttgaaaaactgataggaatgctgcaaagcgccgtcgaactcacaggagctcttcataatataaatactgaaagcgaataggagcgtatgtatttaaagagcatacgctcttatttttagaataatagcacagcgattttgcgccgccaatatcccttatgacaagatcatgctcaccatatttattatccggctctctgaaaaactctggcctgccatcaccgcgcttgcatcatccttttttcgctctttcataacttttcaactaaaaagttttccgtcaccgttaaaatcaaacatcgcgctaatcgtttattttatgtgaaatgaattagccttatctccatttgtatggtataatcaattgcaaaagaatactgcagccattccgcaaaagcttcaaccgcagctataagcacaaacttccggaaaaatgctaatttcatatcctgattgacggaggcatcacgtgataagaaaactaaaaacgaacgatatagataccaccatgagtatatggcttgagaccaatatcaaaacacatagcttcattccgcaaaaatattggttagataattatgcaatgataaaaacgatatccccgcaggcggaaatatacgtttacgaggatgccgccaccggccaaatatacggctttatcgggtttacagataattatatcgaaggaatttttgtaagagaagcctttcagtcaagaggcatcggcaagcggcttctggattatgccaagagcatcaaaccaactatgagcctgcgcgtttatcaaaaaaatacacgcgccatatctttttaccagcgagagcaatttgtaattcaagctgaaagcattgacgataataccagagaaaaagagttccttatgacttggagtaaataagaactttacccatgtgatataataaataacagataggagaacttatgatgcaatatgttaaagattcaaaagacggaggcctgcgcctcgttgaaaacagcgccgaacaagcaccgttttttacgattatgagcgccgcagattttcgcgaaagcaaagagtcgcttccatattatgaagaacttctcggctgtcttggctctattcgttattgcaaggcagaagtattcaaggattgcgtaatcggaacgctgcgcatacccaaaaagagcgcgcagcgactgccgcagctttccttcgtcttttgtctgacagagcaatcgcttctatttattgaggatacgggtgatttaaagctatgggcggaaaagcaaatgagtatgcttcaggagttatccaccccggctcagcttctcctgcaatttatggagcaaatgatagatgatgatgttctttatctttctcatatagaagcagaaacagagaaaatggaggagcatatcagtgctgacgattcaaaagacttctttgcttcgcttaccaaatacagacagaagttgtccgagcttaacgcctattatgagcagctaacggatataggcgagttgtttcagtctcccgcctgctccgcattcgtgcatgacgcccaggactgggataaatacatccatcgtgccgagagactgcaaaatcatgttcagcttattcgtgaaaatatgcttcagcttcgcgagctttatcagtcgaagcaagacgcccggcagaataagattatgggaaccctcacagttgtcaccactttctttctgcctcttacattgctgacgggctggtacggaatgaacttcgcacatatgcccgagcttaaatggcaatacggctatctgtcggtaattattgtcgctgtcgtcatcgccataggagaaattatctactttaaaaagaaaaaattattctaaaaaatcaaaagttaacggaaatttccgctctggccactctgaggcaatctcatggtgcgcccgcaattatttatgcgaatgtttccaataattcaacttcggcagcatatctgccatatatgcccgcacttgttccgaagtccaattttcatttgccatgtgttcagcacaaaagttaagcagatcgtcaatgttgtcgtaggtaaactctccctccgaatagcaccatttgcagtattcttcattgaaagtaccatctttctctttgctgattgtcgaatcatcgagaggcataccgcagcactggcaaatgagttgtctcggagatcctaaaagcgtattgatcgaaacatcaaaaaattttgaaagcaatttcagcgtttccgtgttaggtattgtttcaccggtatcacatagttaaagatattggtgtcatttaatcaattttgccgataaagcggtagaagatttctacctcctgttcccggcttcc

SEQ ID NO: 3801 - DNA, 11057 bp, Unknown
  16S sequences of unknown bacteria
aaaacttcatcaactgcaaaaagctggtgtataaaaaccaggccggcgacgacgtctgcatcctaaacgccgacgacccgcgcacagtggcactccgggacgagccgaaatgcaaggtcatgtatttttcccgcacacaggatatcatcgagggcgctctggtaaagcgcaatgatatcgtggtgcgtatcggccgccgggatattcccatcatgcgggtagacgaagtaaaaattcctggcccgcacaatttggaaaacgccttggccgccattttggctgcctacctgatgggtgtaaagccaaaggaaatccgccaggccgtcatggcatttggcggcgtagaacaccgcatcgagacagtgcgcaccctgcacggcgtgacctttatcaacgacagcaaagccaccaacccggattctaccatcaaggccatccaggcgatgacaaagccgacggtgctgattttgggcggctctaacaaaaattccgattatatgcccatgtttcgggcgtttaccaaatacattcaatccatcgtggtcgtaggcgaaacttctgaacaaattttgtctgcagcccggaaggcagggtttatcagcgtacatcgtgcatacacctttgaagaggcggttacgctggcgcaacagctggcgtcgcccggaatgaatgtgctgttgtcccctgcctgtgcaagctttgatatgttcgataactttgaacagaggggggaagtcttcaagcgcatcgtaatggagctgaattagactatgcagaaactgacaaaggggaaatttgattttctcatctttatcacggtcatcatcctggtgctttttggctgcgttatggtatatagcgccagctattacagcgccaccattgaggagggcgatccggcctattatttcaaaaagcagattttgggggcggtgttgggctttgtggccatgatgttcatggcaaatttcaacttccagcgcatcgataaggtaaaaatcccccttgccatcgtcaccatagggctgctgctgatggtgtttaccccgctgggcatcacgctcaacggtgcgcgccgctgggtgaacctgggcgtgacgaccatgcagccgtctgaattgtgtaagattaccgtggtggtgctgctttccagctattttgccaaaaacagggagaagatcagcacctggacggggggcatcatccccgcgtttgccatttcggtggtcatgtgcatccctatcattttgcagcccaacctttccatggtgctgtgtattatgattaccacctttatcatgctgtttgcctgcggggcgaacaaaaagcatttgatgatactatgcttggcgggcctggcggccgtggcggtgctgatcatcatagagccgtaccgcctaaaacgcctgttcgtgtttttagacccgtggtcggatacccagggcgattcctggcagctgatccaatcctactatgccattggctctggcggcctatttggcaaaggcctgggtatgagccagcaaaagctgctgtttttgccgatggaggagagtgactttatcttttccatcatcgccgaggagctgggcttggtaggcgtgctatttgtcatcgccgcctatgtatttttgatctggcgcggcatgcgcgtggcgctgacctgtcccaatacctttggcagcaacctggccatgggcatcaccaccatgatcgccgtacaggtggccatcaacatcggtgttgtcaccggcagcatcccgcctaccgggcaaacgctgccgtttatctccgccggcacgagctcattgatgctgtttatgggctccatcggcattctgttgaatatatcccggtattccacgcccagctgatgcaaacgcaccaaagcgcgattttgggcataggatactttgaaaaacagtggaggtgcatcctatgtccaatttgatgatagagggtggccgcaggctttcagggagcctgccggtctacggcgcgaagaacgcgattctgcctattctggcggcctgcattatgacggaagaggaggtcgtgctggaaagctgcccggttttgagcgacgtggccaatatgctggagattctgcggcttttgggttgctcggtagcggtggagggcgatgtgatccgcatcaatgcaaagcatgccaaccggcatgaaatgcccacagagctttccaaaaaaatgcgtagcagcatctttatgctgggcgcgctgatctcccgctttggcaaggcatgggtgacccagcccggcggctgcgaaattgggttgcgccctatcgacctgcacctaaagggcctgcgcgcgctgaatgtctctgtggatgaggagcatggagagatccagtgcaacggcccgcataccaaaggcgctgagatcacattggactatccttccgtcggcgctacggaaaacatcatcatggcggcggtaacggccgagggaaagaccgttttacataatgcagccagagagccggaagtggcggacctggcccggtttatcaaccaaatgggcgggcgcataaaaggcgccggcgcagggaccatcgaaatcatcggcgtaaagcgcttgcagggcacgcggtataagatcatgccggaccggattgtggcgggcacctacttggccgctgcggctgtaaccggaggcgatgtgacgctgacgggcatttgtccggagcatttgcaggcggccgcttccaaactacaggaaacaggctgccttatccagtttacagaggataccgttcgcattcaggcgcccaggcacctgggcgaaatgcagaaaatagaaaccctcccgtatcccggctttcccaccgacctccaggcccagtttatggcggtggcgtgtgtgtgtcacggcacatgtatcctttcggaaaacgtatttgaaaaccgctttaagcatgtgccggaattgtgccggatgggcgcgcgtatccagatcaaggagcgcacggcggtggtgcgcggcggcgcgccgctgatgggcgccgaggtagccgccaaagacctgcggggcggggcggcgcttgtcatcgccggcctggcggccaaagggcgcacaacggtagagggcaaatgctttatagaccgcggataccaggacttagcagcagagctgtcggccttgggggcggaaattcgctaggagtagaccggattggccaagttacgaaagaagaacaaaaaacgattttatggatttatcttggtgctgacgctgctattgttatgcggcctggcggcgctgggttattttgtctttgaaattaaagaaatcaaagtggagggtagccagcgcttttctcaagaagaagtgattgcgcaaagcggcgtgcaggtagggcaaaacctgtttttagtcagcaaaaaacagctgaaagccaatctagaggcgcagccctatttgcagttttcccatgtttcctacgaccttcccagcacgcttatcatccatgtaacggaaaaaaccgcctatggggccattccctttgacgggcggtatgcctttgtggatgaggcgggcaaggtcttgcaattgtccgacgaagcaaacagcgtgccggtcgtacagggtatgggcgcgacggccgcggtggagggcgaaatgatccaagggccttcctcgtaccaaatgcacgtgtttgggacgttgatgcccaagctgtttgcgcagtcctatgccgatcgcatcgtagaagtggatctgacccagccggccgccatccatgtgaagctggatacggggatgaccctccgcctcggcaccatcgacaatgtcgacgccaagctgggatgggtggaaacgctgatgccgcgcttgacagaggaaggaaaaatcaccggtacgctggacgttacgggcgaaaacggtgccagctacattccataaaggcaggcgggccctttcaagatccacggccccgctgccgtatagaaccgaaacatcgcccaaaaaccagaatttaggctttgtattttaaggggaattctgataaaataccttagaatacaggtaaaagagggggaatttagcagatggatgctgttcttgtcaccaccagttcaagcattgtatgcttggctgggcaaaccagaaaagacggcacttacgctatctttggacaagccaaggtacctttttccggtattcgcaaaggcgtggctgtttctgcttttggattgcaaaagggaatcagcgacgtaattttaaaattggaagagcaggtcggcaagcgcatcaaacgcttgaccgtgggggtgcccgcgccattttgccaagtaagcttggtaggcggcgcagagccgaatgcagaccagggccccaatgcctttgagtatatgtcggatgcgtatgaattgatccataggctcaatgtgccgcgcgtgggcgcggggccgtccgggcttggcagcgttagctctatcggcgccagccgcgcttatatcgacgaggtaaaccaggcgcttgccaaattgaagatgcgcgccgcttcgttttacgcgcagccgttggcagaaggaatctttttgctgccaaagccggttagaagcgctattgcagtattgttggatgtagggtattataatataggtatctctgtatttatcggcgatgcgctggtctattgtgagaccctgtatgtgggcgggtatcacattgccaacgacttggcgcaggtattgaaagtgccgatggagtatgcagagcagctcaaacgccaattttcttttggcatagagtacgatccggaggcgcaggattacgcacgctctgcagagggcaaactgattcccttcagccatagcgctgtggcggaggtaattcaggctcgtgtagaggaaacgtgcgattatatccgccaagccattgaccatgcgccggtcacctttacggaaaaatccgtagcgcagctggcgggcgatggctatgaaggcatccggggcatccgcgagatcctttctacgctggtgggcttgcctgtgcagggcttgccgatttctttggcggatggctctacacattacgatgtcgcggcgctcgctttgttcgacgcgctagccatagaccaacctgaaaaatcatcccggcgtcctgggtggacaagccgttttacaaagagataggaggccttgtgaaagtatgttggattttgatctggattctcagttagcagcaataaaggtagtgggtgtcggcggcgccggcaacaatgcggtcaaccgcatggtggattacggcctaaagggcgtggaattcatcgccgtaaataccgaccgtcaggcactatacctatccaaagcagcgacccgcatccaaatcggggaaaaggtgacgcgcggcctgggcgccggcgcaaacccggagatgggcgccagggctgcggaggaaagcaaagacgatatcgcggcggccatcaagggttctgatatggtattcatcaccgccggcatgggcggcggcaccggcaccggcgcggcccctgtgatcgcgcagatcgcccgcgagatggggattctcacggtgggcgttgttacccggccgttctcctttgagggcaaacagcgcgcccgcaacgccgagcagggcattgcggccatcaaggaaaatgtagatacgttggtcatcatccccaacgacaggctgctgcttgtcgtgggcaaaggcaccagcattttggatgcgttccgcatggcagacgatgtgctgcgccagggcatccagggcatttccgatctgattgctgtgcccagccttatcaatttggactttgcggacgttaaggccatcatggaatgccagggcgtagcgcatatgggcattggcgttggcaccggcgaggaccgcgcttcggcggcggccaagcaggccatccaatctccgatgctggaaacctccatcaatggagccaagggcgttttgctcaacatcacaggcggcagcgatatgggcattatggaggtcacggaagcggccgaatatgtgcaggccgcggccgatcctgaagccaacatcatctttggcgccggcattgatgaatccctgggcgataccatgcgcatcaccgtcattgccactgggttcgattatgtgccgtccaccgcaacgggccgcccgcagctaaacaataagcagagcgcccgcccggcaggcatgcaggcgcaggggcagcgtcctatggcgcagacacagcagcgcccgccgatccagcccattcagcccacctatcagcaggccatggaggatcgcccctccatccgtcctacgatgacccagcccgtgcagcagccggtacaggcccagcctcaggtgcagccacagcagatcatcgagcaggaagtggagccgcaacaggatgtggagttcccgggctttaagccggagcaccgctctccgcgcatgaacgagcgcaacactgcgcccagcttcagccgcgatgcagacggcaaggacgatgacgatctggaaatcccgacctggctgcgccgcaaccgttaagtgtaaaaacgcaaaggcataggaaattttcctatgcctttttcttttccccaaagccccgcaaacgccgggcttttttgctattttgcagcccgcacatttctccgcgcttcgacgcgcagccgatgccagcagtgcggcggttctacaatttatgcacgcccatataactataataggccccagtgaggtgaaggggcgtgaaggtctatattgagctggtgctgctggataatttttgggcagacgcgctagtgctctttggcacggcaaaatggatgcaggcaccataccgtaagggcaggctgtttgcgtccgctggcttgggtacgctgtacgccgtcctttctctgatgcgcgggcttgtttttttgcagcatccgctttggaaaatcgccgtcagcctgctcatggtttgggcggcctttggctttggcagtaaaaaacgattccttcgatattgcggcgtgttttggctgttttcgctgctgttggcggccggtgtgcagctctatggcgccttattcggccaggcaagggcatccggcggcgccttaaccgtttccgggccgccgctgtgggcttttttgctgtttagttggggtgccggggcgctggcgctttggggacagcgcaagacgaaggaaaaagcggccaaaacagggcatgcatgccaagccaccgtgcagattgggcagacacaggcggagggcccttgcctgttggacagcgggcatgcgctgtattgccctgtcagcggcctgccggtgctgttttggccatatgacggcacgttggaacacgcggccgttgcggctgcgttgcaaagccagccgctttattatgtgacggccgcaggtgctggcagtattttggcataccgtccgtgtacgctgaccctgtgccgggagggcagggccaagacagtgcgctgtgccgtggccttttccacacagctgggcaaggaggccctatatcccgcaggcgcggccatcggttattttgaggaggaatgaaggatgatacattgggtacgtcgtatgcgtgcgttttgggccggtctatgggcaaggctgttcaggcgggtgcgggtggattatatcggttctgccgtgccgctgccgccgccattgaagccggaagaggagcgcgcgctggtagaggccatcgaagcgggagattccagcgccaaggggacgctgatcgagcataatctgcgcttggtggtgtatatcgcccgcaaatttgaaaataccggcatcggtatggaggatctgatctctaccggcaccatcgggctgatcaaagcggtcaatacctttgacggcagcaagaaaatcaagctggccacctatgcctcgcgctgcattgaaaatgagatattgatgcatctgcgcaagacctcccgcatgcgctatgaagtcagcatcgacgagccgctgaatgtcgattgggatggaaacgagctgctgctcagcgatattttgggcacggaaccggatatcgtggcaaagccgctggaggaggaaacggataagcagatcctgcgcgatgcggtggtgcagctgcccccgcgggataagcgcatcatcgagcttcggttcggcctatcgactggggaggagtgcacgcaaaagcaggtggcggaccagctgggcatctctcaatcgtatatctcccggttggaaaaacgcattctttcgcgcctaaaaaaagaaatggcgcagatcctctaacacagcagggcaggtataaaaaatccgttagggggaagcatgaaaccatcaagcgaactttcgtatcggaggggcaagatgggagtaaacaaagtagagatctgcggggtacagacctcgcagctaaaaaccttgacggaaaaggaaatgacagagctgctaaagcgcatccaaaacggggacgaggcagccagggaaaccttcgtgcagggcaacctgcggctggtgctcagcgtgatccaacgcttttccaaccgcaaagagccggtagacgatctgtttcaaatcggctgtatcggcttgatcaaagccatggataatttcgacctttcgcagaatgtgcgcttttcttcctacgccgtccctatgattatcggcgagatccggcgctacttacgggacaacaacgccatccgcgtttcgcgctccctgcgcgataccgcctacaaagtgctgcaaaagcgcaatgaactatgcgccgaacgcggcgaggatgtgcccatcgaggatatcgccaaagccatggagatgccggtagaggaggttgtctttgcgctggaggccatccaagatcccgtctccctcttcgagccggtgtaccatgatggcaacgacgccatgtttgtaatggatcaggtttcggatgaaaagaataagcaggaaaactggctggaaaccatcgccctgtcccaggccttgcagcgcctggccgagagggaacagaatatcatctatcttcgctatttcaaaggacgcacacagatggaggtagccgaggagatcggcatcagccaggcccaggtatcccgcctggaaaaatgcgcgcttcatcgattgaaaacacagatgtaaaaggcccgaaagggccttttttcatgcgccttcgggatacctcccctgctttcggcatacaactgaaaggaaaggggtcgttggaatggaacgttttagcgatttatgccgaaaggatgttatcaatatctgtgatgggcagtgcctggggcaggtcagcgatctggcgctggattggtgcaagggcaccattatagggctcatcgtgccctattcggaaaaaggcggcttgtttcggcgaagggaagaaatgtgcatcccactggaatgcatcacgcgcgtaggccgggacattgtgctggtagagctgcgccatatgcagggatacatcatacaggattagttttcaactgcctacaggatatggtataatacaataattcctaagaaaacggagctggaatacccaatgaaatgtatttattgtgagcatccggaaagcaaagtggtggattcccggcccaccgacgaaggcacggtgatccgccggcggcgcgaatgcctcaaatgtggcaaacgatttaccacctatgaaaaggtggagcagacgccggtgcttgtcatcaaaaaagacggccgcagggtcatgttcgatccggagaagatccgtaccggcatgctcaaggccacggaaaaacgcccggtttccatcgaacagatcgataagattgtggaaaacatcgaaaaaaccatctacaattcgctcgagcgcgaagtggctagtgagcgcatcggggagttggtcatggaagggctcaagcagcttgatcccgtagcctatgtgcgctttgcctcggtgtaccgtcagtttaccgatatagataccttcaaacgcgagctggaaaagcttttggaggaaaaatgacacaaggaggggctgctttgcatcagacagatcacgcttttgaggcgtttttgcaaaagacagcgcacggttttacggcccagcagctggggccgatgacggcgctgagcattcccatgttcgcccaaacggggcttgtcagggcctggtttaccacccgccgttacgggcagagagacgatctaaagctatccatcgcccgcatgggtgcgacggatgaaatcgtggataattttcttaaggcgtttgactgcgctgggatagacccgcaggacaccgtcatcgccaacgcccagcacggcaccgatgtgctgccggcggatgaaacgcaccgtggttgggggctgtttcatctctatacggaaaacgatcctgggtttgacggcatggttacggaccggcgtagtgtggcgcttgtggctacgcatgcggattgtacgccggtatacctgttggatcctgtgcaccatgccattggcctgtgccatgcgggctggcgcagcacggtaggcggcatggtaacaaacctcatcgacgccatgacggccatgtatcagacccgcccgcaggatctgctggcggccatcggcccgcatatcggctcttgctgctttgaggtggacccgcctgtggggaaagcatttgccgatgcgtttcctaaggcaggctgtgtgttgcccggccaaaaacccggcaaacaacagctggatctgaccagggcttcggcctatcaaatgtatcgcgccggccttttgggggaaaacctgaccatatccgacgaatgcacttgctgcaatggcgacctgtttttttcctatcgccgcgatggcaaggcatgcggggccatggcctcgtttttacagcttagataaacaacgataaagggggagaacgccgcatggcgaaacaaaagattctggccgtggatgacgaacggcatatcctggaactgatttcctataacctggccgaagcaggctacgaggtggaaacggtggaaaccggcgaagaggcgctgagcaaaacggcggagtttcatcccgatttgattttgctggatgttatgctgc

SEQ ID NO: 3802 - DNA, 32759 bp, Unknown
  16S sequences of unknown bacteria
cccaacaacgcggtggaatattttgtatcctactacgactactaccagcccgaggcctatatccccgggaccgatacctatatagaaaaggacagcgccatcaatgatgagatcgaaaagctgcggcactcggcgacttcgtccctgtccgagcggcgggatgtcatcattgtggcgagtgtatcctgcatctacaccctgggcgaccccatcgactaccgcaacatggtgatctccctgcgcaagggcatgaccatggagcgggactatctcaccaaaaagctggtggagctgcagtatgagcgcaacgacatcaactttatccgcaacaagttccgggtgcggggcgatgtggtggagatcttcccggcttaccagtcggatacagcggtgcgggtagagttcttcggcgacgaggtggaccgcatctcagagatcaacaccatcaccggtgaggtgaagaactttgtcagccatgtggcgatctatccggcgtcccattacatcgtgccggcagacaagatgaaggaggccattgaggacctccgggccgaggcggatgaacgggtgaagttcttccgggaacagggcaagctcatcgaagcccagcgcattgctgagcgcaccaactacgatattgaaatgctcaccgagatcggcttctgcaagggcattgagaactattcccgggtgctgtcccggcgtccggcgggatcggttccctatacgctgctggactacttccccgaggacttcctgctcttcgtggacgaaagccatgtgacgctgccccaggtgcggggcatgtacggcggcgaccgctcccggaagcagaccctggtggactatggattccggctgccgtcggcgctggacaaccgtccgctgaactttgacgagttctacaacaagctcaaccagatcatctatgtgtcggcgaccccgggtgaacttgagaaggaacacagcacccagatcgtggaacaggtgatccgtcccactggcctgcttgacccgatggtggaggtccgtccggtggacggacagatcgacgacctgctctcggagatcaatgcccgggtggcagtgggcgagcgggtgctggtgaccaccctcaccaagaagatggcggaggatctcaccacctatctggaaaacctcggcgtgcgcatccggtacatgcaccacgatgtggacaccattgagcgtatggagctgatccgggatctgcgcctgggcgaatacgatgtgctggtgggcatcaacctgctgcgggagggcctggatattcccgaggtatcgctggtggcgatcctcgatgcggacaaggagggcttcctgcgcagtgaaacctcgctgatccagaccatcggacgcgccgcccggaatgaccatggcaaggtcatcatgtatgcggatgcagtcaccggatcgatggagcgggcgatcaccgaaacgctccgccgccgggccatccagcagaaatacaacgaggagcacggcatcaccccccagaccatcaagaaggatgtccgggagattctggagatctccaccaaggagtcggcagagtccaaggggaagaagaagcgcatgagcgccgccgagcgccaggcgatgatccagcagctgacgctggagatgcagaatgccgccaagatgctggaattcgagcatgcggcctatctgcgtgacaagatcaagaagctcaaggaacagaagtaagtcgggaggcttattgtggcaaaggatagaatcatcatcaagggtgccaaggagcacaacctgaaaaatattgacctggagatcccccgggacaagctggtggtattcaccggtctgtccggttcgggcaagagttcgctggcgttcgataccatctatgccgacggacagcgccggtatatggagagcctttcctcctatgcccggcagttcctgggacagatggaaaagcccaatgtggactatatcgaaggcctttccccggcgatttccatcgaccagaaaaccacttccaagaacccccgttccactgtgggtaccgtcaccgagatctatgactatctgcgtctgctctatgcccggatcggtattccgcactgtcccatctgcggcaaggtgatcgagcagcagacggtggatcagatggtggaccgggtgctgtccctgccggagggaacccggattcagatcctggctccggtggtgcgccagcgcaagggcgagcacgccaaggagtttgaatcggcccggcgcagcggttatgtccgggtgcgggtggacggcaatctctatgacctctcggaggagatcaagctcgagaagaacaagaagcacaccatcgagatcgtggtggaccgtctggtagtcaaggaggagatccgttcccgtctggcggattcgctggaaactgccctgggccttaccggcaccattgcggtggtgaatgtcatcggcggtgaggacatcaccttctcccagcagtacgcctgtgtggatcacggcgtcagcatcgaggagctcaccccgcggatgttctccttcaataaccccgccggcgcctgtcccaagtgtaccggtctgggcaccttcatgaagatcgaccccgatctggtgatccccaataaggagctctccatccggcagggcgccatcaaggccagcggctggtactttgccgagggcggcatggcccagatgtactatgagggcctggcagagcactacggcttttcgctggataccccgatcaaggatctgcccaagaagatagtggatatcctgctctacggaaatggcggcgaaaagctgaccatccgccgggaaaccggcaccatgaagggggcatacagcaccgatttcgagggcattgtcaacaatctggagcggcgcttccgggagaccagcagcaactggatgcgggaggagatcgccggctggatgagcagtatcgaatgccccgagtgccatggcgcccgcctgaagaaggaggcgctggctgtaacagtcggcggcatcaacatcaaccagttctgtgagatgtcggtgggggacgagctggagttcatcaaccatctggagctcactgagcgggaacagctcattgccggtcaggtgctcaaggagatccgctcccgtctgggcttcctggtgaatgtgggcctggactatctgaccctggcccggtcggcagcgaccctctcgggcggcgaaagccagcgcatccgtctggcaacccagattggttcctccctgatgggcgtgctgtatatcctggacgagccgagcatcggcctgcaccagcgggacaacgaccgcctcattgccaccctgcagcggctgcgggatctgggcaatactgtcatcgtggtggaacacgatgaggataccatccgggctgcggattacatcgtggacatcggcccgggtgccggcgtccatggcggcaatgtggtggcagccggtaccgccgaggacatcatggcctgtcccgaatcggtgaccggacagtacctctcgggcgtgaagaagatcgaagtgcctgcccagcgtcgtcccggaaacggcaagttcctcaccatccggggcgcccgggaaaacaacctcaagaatgtggatgtccagattccgctgggctgcttcaatgtggtcaccggcgtatccggatcgggcaagagctcgctgatcaacgagatcctctacaagtcgctggcagcccagctcaacggcgccaagacccgtcccggcaagcacagggatattctgggcgtggaggagctggacaagatcatcaacatcgaccagtcccccatcggacggaccccccgttccaacccggcgacctacaccggcgtattcaccgacatccgggaagtgttcgcccagaccaatgacgccaagatgcgcggttacaattcgtcccggttctccttcaatgtcaagggcggacggtgcgaagcctgtgacggcgacggcattatccagatcgagatgcacttcctgccggacatctatgtcccctgtgaagtgtgcaagggcaagcgctacaaccgggagaccctggaagtcaagtaccggggcaagaatatctacgatgtgctggagatgacggtggaggaggcgctggccttcttcgagaaccatcagaagatccgccgcaagctccagaccctctacgatgtaggtctgggctatgtgaagctgggacaggcggcaaccaccctgtccggcggcgaggcccagcgggtcaagctggcaaccgagctctcccgccgtcccaccggacgcaccatctatgtgctggatgagcccagcaccggcctgcataccgccgatgtgcacatgctggtcaaggtactggaccgcctggtggatgcgggcaataccattgtggtgatcgagcacaatctggatatcatcaaggtggcggatcacatcatcgatctgggtcccgaaggcggcgaccggggcggtgaagtgctgatctgcggtactcccgaggaggttgcagcctgtgatcgttcctacacgggaaaatatttgaaaaagtatttgtaaatcgttcctgatttgtttataatataggcgggcatatatggtatcatatatgcagcggcccgattcagggactgagaaaaatttaggaggtaattattatggcaaagtatgtttgcaccgtttgcggttatatctatgacgaggcagtaggcgagcccgataacggcatcgctgctggcaccaagtgggaggatctcccggacgattatgtctgcccgctgtgcggcgtaggcaaggatatgttcgagaaggaataatccacagccgaacctgtgatacgcagaaaaagtccatgcggaagaaaaagctccgtatgggcttttttgttaaaaataaagtttcctgctggaaagaccggaaccggcggttgattttaaccgggaaagattatataataaaccggaatgtgtccggaatgcgcggtcaagacagctgtccggacggtaaaatgttctttacagcggtggcggattagggtaaaatatgggtagtatcgtggcagagtccgccatgtaatgaaacgataggagtgacaggtatggagcccaaatacaagcgagtcctgctcaaactgagcggcgaagccctggccggtgatggtcatgtgggaattgattacgacaatacagtgctttccatctgcagatccatcaaggaatgtgtggatctgggtgtggaagtggcaatcgtagtcggcggaggcaacttctggcggggccgttccagcggcagcatggaccgtacccgggcagatcacatgggtatgctggctactgtgatcaatgccctcgccctctgtgacgcactggagtccatgggcgtggatgtacgggttcagactgccatcgccatgacttcggttgccgagccctatatccgcaaccgtgcggtacggcatctggaaaagggcagggtagtaattttcggctgcggcgtgggaagtcctttcttctccaccgatacagcatcttcgctgcgtgcggctgagatcaatgccgatattatcctcaaggccactctggtggatggcgtttatgacaaggacccccataagtatgatgatgcggtacggtatgaggaactctccttcagtgagatgctggcaaaggatctggcagtaatggatctcaccgccgccaccatgtgcaaagataaccatatccctgtcatggtattcagtctggaagatccccacaatattgtccgtgcggtttgcggcgaagatgtgggtacaatagtcaaggaggcataacagtatgaactcgaatctcaaggtatatgatgaaaagatgaacaagtcggtggatatcctggcaaaggattatgccgccatccgggccggccgtgccaaccctgccgtactggacaaggtgaccgtagaatattacggcgctcccactcccatcaaccagatggcagcagtatcggtaactgaagcccgtactctcaccattcagccctgggaccgcagcactctgaaggagatcgaaaaggcgatccagacctcggatatcggcatcaatccccagaacgacggcagtgtgatccgtctggtattcccgcctctcactgaggaacgccgtaaggaactgagcaagggtatttccaagcagggatgccaaggttgtaatccgcaacatccgccgggatgccatggataagttcaaggccatgaagaagtcgggcgaactgaccgaagatgatctcaaggccattgaaaaggaaacccaggacctgactgacaagtactgcaagcagatcgatgagatggcagcagccaagtccaaggaaattctcgagatctgagcatacagccggaagtaaaaaaggagtaccccgcatggcggaacagaagcaaacaggcggcatgctgccggaacatatcggaattatcatggacggcaatggccgctgggcccagaaacggggcctgccccgttccgccggacacaaacagggcgcccgtaccttccgggagatcgtgcggtattgccggagcatcggaatccggtatctgacagtgtatgccttttccaccgagaactggaagcgtccccagagtgagatcgacgcgatcatgaacctgctccgggactatctggatgagctggagcgccacagcgatgaggagcagggtgtcctgcgctttatcggggatatggcgccgctggcagaggatctccggcagcgcatcacggatgtgcaggagcgcaccgccggacgggagggcatcactgtcaatatcgccctcaattacggcggacggcatgagatcgtccatgcggtgcagcaggcagtgagcctggcccggcagggaactctcacccccgaagcggtggatgaggcactggtggacagcctgatgtatacagcgggtcagccgccggtggatctcattatccgtcccagcggggaacagcggatctccaacttcctgctctggcagggagcctatgcggagtttgtctttatggatgtgctctggcctgattttaccccgggagatctggatcgggccatagcggaatttcagcggcgaagccggcgttttggagggatttcatcttgaagcagagaatcatcacagcctgtgtaggtctttgtgtattggctgtggtgctggctaaattcgatacatgggcactgaatctggcagtttcagtgatttccctgctggctgtgggtgaggtactgcatgtcattgattcgggaagccgtactctcaccggcatcggcctgatcttttccgtcctgatccccttttcccggatcgcggcgatccgggctgtgctgcccatcattatctatgcctttattgtggcactgttctgcctgcttctggcccggcatgaaaaaatgcatgtggaagaagttgccatgacggtgttcatctgtatcctgatcccgctgtccctgtcgactatcatcggcatccgagatcatcggggaattgtacagggcttctactatacagtatttgccctgatggcagcctggatggcagataccggcgcctattttgccggtctcaagttcggcaagcataagatgtccccgaagatcagccccaaaaagaccgtggaaggtgccatcggcggcgcggtaactgccctggtattcaccctgctgttctcctggatgtatgccgaaggcgtcaccgagattctcggggtcccggtggaggtcgactacctgcgcattgctctgctctcgccggtactgactgccttcagcattctgggagatctctcggcatcggtgctcaagcggcagtacggcgtcaaggattatggctccatcatgccgggacacggtggaatcatggaccggtttgacagcgtactgtttgtgctgccggctgtgttccttctgtcggtatacctgccgctgatccagctttgagtatgaaacggcatccagttgaatagagtaagatcgggtggtttatttgaaacaaattgcgattctgggctctaccggctccattggcacacaggcactggatgtgtgcagacatcttggatattcagtcgtcgccatcacagccaaccgtgatgtggacggcattgcggcgcaggcgagggagtttcttcctcgctacgctgttatgtacgataaaattgcggcagcccggctgcgggaagaacttgccggcaccggaattaccgtgctggaaggggaggaagggctctgtcaggcggcttcgatgcccgaggcagaactggttctcaattccctcagcggtatggtgggactgcgtccgaccctggcggctctggaggcgggcaagactgtggcccttgccaacaaggagacgctggtggcaggcggacggctcatcaccgatacagcccggcgctgcggcggacggctgatcccggtagacagcgaacacacagccatcttccagtgcatacagggcgaggaacaaaacaaaataaaaacgatcctgctcacagcttcgggcggtccgttcttcggaaagacccgggcggaaaccgagcatgcggaggttgccaaggcgctggcccatcccaaatggaacatggggcagaagatcacggtggattccgccaccctgatgaacaagggactggaattcatcgagtgcatctggaacttcggtgtgcgtccggagcagattgaagtgattgtccaccccgaaaccatcatccattcggcagtggagttcgaggacggctcggtcatggcacagctcagcgatccggatatgaagctctcgatccagtatgcgctgacctatccccatcgctgtcccagtacggtgaagcatctgagcctcaccgatgtggggaaaatgaccttctatcctccggatctgcaggagttcccctgtctggcgatggcaatcgaagccattacccagggcggactgcgcccctgtatcctcaacggcgccaatgaggaggcagtccatgcctacctccggggagagatctccttcggcgccattgcccggacggtgcggtatgccctggatcatgttgatccgggcagtgatgcctatacactgccggagatcctggcagcggatcaggcagcccgggcgtgtgcccggcagtatatttccacaaaggagtgatttccggtttgaatacccttctcacagcgatcatcgcaatttttgtatttggaacgctcattctgatccatgaattcggacatttcattgcggcaaagaagttcggagtcaaggtcaatgagttcgccatcggtatgggccccactgtgtggtccacccagaaaggggagaccacctatgcgctgcgggcgctgccggtgggcggatttgtgagcatggagggtgaggaggaaggcgagaaccccgacagccgggcgttctgcaataaaaagccctggcagcggctgatcatcatggcagccggaccggctatgaacctgctgctgggctatttgatcgtgctggggctgactgcctcggggaatgccattgccactccggtgatccattcctttgatgaggacgcagtcacttcccagtattttgaacccggcgaccggattgtttccatggacggtcatcgggtgcataccgccaatgatatttccttctatctgtcccgggaggacgacggcattatggatgtggttgtgctgcgggacggcgaacaggtttccattccggatgtgcacttcaagatggtgaatgtccagggcgtggatatggtcaccatcgactttatcgtagtgggtgaggagaagaacctcatcaatgtgccggtctatgcactggactggaccatttccctcaccaagcaggtgtggttctccctgtgggatctggtgttcaccgaccggtatggcgtggaacagatgtccggaccggtgggcgtagccggagccatcggcgaatcggcagccatgggcctggatcagtttgccattatggtgggtgtgatcaccatcaacctgggtgtattcaatctcctgccgctgccggctctggacggcggacgcattgcctttgtactgctggagatgatccggcgcaaacggctcaatcccaacattgagggctatatcaatatggctggcttgctggctctgatggccctgatggtctttgtgacctttaacgatatactcaaactcatctgaccgtggccccggaagggggcagaaaggagagggctatgcctgcatacagacgcccctgccgcactgtgcgggcagggaatatcctcatcggcggcgatgcgccggtgtccatccagtcgatgctcaacaccgatccccatgatgccgccgcttcgattgcacaggcgcaggcactggaagctgccggctgtgagatcatccgtgccactgtgccggatgcagccgctgctgccaccctcacggcgctgaggaacagcgtggcctgtcccattgtggcggacatccactttgactaccggttggctctggcctcggtggacgcaggtgccgacaagatccgcatcaaccccggcaacatcggcggggaggaccgggtgcgtgccgtggtggaaaaatgccggggagccggcgtgagcatccgcatcggggtcaacggcggttcactggagcgggagctctgggaaaagtacggcggtcccaccgcggaagccatggtggagagcgcccggcggcacatccagctgctggagcaggagcatttctatgactatgtgctctccctgaagcactccaatgtcaagaccatgctggatgcctaccgcatggcagccgaagtctttgactgcccgctgcatctgggcgtcaccgaggccggtactgcccggatgggactggtgaagtcggcaatcggcatcggttcgctgctggcggacggcatcggcgataccatccgggtatccctcacggctgatccggtcaccgagatcgccgctgcccgggatatcctcaaggcctcgggccggggaacccagggcgtcacagtggtgtcctgtcccacctgcggacgcacccgggtcaaccttatcagcctggcggagcaggtggaagctgccctggcagactgtcccaagcggctgactgtggctgtgatgggctgtgctgtcaacggccccggcgaggcccgggaagccgatgtgggcattgcctgcggcgatggtgtcgggctgctctttaagaaaggcgagatcgtctgcaaggtgccggaggcggaaatccttcccactttgctgcggttcatcgaggaactgtaatggaaacggagaccgtggatcttgaaaacattcagcgatgtatttggaacctatctgcctgatctcccggcggcggtggctgccggtgagatcgagcatcttcatattcacacccagcgcagggagctgacggctcagctgcgctttgccaatgtactggaaaaatcggtgctgctgcaggtgcaggcccagatccggactgcgctgcagctgggacgggtgctgcttctgccccggtatccggcagatcagctcaccgtggcctatctgcccagcctggcagataccctccgggcggcaggcaagcatatcaacggcttctttgacggcgccaccgctgagctggcaggcgaccatctcaccatctccctggcccatggcggctatgagtggctcgagcgggagaactgtgcccgggtgatctccgagatcctggaacaggaattcgggcggcagatcacggtggagttcaccggcgtgctggatctggagtccaatcaggagatctaccgcaagaccatggaggcggcagaggcagccattcccaaggctccgccccgcccggccgcaccggcgccttcccgtccggcccctgcccagaacggcggcaatggcggctggaacggaggcggcaatggaaacggcggctggaaccgttcgggcggcggacgccggagcgacagccgtctgctggacgagcccaaggcagcgcctatccggtttgacgcctcggggctgcccttccaggcggacgaaatgacggtcatcatgggcaagcccattggggagcgtcccattccgctgtccgacgccatggaggaggagatccaggtgacagtctggggcgatgtgttccagactgacaagcatgtcacccgggacgaaaccaaggtgatctacaagatcctgttcaccgactataccaactcctttgccctcaagaccatcgtgtcggcggagaaggcgcatctgatcgatgataccctcaagccgggcaagaccattctcaccagcggcaaagtcatgctggacaccttcgaaaaggaactgctgctgcgtcctgattccattgcgttggtgaagcgtacataccggcaggataccagcgagaaaaagcgggtggaactgcatctgcataccaatatgtcttcgatggacggcatgactccggcggacaagctggtgcagcgggcggcctatttcggtcacaccgccgttgccatcaccgaccatggcgtggcccaggcctatcccgatgccatgaatgcccagaaggcggtggaaaagtcgggcaaggagatgaagatcctctacggcgtggagggttatctggtcaacgatatggtgcccgctgtggtggggaaatccaaggaggcctttgacggcgagttcatcatcttcgacctggagaccaccggtctttccgccggtctggagcgcatgaccgaaatcggcgcggtccgggtgaagaacggggaagtgctggaggaatttgacaccttcgtcaatcctgagaagcgcatccccgatgaggtggtcaagctcaccagcatcaccgatgaaatggtggcggatgctcctctggaagaggaagccctgcggatgttcatggacttcatcggacgggaggatgctgtcctggtggcacacaatgccccctttgattcctccttcctcaaggcggcggcagcccggcacgggatcaagctgcagtatacctatgtggatacagtgcccatttcccgggcgctgttccccaacctgaagaatcacaagctggacaccattgccaagcatctgaaactggcggatttccatcaccaccgggcctgtgatgatgcccgcaccctggcggggatcttcctggcggaagccaagatcatgcaggaggaaaagcagatcacggcagtggaccagatcaataccggcattaccgtggtggatgtcaagaaactgccgtcctaccacatctgtatcctggtgcagaacctcaccggcctcaagaatctctacaagctcatctccatgtcccatctcaattacttctacaagcgtccccggatgcccaagagtgagatctttaagcaccgggagggactgctgctgggctcagcctgtgaatcgggcgagctgttccgtgggattgtggacggcaagagcttcaacgagctgtgtgagatcgccaaggactatgactacctggagatccagcccatcgggaacaatatgttcctctaccgcaatggctcggtcaattcggtggagcagctgcgggatatgaaccgcaccattgtcaaaatcggcgagaagctccataaaccggtggttgccaccggcgatgtccacttcctggagccggaagacgccaaattccgggagatcctcatggcaggccagggcttcaaggacgcttcggagcaggcgccgctctacttcaagaccaccgatgagatgctggaggaattctcctacctcggagaagaaaaggcctatgaggtggtggtggagaacaccaacaagattgccgacagcatcgaaaagatcaagcctatcccggacggtacctatacgccgtacatcgagggatcggaggaggaactccagcgcatcacctgggaaaaggccaaggaaatctatggtgatccggtgccggatattgtccgggaccgcctggaccgggagctcacttccatcatcaagcacggtttcgcggtgctctacatcattgcccagaagctggtgttcaagtcggaatccaatggctaccatgtcggctcccgaggcagtgtaggctcctcctttgtggcgaccatggcgggtatttcagaggtcaatccgctgatgccccactatgtctgccccaactgcaagcacagtgagttcttcaccgatggttcggtgcagtcgggctttgacctgccccccaagaactgtccgcactgcggcactcccatgaaccgggatggtcacaatatcccctttgaaaccttcctgggcttcaacggcgacaaacagccggatatcgacctgaacttctcgggtgaatatcagtcccaggctcataaatataccgaggagctgttcggttcctcccatgtgttcaaggcgggaaccatctccaccgtggcagaaaagacagcctttggctatgtgcgccgttacaatgaggagcgggggctccatgtgaaccgctatgaagaacagcgcctgaccctgggctgcaccggcgtcaagcgcaccaccggtcagcatccgggcggcatggttgttgtgcccaatgactacgaggtctacgatttcactccggtgcagcatccggcggatgacccggattcggacattgtcaccacccacttcgacttccattccctccatgataccatcctcaaactggatattctcggacacgatgtgcccaccttctataagcacctggaggatatgaccggcattccggtgatggaggtggataccagtgatgaggcggtatacagcctgttcacatccccggcggcgctgggcgtcaccgaggaggagatcgactgcaataccggcactctgtccctgccggagatgggcaccaactttgtgcgtcagattctgattgaatcccagcccaagaccttctccgacctgctgcagatttcgggactgtcccatggtaccgatgtatggaccggcaatgcccaggagctcatcaaggagggcacctgtaccatttccaatgtaatcggtacccgtgacagcattatgacctatctgctgggcaaggggctggagccgtccatggccttcaagatcatggagatcacccgaaagggtaaggctgccacccagctcaccgaggagcatatcacagccatgaaggagcatggtgttccggactggtacatcgaaagctgtaagaagatcaagtacatgttcccgaaggcacacgcggcggcgtatgttattgcggcgatccggctgggctggtacaagctccaccgtccgctggaatactatgccacctacttcaccatccgcggcggcgatattgatgccgaagcggctgtgcggggactttccaccgcacgcttgcggatgcaggagctcaagaagctgggcaatgagcgcaccaccaaggaggacgatcagtttaccgtgctgcagatcatgtgtgagatgatggcacggggctatgaattcctgccggtggatctctacaagtcccatgccaccaagtatcgctgtgaggacggcaagatccgtctgcccttcacagccctcaagggactgggtgaaaacgctgcccgcaacatcatggaagcagcggcggaaggggaattcctctcggcagacgaggtggtttcccgtgcaaaggtttccaagtcggtggtggatctgctgcggcaggccggcgcactgggcaatctgcccgagagcagtcagatgtccttcttctgattttcctgggaaataccgtttgacagagtcagatttctgatgtaaactattctgcgtgtctaatggtcggcgtatgatcggccccacgaaaatcaaatattgtctgaataaggcccattttcctgttttctgtccaaaacaggggagtgggctttttttcgggccaaaggagttatcaatgagcgtttcccttcgtgaagaaaacaaaatggcagtgcggccggtattcccgctgctcatgtccatggcgatcccgccaatgatctccatgctgattcagtccctttacaacattgtggacagtatgttcgtggcaaaaatcggagaagatgccctgactgcagtttctctggccttcccggtacagaccctgattgtggcctgttcagtgggtattggtgtgggagtcaattcctatatctcccgcagcctgggtcgtgaggaccaggagggcgcagacagcgcggtagcccatggacttctcatggcagcctttgtggcagttctgttcatcatcgcgggacagttcctgctggaacccttcttccggctgttcagcgatgatccggcaatcctggcagatgccatcacctacaccaacatctgcctgaccttctgtgccggttcctttatccacatctgcattgagaaggtgttccagtccaccggttcgatgatcttccccatgctgctccaggcactgggagccatcaccaacatcattctcgatcccattatgatcttcggcctgttcggcttccctgccatgggagtcaagggcgcagccgtggcgactgtgatcggacagcacaccgccatgctggcttctctgctggtgttcctgctgggcaagtttgcggtgcggctggatcttcggaacttccatttcagctggaagatgatccgggatattgcctccatcgccattcccaattcctgcatgaatgctctgggcagcgtgctggtaatggggctcaattccatcctcatcggcttctccaacacagcggtgtcgctgttcggcatctactacaagctccagaccttcgtgttcatgcccgccagcggcctgacccagggcgccatgcccatcatgggcttcagctatggcgccggcaacggcaagcgcctgcagcatactctgagcatcagcctgcgggtctgctttgtgatcatggcagtgggctgcgtgctgttcatggcagcgcccgagtggctgctcggcctgtttgacgcctcggaggagatgctcgccatcggcgttccggctctgcggatcatctcggtatccttcctgccggcaaccatcggctttatcctgcccaccatgttccagtccatgggacagggcggttattcgctcatcgtctttctgctgcgccagctggtgatcaccctcccggcagccgccattctcagcggcccgttcggcctgaccggaatctgggccagctttatcctggcggagtcggtggcagcaggagccgccttcctgttctatgaaaagctccggaggacagatccggtgctgggataaaataaaaatccccggtttccgatgcggagccggggattttttcatcaagcggtataggcacagggatttggaacagactatccccaaagactgccggacgacagagaggggacaggaacatgcgggtactgatgctggaaccggggcaggatgcccgggtggaggagatgccatccgacccggcgcagctggaacggattctgggcggaccggcggagatcacagcaccctttgagagcgggatattgctggtgatgctccgggatcagcagggacagcggcccaatcgtctgatcggcagccgaaaagtgtatggacgctgcctgctgagcggagcatccctgtacggactggacgacctgccggcagcactgctggagcgctaccgggtcagaatggaccgctgccgtctggagtgattagcggggcgagcggatcttgttgaccaggaagttggcagtgagcacttcccaggcctgggcgaagtaggtgccgatgtgccagaagctgacccctgccagttcaaattcccgcaccagatccatcttggcctgaatgctgcgggcgtcctcgaaccagacctcatgccggcgtccgtagtcatcccggtagttgaagtagggggttttggaagtttcatcaaagaagatctgggcgttgttctgtacagcgatgttgatggcgcccacattggaaaccacggtggcgggggaggaggagccgacaatccagtcatagccgtagttgggaatgcccatgaggatcttgccggcggggatctcggtcacggcatactggagcacccggcgcacctggttgtagggagccaccgcctgaggctcaccgtaccgatatccccattcataagtcatcagtgtgatacggtctgcataccgtccgtgagcggcgtagtcatgcccttcgtacaggattcccttcatgttggcactggttttgggagcgatggcagtggtgaggatcagcccgttggcatgcagctgttccgagagatcccgcaggaagctgttgtatgcctcccggtccccgccatagacattctcaaagtcaatatccacgccgtagtagttcttttccacagcggtgtccacaatgttctggatcagacggttgcgggtcgcttcatcggtgagcagccagctggcaaggccgctgtcaaaattgccgccctccttgatgttggtcaccaccatgatgggcccggcgccgcccgaccaggccgcgtcaatgatggagctgtcggcaatgtctgccaggcgtccggtgggacgggcgtcatggctgaaaatactcagataggtcaggtcaggcagggtgcgtgccagagtgtcccggttcatggtgtaataggcatagccgtttacatcaatgctgtcactgagctccggcagtcctccgggaatctggatgttctgtccgatgtagatggcggaggggttggcgatctccggattggcctccatcagttcatccacagtcacgccgtacttttccgcaatgaggaacagggtttccccacgcagcaccgtatgggtatccgcactgctgccggggatcaccagtgcctggcctaccaccagccggtcgggatagttcagctgattggcttcgatcagttccgcgcggctcacattgtagcggtccgcaatttcggtcagggtatcgcctgtctgtacagtatagataatcaaaattcttgccacacctttcattgatttcagtgaaataccgtattttaggcagacaaactgcctgtattgggtgtataatgggaaaaaaggttctaggagggattataatgaagattcgggaaatgcgtccggaggattggaacgatgtgcgccggatttatctggagggaattacaaccgggattgcaacattccagcagtctgctccggagtatgaggactgggaccgcggtcatcttgcggattgccgtctggttgcggaagaggagggtcatatcctgggatggactgcactctctgccaccagcagccgtccggtttaccggggtgttgtggaagtcagcctgtatgtaggggcggattcccggggcaggggcgtgggaaaagccctgatgctggaattgatcgcccggtccgaagccaagggttactggaccctgatgtcctcggtctttgcggagaatgccgccagccgggccctgcacaaggcctgtggattccgggaagtggggtaccgggaaaagatcgcagtggctgccgatggaaaatggcatgacaccattctcatcgaacgccggagcccgtttatccgctgaggcggacatcgccggggagtcctgttcaggattccccggtattattttgctcagaaagcagccgacggtacacaaaggtgatggtgttccaggtcagggcgccgacccgtccggttgcgggaatgccgtacagctcctggaatgcccggactgcctcttcggtcttggcgccgaaatagccggtgacttcggtgagcgggatctccggcagatagcgggagatataggtcagatagcgctggagattctccacgtcctggttttccagcccttggctgagcagatagcccggatagatcgccggtttcagatcgccgaattccgtatccaccaccgagaggataccccggtagacctcctgcattttgtaccaggtttcccggtcggtaatgccggtggggtccagaccgtactggcgctgaaagacctccacagcggcagcggtatccgagctgtaaatcccgtcaatgggcacagcggggatataggggttaaagtaggcaaaggcgttgagatagtactggatggtggtcaccggcaggccggtatcgcccactgtgagctgtccgggatagagaagttcagcctcgtccagacggatgccctcgctgtacaggtcagccagcttcttgacgctggtgtagatctccttgatccggtaccaggtggccttatccaccacgccggtcaccggcatattgaatacctgctggaacacccggactgcctcctgggtggcgggatcaaagacaccgtcctccagcggaatccgtgggatagccgggaaattcctgcggatgcggttcagcgactgctggatgacatacacatcgttgttgctgtcccccagttccagcggcactccgggataggattcggtgagattttcgatgggggcgtcctccaccagttccagattgttcccgtaataggtgcgcaggatctccagcgcgtccagaccctggttggcgaggtccacgctgccccattgggacagtccgtcacaggtgactgtggtgccgctgcagaactgggcaaagagcggattggcctggtcgggacggcggaggtagtcgttgaaaatctcatccacgatgtcgctgacattttcgaacacatcccggtccttgacaaaggcctggtcgaactgggtagaggaagtgatgtcgaaatcatagccccggctgcggtaccattcggtatagatgcggttgagggcaaaggagatctgggcgtagatgttggcccggagcgcctcttcgggccaggtgggatagatctcactggacgccacatttttgatatagtcggagaaggggatctccacattttccgccggctggttgggggcgcccaggtggacgacgatggtttccggcacaacagggagccggacttccggcggcgtggattcaggaaggttgatcacggaaagctgcctcctttcagggttcatccgggctgttcaccggtgcggccgcagccgggatcaggtccacagcctgcagggaggtgaccccctcgaacaccggaacctgctcaatgactgcgtccatgaaatccggatgggatacggtgatccggtagctgacatacggcgcgggatcaccgggggtttcgggaagactgcgttccagagctgggaccgtcaccggcttcacctgtccggaatggtcggtgaactggctgtcgatgaggtaggccccatccggaaagaccttgtagaggtttacctgggcattttccaccggataggtgcgccgggcggtgaatacctgggtcttgattacgccggaatcgggattttcctgctggaactgctcatattccccttttgcagcggcaggtggttggaagttctgcccatttgtggtatgatgggtgttgtcagcggaagaagttttttccgtgtaccgtgccagcagctcccggaggaaggcggcagcggcggtgaggtattcctcctcattgcgtccgatggcgtcccggggcgtgcccgagttgtccggcgggttgccgatgcgctcccggaggaattcccccagggtggggcgttccggatcctctggcacggcatcggtgctgtccgggccgggctcggcgctctccccggagggtttgctgcccggcgcaaactgtgccagcagctcccggaggaaggcggcagcggcggtgaggtattcctcctcattgcgtccgatggcgtcccggggcgtgcccgagttgtccggcgggttgccgatgcgctcccggaggaattcccccagggtggggagctgtgccttctcaggtgcggtttcttccggcagttccccggtgggctcctcgtgggccggttccggggcatgggacggctccgagggcatttctgccagagcgggttttgctgccggagggtcagccggacggggcctggctggtttgggtgccgggggctggtcggcgggtgatacgggagtccggcttcggcgatagaccgccatcagatcccgcttatactgctcaatggtctgatccagcgggctgccggcgctgtttttctccatagttctgcctccttgtctgagcgttttctttccatgatatgaaaaacttcccctcaatgtgcatggaatccgggccagaccgggaatttgatgcagatttgacccctaatctgaatggaaccagacgcaggctgcttcagagaatgtgaaaaaggaggtgtatcagatgctggaacagttgatcgagcagatcctgccggtgattatttcagtgatcgaactgatcggtatctttattgtcacagtcggaacactgcgtgcctttttctattacctgctggatctgttcaaaatcaagaagtatccggtcaagcatgagcttgccaatgcccttgccaccggactggaattcaagatggcagcggagattctcaaaacagtactgattaccagtctgagcgagctgaccgtgctgggctgcattattctgctgcgggccctgctgtcgctgctgatccatattgagatgaagaatgtcgaagaagcctaaggaggtttttccatgaccaatcaggaactgttttcctatgtagaccacaccctgctcaagcccgaggccacacccgagcagattgccgccctctgtgctgaggctgcggaacatggcaccgcgtcggtctgtgtcaacggcagctatgtggcgctggcaaagaagctgctggacggcaaggccaaggtctgtgctgtaatcggcttccctctgggagccatgtccactgctgccaaggcatttgaggcggcagaggccatccgggacggcgccgatgagatcgatatggtgatccacatcggacagctcaaggccggcaacaccgactatgtcctggaggacatcaaggcagtaaaggctgccatcggcaatcatatcctcaaggtgatcatcgaaacctgcctgctcactgaggtggagaagatcaccatgtgccgcctggtgaccgagagcggcgcggaatacatcaagacctccaccggattttccaccggcggcgccacctttgatgatgtgcgcctgtttgccgagcatgtgggcgaaggtgtgaagatcaaggcagccggcggcatccgcagccgggaggatatgggcgcttcccgtctgggtaccagctcggcagtgaagatcctctgcggcaagaactgacccattttacaaaataaaaaaggacagatccccggtccgggggtctgtcctttttcttatagtgcgaaaaaccggtcagcagccggtgcggcggtattccagcggcaggtcatagccgaaggtgcggcgtccgtccttttccatcgactcgctgacctccagtacctcattgctgaaccgctcatagagactaaatttcagtaccggtgtaaacatgctctcgctgccgccttcgaaccactcgccgttcttgcggtagagggcaggggtgaaggtggcggagggccggagggtccggtagtccaggcggcccagtccggcggcggtgaaggtatccttggtgtagccttcgggcatctcataggaggtcagcttgacgcagtccccctcctcggtgaacaggaacagatgcggcatggcgttggtgcgtccgccgacggtgtagtagctctcctccagcacaaattccccggcaaagtcctccggcagatggtcgatgtagtcgttgatccgggtgtttacatggcgggcttcggggtatccggtgatcccctgtgcggcaaagcgttccagctgtaccgagttatcaaacgatccgcagagcattgcggtaaattccccaagcagtttcatatcaatttcctccctttggttgatggctctactttaccagctgattgtgtcaaacccatgaacgaatcccggtgattttgtaaatctgacttagtcagataaatgacggcccagacatagcgggcggaccgggagaatatagatgggtaaaaagacaggctttggaaaggagcgagagtatgtcggaaggacagaaggacgcaggacgggtcaccgggctgaccgatggggaggcagcggcgatccggaaaacggcgggacgcaatacggtgcaccgggggaagaaacagaaccctctgaagctctttgcgggacagctgggggatctgatgaccatgatcctgctggtgtgcgcggggctatccgtactcatgggggagggcaccgaagcactggcgatgatcgtcattgtgttggtgaacgcactgatcggcttcctgcaggagtaccgcaccgaacgcaccctggaggcgctcacccgtctggcggcgcccacagcccgggtgatccggcagggggtgcgcagggagatcccggcggaagagctggtaccgggggatctggtgctgattgccgctggggataaggttccggcggactgccggatcgtcggcgacggaaccgtaagctgtgatgagtcgctgctcaccggggagtcggtgccggtggaaaagagccgcctgggggacagttccctcagaatggggacgctggcggtgaaagggaactgtcaggccgaggtgactgccatcggcatgcagaccgagatgggcaagattgccggcatgctggaggaaatcgctccggagatgactccgctggctcagcgtctggagcagctgggaaaggtgattgccgccgggtgtctgggcatctgtgccgtggtggcagccatcggaattttccggggcgagaacccctttgatatgattctgatgggaatctccctggcggtggcggcagtgccggaggggcttccagccattgtgactgtggcgctggctctggcggtgcggcggattctgcggcggggcactctggtgaagagcctgcacgccgtggaaacactgggctgtgcccaggtgatctgtaccgataagaccggcaccctcacccagaaccggatgacagtgcgggaactgtggactgccgggggtgagctggaggtcaccggcgagggggacagccgggacggaacctttatccggggcggacggcaggccatggagctgcgggcggacgaagccctgctgctcaccgcctttgcggctgccaatgcggcggagatccggcccggcaagaagaaccgctggaaaaccgatggcgaacccaccgaaacggcgctgctcattgccgccgccaaggcagggctgtaccggaagccggaggaggaactgtcggtgcgggcgtttgactcccgccgcaagctcatgtcggtgaccgcgcggaagcccgagggcagctttgtctttgccaagggggcgccggaattcctgctgccccgctgtacccgctgccgctcggaaggacgggatctgccgctggatgacccgttccggcgccgggtgcaggcccaggcagaccgctttgcggcagagggacgccgggggattgcagctgcctataagccatcggattccgctgacccggaggaggggctcatcttcctggggctggcggcgctcaccgacccgccgagaccggatgcggcccgggcagtacgggagtgcctgtcggcgcatatccgtccggtgatgatcaccggcgaccacagcctcaccgcccgtgcgatcgcaaaggaagtgggaatcctgcgccccgggtgcgagcaggtgctcaccgggcgggagctggatcagctcaccgaggaacagctggcccgggaactgccccgcactgctgtctttgcacgggtgaccccagcgcataaactgcggattgtccgggcgttcaaggcacagggactggtgaccgccatgaccggtgacggtgtcaatgacgcaccggcgctcaaggaggcggacatcggcgccgccatgggggagagcggcagtgatgtggcccgggaagcggctgatctggtgctgctggacgatgacttctccaccctggtggaggcggtgcgggagggccggaccatctatgccaacatccggcgcagcatccgctacctgctctcctgcaataccggcgaggtgaccgccatgctctttggcatgctgctgggcatgccggtggtgctcactccggtgcagctcctgctggtaaacctggctaccgatggcctgccggctgtggcgctggggtttgaaccgccggaggagggggtcatgcagcagaagccccggggccgggaggattcggtcttttccggcggcctgctggggaccatcctgctgcggggcctgctcatcgggttctgtaccctgggagcctacacagccacagcggcccggggcgggagcctggaggcctgccgcaccgccgcactgctgaccctgatcttcacccagctgatccactgctttgagtgcaaatccgagcgccggagcctcttcaccgtgccgctctggagcaatccccggctggttctggcggtgatcgtgtcggcgctgatggcggtgttctccgtcaccagcccctgggccatggcagtcatgggaacagtgcgccctgaccgggagatgtgccttgccgtgacagcggcctgcatgatcgggccggtgctgtgggcgctgaccggggtgctgttccgcccgaaatccgatgataccgccgatttttaccgccgggccgaccatctgcggaagtctgtaaagaaaaaaggctttacagataaaaccgccccggaacagcccggcgaaagcgcaacggaagccggaacctccgatccgcccgagcggttcagcctgaaacgaccgtaggccggaggtaatttcagtgcggggcgggcagaccggaggccatccgcagaatgtgtgcgtccggcagctatcctgtctgcatcgtgcgtcacaccctccgcagcggcagggtcttggcgtgtgctctgtcaccatccgcccgaagcctgcccggtccggcctccgggttaggcgggttccggaggaatgctgcccaccggattggaggctcccgcaggcagcaaaaaagccgtccccgagaggacagctttgatggtttacaaaggggagatcagagcgggtgaccgcagcggcggcagaagcggtcgccggggccggtttcacttccgcaggacggacagaaccgggtctgggcgatgggacggttcccggtggggatcagatgatccggcggcagggcgaagtcaggctggcgttccagccggcggccgtcctcccgggagatctcataggtcttgccgcagttcgggcagattagaaaatactggatatcataccggaacaccggcacaaaaaacagatggatatatccattggtgcggatcagctgcattcccagacggcttccgcagcccggacagacctgatttgtccgccgtccgaggtctttgcttccgtttccggccccgccgataaaaaacatactgtcagcctccgttcatgatttttttacttttattatgccgtaaaagattgtataataggggttagtccggtagaatctgacgaatgcggtcaaaattccgtatgtcctgccggaggttcttgttttaagtattggaaatttccccggatttgtcaaggggaatttggtcagttcctgcagcaatcgggcaggaatccgacaccttgtttttgtatgaatgtgcgcggcgggtccgccgcgaaggagttttacccatgatgaaacgatttctcagtgcgcttctctgcgcctgtgttctgatttccatgaccggctgtgcccaggatcaggaggcaccggaggatctgctctattcctctgcgccgatccagttcaacagcgattccagcagcgaggaggagtcctcgtcggagccggaggagagccaggcggagaacagttcctccgcggcgcagaattcctcctcccaggcaccgtccagctcgtcctctgcggcttcgtcccagcagtcctcgtctgcggcgccctcctcatcgagtcaggcgtcctccagtcaggcatcatccagccaggcgtcgtcccagagttcttcttccagccagcagacctcttccaagccctccgccaacaacagcgtgacggctccttcgggagagatgcgggcagtctggttctcctatctggatctctcatcgatgatcaagcagaagtcccggtcggagtttgaatccgccatctccaaggcgttttccgatgtggcgaatgacggctacaacacggtttttgttcaggtgcgtccctttggcgacgccctctatgactcggatctgttcccctggtcctataccctgaccggaaccgaaggggtcagcctgggatatgacccgcttcagatcatgatcgatcaggcccatgccaaggggttttcggtggaggcctgggtcaatccctaccgcatccgcaattccagcaacggcggacaggcgctgagcagcgacaatcccgcttcggactggctggacagcggcagtgatgtggtgatcgaatacggcggaggcatctactacaatcccggcagtgaggaagcccgggaacgcattgtagccggtgtggaggagatcgtccgtaattatgatgtggacggcatccactttgacgactacttctatcccaccactgactctgcctttgacgcggatacatacagcgactacaaggcatccggcggcaagctctccctgggcgactggcgccgggacaatgtggatcagctggtgcgggaggtctattccactatcaaatccattgacagctcggtgcggttcgggatcagcccccagggcaacaccagcatcaattacagcgaacagtacattgatgtggaggaatggctctccaatcccggctatgtggactatatctgtcctcaggtctactatggatttgaaaacgatacctgtccctttgcggcaacggtggcggagtggaacagtctgatccgccgcaatgatattgatctctatatcggcatttctgtcagcaagatcggtctggtggaccagtgggctggttccggcaagaacgagtgggtggaaaatgacgatatgctggtccgcatggtatcggaggcccgcaagagcagccattacagcggattctgtatgtacagttaccggtcattgtatgcgccggctgcggcggtagcagatcaggtggagcaggaaaaggaagctctgtccgaactgatgtgacaggcgtttcggaggacgatcaaaattgtcaaagtttttgaggaatggaaaaatagtggcagcggtgctggtggtcctgcttcttgtggtagtgggagttgccggtgcgctgacctttcagaaggttcagaaccatgaactgacgatcccggagcattccgaaacctttctgccgtcgggagattcatccgaaccctccggggacaatgggactgacggggagaactcggcggaagcagtgactctgaaccgcccggattatatgaagggcatgtatatcaagccgggtgtggattacctcactgagggacgcacttcggcggcggatatccaggcggatctggatgcggcctttgcgtcggtgaaggaactctcgatgaataccgtgatcctgcctctgacgctggatgggaagtgcattgcccagaagagcggcctgccctatgtggacgataccctggagtttgatattctcgaatacgcctcccagaaggcccgggaaaacggactctatatctatgtgatctatgatctgttcaccggtgtgcaggacggcagcattgtggagctttcccagatggattccgcatcgatcagcgatacagtggaccatggcctggcgattgcccagaattatgacatcgaaggcctgatggtggacagctactacaacgaaacccaggagaacagctacctgaactacaagctctatggcggcggtatgggctatgagaactatatgagccagcagagccatacggcgttccgggagctgagcgaggcgatccgtaccgatgcgccgggcaagcagatcggcatgctcactgtgccggtatgggccaacagctccaccgacgaaaacggctcggataccaccgcttcctacaccgccaagtacagcggcaatgccgataacctctcctatctggaggacggctatgtggactttgtggtggtcaaggcagaaggctccaccaccgatgccaatatcccctacaagaaggttgtatcctggtggggcgaacaggcggatgccgcggatgtgccgctttatgtgctgcacttctccagcaaggcctgttcggaggagaccggctggaccgagtatgaccagctggcactgcagctcatcgcttcggaggatctcgccggattcaccggggatatgtatgacgatctctcccggttcaagcaggatctggagggcagcacccaggcagtcctggactactatgacgatactctcaaccggcagcatatcctcaccgagctggcggtgacctcgccggcccagaagacctataccacctttgaacagacagtcaccttcatgggtgcatccgaccccggcgcgaagatcaccatcaacgatcaggagatcaccaccgatgagaacggttacttcaccctgaatatgccgctgtccgagggtctcaacaagtttgtattcacccataagggcaagaccgatgtctacaacatcacccgtcaggtacaggttgtcaaggaggtatcgcccaccggcaatgtgacagtggacggcggtatgcgcatcaccatcactgccacagcctataaggatgccaatgtctatgctgtcatcggcggacagaccatccagctcaccctggatgaaaccggtgccgacggcaacgagtacaatgattcctaccggctgttcaccggttcctataccgcgccggcctccaccgacaaggtgcaggagatcggcaatatcgtggtctatggtgaggcacagggctccaagaacagtaaaaccggtgcctatatcaaggtcaacaagcgcattgcggtggaggacggcactcctgtccgggttgttgcgacccaggcggagaccttcccgtccaacaccctcaatgacctgtcggagccggattacttcccgctgccccagggcgcgctggattacaccgtcggcagcgagctggtctacaagaatgaggataaaacctacacctattacaagctcgcttcgggtgttcgggtttaccgggacgacatcaccggcgtttccaacgatgcggcgccgggcggcaacgcagtcaccggagtccaggtcgccagcaacagccagttcaccgatgtggtctttgatacggcacagcaggtttcgtacagtgccaagtacaccggttcggcctttaccatcgacttcaactataccaacagcgttccccagagccagacgctggacaagaaccccatgttcagctcgctgactgcgagcagcaataccaaggttaccctgaccctcaactcgtcgggacgtttcctgggataccgggccttctacaacgacaacggccagctggtattccggttcaacaatcctccgggcggcgccagcggagccaccatcgtagtcgatccgggtcacggcggcgacgatgtgggcgcactgggcttcctgccggcctatcccgagagtgagatcacctgggagattgctcagaaggtggcagatgaactggaggatctgggcgccaatgtaatcctgctcaacacccagctctcgtcgggcaagtatgtgatccaggatcgtgtggcagatgccaaggccaagaatgcccaggtatatctgagcattcactgcaactcctcgcccagcaacagctcggcagtgggtaccgaggtctactacttcaacgactattccaagaatctggcaacttcgctgtcctcgtccatttccagtgccctgaacaccaccaaccgcggcggaaagttcggacggtactatgtcacccgtgatcctcagatggtgggtgtgctgtgtgaagtgggcttcctcaccaatgagaaggagtacaacaagctgctcagcgactcctatcagcaggatgtggcagaggccattgccagcaccaccaacaagttcctcaagaacctgggcggaagcagcagcggcggaggcttctccagcagcggcaactacggcagcaattccgcctcttccggcggcagctcctcttcgggcggcagcagctcgtccggttccgccagcggcatctcgctggatgaggacgaactcaccctggctgtgggcaagacagcgaccctgtctgccagcggctccggccttacctggaccagtgacgatgaagatgtcgccaccgtcaaccagaacggcaaggtgactgcggtgggcaccggtgagtgcatcatcacggtggaaaacagcgatggggactatgccgactgctatgtcaccgtcacaggggaaggcggcgtggaggagatcgagctcagtgatgaatcgctgaccctctatgtcggcgaggggtatgagctggaagcctatgcctatcccgaggacgccgatgataccgagctggtcttttccagcagcaatgaaaatgtagtgaccgtcgatgaggacggctatctggaagcgctcaaggaggggcgtgtcaccatcacggtgaaaaaccccgcttcgggcgtcaaggccacctgtaccgtccgggtacgggaggagtaatcccatagaacagaaaaacagagatcccaaacgggat

SEQ ID NO: 3803 - DNA, 3045 bp, Unknown
  16S sequences of unknown bacteria
gtgccagcgtgccagtggacggcgtggtggtcagcgggcattcctccatcgaccagagcgcgctgaccggcgagagcatcccggtggaaaaaggcgagggcgatacggtgctgagcgcctctgtaaaccagacgggcgcgctggtgtgccgggcccagaaggtgggcaaagacaccacgctttcgcagatcatcgacctggtggagcaggccgccaattccaaagcgccgattgccaaattggcagataagatcagcggcgtatttgtgccggtggtcatttccatcgcggttatcgcggcggtggtatggctgattttggggcagacgggtgaatttgcgttgtccacggcgattgcggtgctggtgatttcctgcccgcgcgcgctggggctggccacgccagtggccatcatggtgggcaccggcaaaggggcagagtacggcgtattgattaaatccgccgaggcgctggaaacggcgcataccgtaaacaccgtggtgctggataagaccggcacggtaacggagggcaagcccagggtgacggacattgtgacggccgagggcgtggcgcaggcggagctgctgcaaaaggcggcctcgctggaagcgaaaagcgaacacccgctgagccgcgccatcctccagcaggcagaggcgcagggccttgcgtttgcggcggcagaagggtttacggccatctccgggcgtggcttgcaggcagagctggatggcgtgcgctactatgccggcaatgtgcagctgatgcgcgagcagggtgtggatctgcaggattttgaggacaaggcgcagcagctggcaaacgacggcaaaacgccgctgtactttgcggaccaaaccagggtgctgggcttgatcgcggtggcggataccatcaagccgacaagcgcccaggcgatagagaccttcaagcagatgggcctggaggttgtgatgatcacgggcgacaacgagcgcacggccaaggccatccaaaggcagctggggattgataccgtcattgccgacgtattgccgcaggataaggaagcgcatgtgcgcgctttgcaggctgagggcaagaaggtagcgatggtgggcgacggcatcaacgacgcgccggccctggcgcgggcggacgtgggcattgccattggcgcgggcacggacattgccattgaatcggcggatattgtgctgatgaagagcgacttaaaggacgcggcgaccgccatccagctgagccgggcggtgatccgcaatatcaagctcagcctgttttgggcgtttttctacaacacgctgggcatcccgctggcggccggcgtattttacggggcgctgggctggcggctcagcccgatgtttggcgcggcggcgatgagcctaagctctgtctgcgtggtgacaaacgcgctgcggctgcgcggattcaagcccaggtttgccgaagggcggcagagcaccgggccggcggagagtgtagagcctgtggctatgacacagccggcggcagagcaggcggaaaaagcggcggacgcggtggtgcaggccggcggcatgagctgcgggcactgcacggcggcggtggaaaaggcgctgttggcggtagacggcgtacaaaaggcagccgcagagctggaggggcagacggtgctcgtctggctggcaaagccggtatccgacaaagcgctgctggaagcggtacgaggggccgggtacgaggcgcggtccatagagagaaaaaaaggcgcacgagcgccggaagataaaggagagcaaagcaagatgaaaaagatcgtaaaggtagagggcatgatgtgccagcattgcgtggcgcatgtagaaaaggcgctgcgcgcggtgccgggtgtggaagcagtagaggtgagcctggaaaacaagcaggcgacggtaacgggcgacgcggcggaccaggcgctgctggatgcggtaacggacgcgggctaccaagccaacggtgtggaggaagcgtaacgtgcaggcggatcatgaggccatcaaacggcggttgaaaaccgcacgcgggcagatcgatgggctgatcaaaatggtggaggaggaccgatactgcctggatatttccaaccagcttttggccacgcaggcgctgttaaagcgcgccaacgaggaggtgctgcgtgcgcacatgctgagctgtgtaaagcaggcctttgaacagggcaacgcagaggagaagatcgacgagatgatcggtgtgctgcacaaaataatgaaatgaaaaaaggctccgaaaggggccttttttgatgtgcggcgtttatggttcctgctgcacaggaatgggaccgtgcgcggcttcgtattgctctacataggaggcaagaatgaattctagctgtttgttggtggaacgatgattttcctgagccagatattttagctttgccagcagttcatcagaaatgcgcaaagaaaagggaggataatagtttccatatcgattcatgggaaaacctccttgtttttttatcaggatacccaaagaataagaatctataagaattcaaatttgatatcaaaatgaattcaaatatgatatactttaatggggtgatttatatggatatgtataaaacggcgtattttcatttgttcaaccagatttccgatttgatagaagctttgcaacagatgcaaagggagggagaagaattggtcatttcctgtcaggaagagggacaagaaggaaagctaggacagggggagtgcggaaggtggatagaagaaaaatacctaggatagggcgagagcaaatgcaatccacagtattgattcgagccacagcgcatagaggaacggggaatcttcctttttttgccaaaaggaagcgagcaggcgagcgcctgcgggcaggtccggccagggagaagatgaaaagacagggaaagagccccggggcatggtagagtgagcagcacagaaagattggccggaagaggcagtgggcactgcctaatgacaaaggggcgctgatatgtatggcctctccccgaggcac

SEQ ID NO: 3804 - DNA, 9063 bp, Unknown
  16S sequences of unknown bacteria
tgccccaaccattccggattttgaatacgatcgtatgctgcgccgtttggaagatcttgagaaagaacatccggaggaaattacgccagactctccaacacaacgggtgggcggacggattctggctgcctttgaaagcgtagaacacgaagtgcccctggaaagcctgcaggatgtgttttcgccggaagaagtaaacgaattcggcacacggatggcggaaagtctccatcaggtggcctatagtgtggaaccgaaagtcgatggtctttcggttgctttggaataccgcgacggcatctttgtccgcggggctacgcggggggatggtcggatcggtgaagatgtgacagaaaatctgcgcacgatcaagtcgatccccatgacgttgccggaaaaactgccgcatctgattgtccggggcgaggtctatatgtcccacagggtatttgatgaactcaacgccatgcgggagattaacggggagccgttgtttgccaatccacgcaacgcagcggctggatctctgcgtcaactggattccaagatcgctgcccagcgtcggctggatattcagatcttcaatctccagctatgccagggacggacatttgaaacccacgaacaaaccctgaactatctgcgcacacagaattttaaagtgattgcgcatcgtgtggtcaacagtattgcagaatgtaatgaggaaattgttgcgctgaatgaaagccgggagaaatttccgttcgatatggatggagcggttgtaaaggtaaatagccttacagatcgcaagctgctgggcagtaccgccaaatctccccggtgggccattgcatataaatatccgccggagcagaagccctccaaagtggtgaatatcgtggtacaggtaggccgcacgggcgtattgacgccaaaagccattgtagaaccggtgcatctggcgggaacgacggtgaccaacgccacgcttcacaaccaggactatattgcggaaaaggacattcgtgtcggtgataccgtattggtacagaaagcgggggagatcattccggaaatcgtgtcggtggatctgagtaagcggccatttgggacgacgccttatgtgctgccggagcgatgcccggtctgtggggcaccggtgtctcgggatttggacggcgccgccatacgctgtactggtgcggaatgtcccgcgcagttgctgcgcaatctggttcatttcgtaagccgggatgctatgaatatcgaaggcgtaggtcccgccgttctgcagcagatgattgaaaccgaaatggtgcgttcaccggcagatttgtattatcttcgggaagaggacgtagcaaaccttgagcgtatgggaaaaaaatcggcgcgtaacgccatggaggccattgaaaaatccaaagaaaacgacttgtctcgtttactttatgcgcttggaattcggcaagtgggagccaaagcaggccatgtgctggctgcacatttcaaaagttttgaggcgctttctgcttcagggctggatgagctgactgaaatcccggacattggccctattacggcccaatttattctggactggctgggaagcgcgcagtctcagcatttaatcggccgattgaaagcggccggcgtgaatatggaatatctcgaaaagcaggtcaacagtaattttgaaggtatgacatttgttttgactgggacgctgcaaaaatttacccgtcaggaagcaggtaaattggtggaagagcgcggtggaaaggcggtgtcttcggtttccaaaaagaccacttatgtggtagcaggtgaaaacgccggctccaaactgacaaaagcgcaggagctgggtattccagtgttaacagagaatgagttcctggagatgctttaacggattttaccagaaaaatggttgactttccttttgggatatggtatagtccatttaccaaaagggagtagttcacatctcagtcgggatgtttgtgttttcgtcatctcggggcgttgggtttcgcgtccccggagcacaagtaagaagcgagacttttgctgcagtatacgctgcggcaaaaggactcgcttttttcttttatcctgatagccgcaaggaaaactgtaaagaatagattaggggagttgatgtaaagaatgaaacctgcatatcaaaaaacgaaagaagaaatttttcaggactgccggtcgtcccagtcaggtctctcttcagaagaggtcgagaaacggcgtcaggaatacgggtacaatgaattgattgaaggacagaaaaaatctgtctttgttatctttttggaacagttcaaggatttcctggtactgatcctgattgctgccgctgcggtgtccatcgttctgaacgatattgaaagcgccgcagtcattctggccgttattattatgaatgccatccttggcacagtacagcaaatcaaagcggaacattctctggccagcttgaagcaaatctccacgcccacggcaaaagttctgcgggacggaaaaagggtggtgatttcgtcccgggaagttacggtgggcgatatcgttttcctggaagccggtgactcggtgtgcgccgacggccgtatcattgaaaatgccagcttgaaaatcaatgaaagtgcgctgaccggagaaagtctgaacgtggagaaagaagatcgcaccattgaagatgaggttccgctgggcgaccgcaagaacatggtttattccggcagctttgtgacgtacggacgcggcagtttcctggtaaccggtattggtatggaaaccgaagtgggcaaaattgcaagcctcctcaagtccacatcggaaaagcgaacgccgctgcaggaaaacctggacgatttcgggaaaaagctggcagtgctgattctggtgatctgcgctgtagtctttggcttaaacgtgctgcgtggcggccagatcatggatgcgttcctgttcgctgtggcgctggccgtggccgctattccggaggcgctcagttcgattgtgaccatcgtgctggcgttcagtacgcaaaaaatggttcgggagcatgctattattcgaaagctgcaggccgtagagggcctgggcagtgtttcgatcatctgttcggataaaaccggcacattgacacagaataaaatgaccgttcagaagtgctttgctgacggggtcgtgctggaagacagcgcagtccagtttgacaatgccgtcacacgcaagctcctggatgcggcggttctgtgcagcgatgctgagatctcggacggcaaggagatcggcgaccccacggaaacagcgttgatcgccatggcagagcgtcatgggcaggattggcgcgtcatgcgtcaggatatgccccgcgtggcagagattccttttgactccgaccgcaagctgatgtctacggtcaatcgttgcgcagacggttttgtattttttaccaaaggtgctgtagacgtcattcttgggcgcaccgaatccattctgaccgggagtggttcacggcccataacagagcaggactgccaagccatccgtgatgccaaccagcgtttttcggagaacgggctgcgcgttttggcttttgcttacaaagaagggcatgcggagatgaaaggtgcgctggacaccagcgaggaaaacggcctgacctttatcggtttgattgccatgatggatcctccgcgcctggaatccaaagacgctgtggccaaatgtgtgcaggctggaatccggcctattatgatcaccggcgatcacaaagtaaccgcttctgccattgccaaggaaatcggcattctgcagccgggtacacgggcggtggaaggcgcggagatcgacgctttgagcgatgaagccctgcgcgaactggtaccggagatctccgtttatgcccgcgtttcgccggaacacaagatccgcattgtgcgggcgtggcaagatcgcggcaatattgtttccatgaccggcgacggcgtcaatgatgcccctgcactgaaacaggccgatatcggcgtggcaatgggtatcactggtactgaggtggctaaggacgccgcttccatggtgctgacggatgataattttgccaccattgttaaggcggtggaaaacggccgcaacgtgtatagcaatatcaaaaaatccattaagtttttgctttccggcaatacggcaggcattctttcggttttgtatgcttctattatcgctttgcctgtgccttttgccgctgtgcatctgctgtttatcaatttgctgaccgacagcctgcccgcaatttctctgggactggatccccatagcagcgaagtgatgcaggaaaaaccccggccgaaaaacgagccgattctaaccaaagactttatggtggggctcttaattgaaggcgctgtcattgcgctcaacactatgattgctttccatgtagggttgcattatggtgctggcatggctgcaggcgcggctacggtcggcagtaccatggcgtttgcaacgctgtgtctgtcccgcctgatgcacgggtttaacagcaaggcagatcatcctgtcctgtttcgaaaagaaatgtttaacaatcgttacctaaatctttccttcctggtgggctttgcgttgctcagcgccgtcttgttgctgccgccgctggaaccgctgttcaaggttgcgacactgacgccgatgctctatggcgtgatcattggctgcgcggccatgaatgtggtggagatccaggtgatcaaagcaattcgtacccatctgaagaagaaacgctaatgcggtgcgccgcaggcaatggaaattgcctgcggcgcttttcttttgcattttttttcggcaccgttcgcccgtatgctgcataaggtgaactacgggaatgcgttttgcaggcccgagagcaaaggaggaatctactttgaatgtgaaacctgaacagaacggctgtgcggtgaccgaaggcagattgcccggcacgtgcgcgccgatggtttttccctttatcgccatgcagacagaaaattctgagcgttatgacagcagtgaggcgctgaaaagcggtaccttgtttcctggactgaatcttcccttccatgtagagatgcagagccgttttccaacggttccggccgctctggcggagctaatggctctggactttgccattgacgaactggggctttatctggatacccaccccaatgacagcgaagcgctggagctttttaattcctatatcaagctggcgcagcaggggcgcacgaaatatgaggccatgtacggcccgttggccaaacagtatgtttccgaagacggaaaatacacctggatcaatgatccatggccctgggaaattattgagggagggaagaagtaatgtttgtttatgaaaagaagctgcaatatccgatcaagatcaaaaataccaatccgcgtctggctgcgctaatcatttcacaatatggcggcccggacggcgaattgggtgcgtcactgcgttacctgagccagcgtttctccatgccttatcccgaactgaaagcgcttttgaccgatattggcaccgaagaacttggacatttggaaatgatcggtacaatcgtttatcagctgacccgcaatctgacggaagatcagatcaaaaccgccggatttgacacgtactttgtagaccgcaccgccggcgtatatcccaccgcggcgtccggcttcccctatagcgcggcgagtatggcctgcaaaggcgatttgattgccgacctgacagaggatctggctgccgagcagaaagcccgggttacctacgacaatatcctgcggctgagtgatgatccggacgtcaatgacgtcatcaaattcctgcgcgagcgtgagattgtacacttccagcgctttggggaagggctgcgcgttgcaaaagagaagatgaaccagaagaacctatactttatcaatccctctttcgacaaataacccatcatctgcccgcacgatttgtgtttgtgcagggcgaggcatagttttgccgcgccctgcatatggttttttgaggtggttttatgttcatcgtattgcacgcaaaacggattctctgtatcataggcttgactattctatttcttggcggtatgatgatcataagctatcgaactttagttccggtttttaggccggcgccagcagacattgctgtgccaatggtctacatcatcgacgctggccatggcggcgaagatggaggagccgtttcggcttccggtgtgacagaaagtacgctgaacctggaaattgcacagcgcttaaatgacgtgctgtcttttctcggaaaggataccgtcatgacccgtcccggggagaaggctgtatacagtgccggtgcctctacgctgcgggaaaaaaagcgctctgatctccagaaccgagtggagatggtgaatggatatgacggcgctgtgctgctcagtattcatcagaacagcctgccttcggtaccatctgtccatggcgcgcagacgttttataatacagtttccggagcagaccaactggcggagcagatccagcagagtttgaatcaaacagtgaactcaggcaacgaaaaaacggagaaacgcattgatgatacgatctatctgatgcgtcaggttttatgcccggctgttctggtggaatgcggctttctctccaatgctgaagaaaccaagctgctgcaggagcggcagtaccaaacgcggctggctctgacgattgcagccggggtgctgcaggaacctccggaagatgctcgtatgaatacacagcaaaacacggaagagaacaagaaagagaatggagcagttatctcatgaaaacaaaaacttccttttactgtacagagtgcggaaatgagtttccgaaatgggctggccggtgcatggcctgcggcgcttggaacaccatcgcagaacgtccgacagaggctgctgtgcgcagatcttccagcgcccgaaaggacaatcgcaccgcgatttccctgggaggaaaccgcaaagcaagacccatcaccgagctgagtactgctgaagagttacgctttgccactggtatgggagagctggaccgcgtgttgggcggcggcgcggtcaaaggatcactggtattggtaggcggcgcgcccggtatcggaaaatccacgttgatgctgcagatctgtgcacagctctgcagcactggtgatgtgttgtatgtctccggcgaagagtcagagcatcaactgaaaatgcgggcagagcgtctccatgtatgcaacagcaatctttatgtactttcggaaaccaatttatccgatatactggaatctgtccacgaaaataagcccaatgtgctgatcatcgactctatccagactatgttcagcgacgcattggatacgcctcctggcagtattggacaggtaaaggagtgcaccatgactctgatgcagttggcaaaaggggagggcgtcactgtttttgtgattggccatgtcaacaaggaaggctccattgccggacccaaagtgttggagcatatggtggattgcgtgctctattttgaaggggatcagcatatgagctaccgtattttgcgggcggcgaaaaaccgttttggtgccaccaacgaaatcggcgtttttgaaatggcggataaagggctggccgaagtggccaatccatcggaaacgctgctttctggccgccctcaggatgctccgggaacctgcgtcacctgtgctatggagggcgcacggcctgttcttgcagagattcaggctttgattgcaccaactgcttatgccaatccccgccgtaccagcaacggattggattataaccgcagcgccatgctgatggcagttttggagaagcggggggggctgaaaatttccaactgcgatgcctatctcaacgtgatcggcggcctttctttggacgagcctgcagcggacctggcgatcatgattgcactggcgtccagttatctggatgcaccggtgggcagcgatctagcggctatcggtgaagtgggcctgacgggtgagctgcgcagtgtgcagagcattgggcagcgcctgtgtgaagtgcagcgcctgggcttccataaatgtgtggtaccctggcagaaaactgacaagctgactggccttgacaatcttgagctgatccgggtcaaaacaattggccaggcactgcaagcagtacttagaaaataaaagaaacccgcagccaggggcatatacgctctccggctgcggatttctatcccgtttttattccccatcgtttgttgccgactcctgctttttataacggccgatgggattggcgcgggccgctgtacgcaggccttcgttgtcgatatgggtgtagatttgggtggtattcaggctttcgtggcccagaacttcctggagcgtacgcacatccacgccattctgcagcatcaaggtggccgctgtgtggcgcagtttatgaggcgaatagcgctctggatccaaaccggcggcggagcaagtgcgcttgaccagaatctggatactgtctacactgatccgccgatggttgcgtgaaaggaagagggcatcctgatctttggggtgaacatttgttccatctcgaacggacagataatcttgtatagcttgttgacaggcaggattcaaatataaaatgcgctccttgtttcctttgcctaaaacacgcaccgtttcaccgttgacatctttcagattcagaccggccagctccgacacacgcattccgcagctcagcagcagaaggagcatacagaaatcgcgctcagcatagggaccgcgcactgcgtccagaagtttgacagcgtctggctcgtttaagtagaccggaagcgttttgcgtagcctgggagcgtcaatatcggctgcagggttggatgagatcaattcgcgcttgagcagcagatagtcgaaaaaggagcgtacagcgactaatttgcgggcgcgggcagaaacgcttaatcccatctgcttttttccatggcgatcccgtg

SEQ ID NO: 3805 - DNA, 7899 bp, Unknown
  16S sequences of unknown bacteria
ccgccatcacacgtgaagcagttgacgagactgtggaagcgataaaacgccgcgcggatatctcaaaggaagaatatactacaaaagtaatgtacgcgcttcttctgtcgggacttgcaatgcagcttgcgggaaactcacgtccggcttcgggagcggaacaccatatgtcgcacctttgggaaatgcacctcatgaacgaagaagtcaacgctctccacggtgaaaaggttgcggtagggctgaatatagtagccgacacatataaaaaagcactcacgcgcggtcttgactacgacaaaatcggcggaatagagcttgagaaagtgttcgcgaagggaagaatatcgccagttttcgctgagcttaccgagcctacgctgaaagaaaacctcccagacggaacgctgtcttcaagcagtctcgcgaagataaagctggacgacatcgacagaattaacaaagagcttgccgaagccgcgtcaattcttccggaagccgacgagataataaacctctgcaccctcgccgacgttcccgtgaagccgagtgacgtaggactgccgagcgacgaagaattcattaaaaaatcactgaaatacgcgccgtatgtgagaaaccgcataacgcttttaaaaattctttccgcggcggacattatataaatcgtcaggcgagatatgtataagcttgataaacgtaattaaatatgtacaactaagtgataaggcatatgcgttagtataggttaacagcatatgcctattgcttttgtacaaaaaataccaataatctgagttagcagccgctgacttttgcactttaacacattgacagactaaaaacgtagtgataacattatatatagttgcgcaggaaggaaattatgtcagcttgtgcaaatccgaggtgcaaaatcgcacaaaataacagacagtaaagtacgctgtctgaaaaaagaaaggaaatctatgaagaaaaaatcttcgagccgtgtattgtcgctgcttctgacgcttgcaatgctgacaggcggagtcgcaccgatatccgcagcagggaacagcagctcatcggaaaagctgaagacggaaaaagtcgacgcagatattgcgagcaggcttgcctttgaggacgtctctcccgctgagtccgaggttcagtatgccgacggcgatattgttcgtgtatcggtggtgcttgaaaaaaagtccacactcgaaaagtttgtgtctgcggatgctctctcaagtaattccgccgtggcttaccgtgagcagcttgacaacgagcaggagagtatcattcaggcaattgaggacaagacagacgctccgcttgacgttgcatggaacctcactcttgccgcaaacataatctcggctaatgtaaagtacaaggaaatcgatacaataaaagagatagacggcgtaaagagcgtgtttgtcgagaagagatacgaccccatggtactcgacagcgacagcacagccgaccccaatatgtcaacctcatccgaacagataggctcgagtgcggcatgggcttcgggatatacaggcgcgggcagcagaatcgcggtaattgacaccggtattgacacggatcatcagtctttctcagaagaaggatatgaatactctctcgcacacaacgcggagatgaagaatattgacgcggacgaatacaaggaaagccttgaccttctcgacaatgatgagatagaggacgtgttcgaccagctcaatatttcgagaaaaaacaagggtcgcgtgtacgctaaggatatagacaagctcagagtttcgtcaaagattccgtttgcgtataactacatcgaccagaactttgtcgtcgaccatgaccatgacggagagggcgagcacggttctcacgttgagggtatcgccgcggctaactcctacattccgaacggagacggaacatattctcacgcgattgacaccgtaaaagtgcagggagtagctcccgacgcgcagataatcacaatgaaggtattcggcgcaaacggcggtgcatatgaatccgactatatggcagccattgaagacgcgatagttcttggatgcgactctataaacctctccctcggaacagtgaactccggctttacacgccccgacgcatattccgatatcatggacagcctcgcccagtcgggtacggtagtcacaatatcggcaggcaactcatacgcatgggctgactacagcaaaaccggaagcggacttctttattccgatgatgtatctttccagacaggcggcgcacccggaacatactcgaacccgcttaccgtagcttccgttgaaaacgacggatatacgggacactacttcactgtaggcggcgaaaacgtattctacaccgaagcggaatacaacaataatcctctcacagagcttgaaagcgagcaggaatacgtcttcatgacaaactacggcggctacaccgattactttgacgttgatgttgaaggtaaaatcgtgttcgtttcccgcggcggagacaatactttcgcgcagaaggcttcaaccgcaacaagaaacggcgctgtagcaacaattatctataacaacgaacccggtacgtttacaatggatctctcgagctactggggttccgcaccttgtgtttccatatcgcaggctgacgcggaaatgataaagaacagctcgacaaaatccgaagaaggcgactggtacacaggtacgctgacggttgcaacaggcatagactccgtaaagtacggctcggaatactatacgatgagtgatttcagctcgtggggcgttcccggttctctggagttaaagcctgagataacagcaccaggcggcaatatctattccgttaacggagcagtcgagggcggcaagtcatacgaatccatgtcgggaacttctatggcggctcctcaggcagcaggtatggcggcgcttctcggtcagtacatccgcgaaaacgacctcacaacaaagacaaacaagacagaaagacagctcataaacagccttcttatgtcgacagcagaaccgctcacagagaaagagtccggctcatactattccgtccttgaacagggtgcgggtcttgcgaacatcggaaacgcgataaatgccgactcctacatcatgatggaagaaaacctcagcggcactgcatccgacggcaaggtcaaggctgagcttggagacgaccccgacagaaacggcacatataccgtaaagttcagtgtgaacaacctctctgatgaagaaaagaactacaccttctcgaccgatatcttcacgcaggctatagttgaaaagggcggatattcctaccttgacaaaaagacaactcccattgcggctgacgtcaagtacaaggtaaacggagaagaattcgttcccacaacaaagattgaatgcgacgttgaccatgacggagataccgacagcgacgacgcacagatgatactcaattacgcaacgggtcttatctatcaaattgaccgaattgcggacattgacggcgataataacgttacttcctacgacgcgtatctcctgctctcacgtctcactatcgcatcagctgacgtggaagcaaacggttcggtcgaggttgaagtcgagataaagctgaacgatgcaactaaggcttatctcgacgaaaaatacgcaaacggcgcgtatatagagggttatataggcgtagaaacagcaaacaccgaagacggcgagattcttccgatgcattccatccccgtgcttgtcttctacggcaactggtccgacgcttctatgctcgataccactacatatgaagaaagagtatacggcgacgcaactccctcatatctcggcgaagctgaaacaaacaagctcgtcgtaagatatcccggagaaaagacaaactccgtctacacggctaacccctacatggtagagcccgaatatcccgcggacagacttgcgctgaactcaaagacctctgtctacagatacgactactccattataagaaacgcctccgctgtcgcatacttcgtacagaacgaaaacggagaggttatctaccttgacatagccgaggaacagctcacaagcgcgttctatcatgccaatgctctgaagtggtacgataccgccgacagcattacggtaaatcagaagccgtcatccctcggactctccgaaggcgacaagttcacagcaggtcttgtgctgattcccgaatactacgagacaaacggaagccttgacaaagcacagataaagtccctcatagaatccggcaagctcggacacggcgcatacttcgcggctgaatacaaagtggacgataccgctcccgtgctcaaagatgtggaaaagaacctcctcacaggcgacatcactgtaacggcgcaggataacgagtatatagcggatgttaaggtttataaaggctcaggctcgacgcttctcggcgaagttcttcccgaacagagtgaagccggagaagaatgcagtgcggtatttgaccttgactcttccgccggcgaatacatcatgatattcctcgcagactacgccggaaacgaagtatattataaggtaagctacggcggggacgcggaaaactatactggaaagatgtatggcttcacttcttcaaacgcacgcgactccaaaggcaaacgctgggtagaaattgatcccgaaacactgaactacgactacagcagtgcttccaaaaatacaggatttgcaaacgccgcggttgtcgactacgaagtttatgcggctgaatatgtcggaaaatatgttttcttcgcgacagaggacggagtttacaccgcacctcagggagaatggtcgaatactcaaaaggttacggacttctccgcactcgcaagcaaggaaataatcctcgacatggcgtataatactcagaacgacacactgtatgccgtgactggtgtttgcagcaatctcgactccggctcgcttgacaacacggtttcatcagtatattcaatcgacgttgtcacgggtgagatgacaaaggttctcgacattgacgtatatgacccgagaaatgagttctctcccgcatacaagctcatcagaacactggcaatagacaataacggcacgttctacgcgacaaacaacgcaaacggtcgtgacctctacctctataaatggactctcgacgacatggcaggcggagttataaacacacttcatcccgtagacgacgacaactacggctatctctacggctcgggtatgtacggtcagtattatacttccatgacctacgaccacgacaagaacgtgatgtacttcgcgtcaggctatggggataaatcctcgaatgactccgataacattctttgggtgatagacactgcggcaggcaaggcggcaaaagcaagctcgacatataattcacagctcagagcgcacgttgtcggactttataccgtttccgcttcctctgcacctcttccgtccgatacgcctgtgtcaaaggttacggtatctccggcaaatgtaagcattctcaagggcgcaaaaactgagcttacagcgtctgtatatccgtggcttgctcccgataagagcatcacatggacttcgtcaaacgaaagcattgctaaagtcgaaaacggcgttgtatacggcatagacatcggacaggctgtgattacagtgtcttccgtgagcgacacgacaaagacagcgcagtgcaatgtaacggtagaaaagctccccgatatcaagctcgacgcgcttctgacagacaacgagggcaattcccactgggctgaatttgacgtcaactctcccgcatcatacacatacctctccgacagcgactattacttcgcaggcacaatgaacaacgaagaaataatcgttcacgatggagctcatgtatacggaatcgaccccgacacatacgaaaagactctatacggttcgttagccgaaacatgggcatggtctgacgccgcagaaggacctaagtctgaggaaggcttcttcggtcagatagtaggcatatgcaacggcggcaaatatatcgagtttcttgacgcaccttccgctaagctcggctacttcgacctttccgaaacgtttgacagcgaccccatggcagtgatcgcatactcaggctccggcagatacgattacgtatattcaaagtggctgacatacgataactgccccgcaaacttctattatgttatcacggaggaaggcgcgctctacaagctgaacgttttcatctacgataacgacaacaaacccggcgtaacagcggaaaagataggctacaccgatgtagagcttccgggcgtatcgggactgaacggcgaaaagacagcgtccatgttctacgaatccgaaagcggctatcttatcgtctcctcacgcattttcgataaggaagtttctctctacgcggtttcggtaaacgatatagtatcggcaaagattggaacgtttggcagtgatatcgcgtccgctgtttcactcttcagatacgacagaccgacggatctcacactgaagctgaaccccacggaagtaactctctacaaaggcgacagcacaaaaattaaggcaaaggtcatcctcggcagcacaaacgaactcacatggaagtcaagcgataactcggtagcaactgtcgaaaacggtgtcatcacaggcgtcagcgaaggaaacgctactatcacagccacaacggttgacgtaaacaaggacggtcagcacatttccgcttctgttaatgttaacataaagagccttattgatgttaacgcaacggtaagcgcgcagattacagacggaaacggcacatcatgggttgacattaacctcggcagtgatatggcagtaacagtgaagaagagcggcgcaacaaaactcaacggaggcggtctcagcggtggatatatctatggctcagacgcgctccttgaagaagagggagagggcaatatctaccgcattaacgcagacagcttcaccgaagaagtaggtgctgacgtatccgcatacgcaatcctcgaccttgacgacgctcccgcactcgaattcacatacacggattactacgaccagcctacaagatacgacgcgttcggtatgccgctctacattacatattcatccgatatggcaatgctcaccgactacactggtaatcagaatcttcttgtgtggaagttcagcgaaagctatcccgacctcgccgccatcgcatatataggagacatagaagaaacaggctttggctcaggctacgaccccggcactatagctcatatgtatatgctcctcggcgctgacggtacgctctacaaggttaaagtaacacctatgtatgacacctcctcatacaaggtaagctacaagacaacacgcacggagttcggcactctcggtatctcattcacagaccgcaccgcactttctatgacgtacatcgaactcagcgcagacgaatacggacttcttatagcagacgcggcaacaggctcaatatactacgcaagcatggcgaatgcctccggcgagaacgtttacctcggtaaggtcggaaagatagacggagcgcttgacattacatccctctataacgcacgtcttaactccgacgcaggaaattcaaacgcaagcacagaagcaagagtttcaatccgcgaagccgagttcaacgcagtctccatgagtgacgatatcgccgctgaatacgcagtaaacgagagcaaagctgtgaataagtcaaacggttcactgaacgccgccgcacccgaatccgtgaaggactccgacgcagacgctgacgagcacgttctcacagtagatgtaatagaagacgtagcagtaa

SEQ ID NO: 3806 - DNA, 8908 bp, Unknown
  16S sequences of unknown bacteria
ccgatcatcggattcaggacgacacccaccgaatacagcacgcccgccgcgacggggatccccaacacattgtaaataaacgcccagaagagattttctttgatgttgcgcacggtcgcgcggctcaattcgatggcggaattgaccgagcgcaaatcgccgccgacgagcaccacgtccgcagagtcgatggctacgtcggtgccgttgcccatcgccataccgacgtccgcctgtttcagagcgggcgaatcgttgatgccgtcgccgaccatcgcggtcataccttctttctgattttcgcgtacggccgcgagtttgtcttcgggtaaaacttcgctgtacacgcgctctatgccaacctccgccgcgatcgcctttgcggcggactgactgtcgcccgtgagcatgatgggcgtaagcccctcttttatgagacgtgcgaccgcctctttactgccctctttcagcgtgtccgccacgccgatgagggcgaccaagtccccgccttccgcaaggtacagaaccgtctttccctcgcccgaaagttttgcagcctcttcttcgcactctttcaatgcgacgccgttctccttcatcaaacgggcattgccgatcagacatacctttccctgcgcgcgggcggatccgcccttgccgctgtaatagacgaaatcttcgatcttgcggaaagaaattttttcttcctttgccttcgccaccacgcattccgccaagggatgattggaattgagttcaatgccgcctgccattgacagcgcgtcttcccgcgtatatcgtccgaacgcgacgatatcggtcacgcgcggttttccctcggtaatggtcgcggttttatccaaaagtacgatctgaatgccgcgcgctttttgcaatgcttctgcgtccttatataagacgccgagcgctgcgccgcggcccgtcgcagccatgaccgccacgggcgtcgccaacccgagcgcgcagggacaggagatcaccaaaacgctgatcgccatattcagcgcgcgggaaatttgcacgtttccgcccgccgcgccgatgatcacccaaacaatgaacgtcacgagcgcgatgagaaggacgacgggcacgaacacgcccgcgatcttatccacggtgcgctcgatgggcgctttgctcgtacccgcgctgcgcacaagtttgatgatcttggaaaggacggtgtcctcgcccactttttcggcgcgcactttgagtatgttgcccttgttcaccgaagcgctcgtcacgtagtcgccctccgcaacttccacgggaaggctctcgcccgtgatggcggatttatcgacgaaggacgcgccaaagacgatctcgccgtccacgggaatactgtcgccctgcttgacgactgcgatatcgcctattttcagatcgcgcagggaaatctgcacctgttcgccctcccgctccaccgtgacggtgtcgggcgcgagtttcaaaagtttttcgatctcctcgcccgtctttttcttggagcgcgcttccagccatttaccgagcgtgacgagcgtcagtatcatcgccgccgattcaaaaaacattccgtccattgccagtttatgcgccgatgacatatctccctcattcatgcgcacgccgatgacgaacataacgacgacgctgtaaatataggaagcggccgaaccgagcgaaacgagcgtatccatattgggaacgcgcttgatcgccgccttgacgccgcttgtaaaaaaggcgtaattgataaagagaatcggcgtggtgagtacgagttgcacgagcgcgaaattgacggcgggtttcgcaaaagagggcagcggcgcgcctacgagcatatgcgccatcgtaaaatacatgagcgggatcaaaaagatcagcgagagcagaaagcgcgtgcgcaattttttcgcttcatccacgatatgcggaatttcttccgtcacgcgttcgcccgcaggcgtatccgcggcgatacgcgccccgtaaccgagcgcttccaccgcgcgcacgatatcttcgctgctgactgcgttctcgtcgaattccgcacgcatgctctcccccatcagactgacttccgcaacgcgcacgccgtccattttaccgaccgttttttggatacccgccgaacacgcggcgcaggtcatgccgctgatatcgaatttctgttccgtcatattctgattaacctcgtttaattgcaactgatttacttgcaattattataataccgttcccaaaatttgtcaagaaaaaaatctcccgatgaaaaacgttcgggagatttatatccaataaaacaattcgttaaacttcgaaacggaccctttcgagccaccaacgcgcaattttttcgttgccgagttctgtcggatgcacgctgtcgaaggaaaggagcgcgggttcggtcgtaagcgtttcctcggcaaacagtccgtccaaaggcacgtacgcgtcggcaaattcgcgcgccaatttccgcgccgcgtctatcttgaaatccaagtcctcgcggaagatctgaaatctttccagcgtcggcagcaggaacggctccaacagtatgatcttagcgccgaacgcgcgcaccgttttcaaaattccgcgcatattttgctcgtaggcaagcgccgtcgtgggatcgttttcgtcgtatcggcgccaggtatcgttgatgccgatgagaatggaaacgacgtccggcttcgtatcccgcaggtcgctttcgatacgcgccaaaagatctttggaacggtcgcccgaaatgccgcggttgaaaaactccacgcccgcgtgcgcgtttcttgcgatcttgtcgttataaccgctcaagctgtggcgatcctgccgatcgcgtccgcagtccgttacgctgtcgccgtcgaataagacgcgcgcaccgctatgtatagttaacatctcactcctccatagaataaacggcggatcgattggatccgccgcaaacaaaaactaattcgtcgattactttttctcttccacggaaacaacttctttgccgtcctagtaaccgcattttttgcataccttatggggctgcttcaactcgtgacagtggggacactccacgagggtaggcgccgttgccttgaaattggcaaatctggtattagtcctttgcttcgattgttttcccttgggtaccgccatgtttatacacctctttattaactattttccgttcaaatcttgattgaccttaaaaattatataatatttaaaaatctttgtcaactttttttatcggaatttgcgaaaatcatttgccttccacgagcgctttcgtttcgcgcgcgatgaccagttcttcgttggtgggaatgatgagaactttcacctttgagccttttccggtaatatcgcggatggagccgtcgtttttcgtcaggttcttagtttcgtcgattttgatgccgaagaaatccatatccctgcagatggcgctgcgcacctccgccgtattttcgccgatgcccgcggtaaacacgacgcagtctacgccgtccatcgccgccgcgtacgagccgatatattttttgcactggtaattgaaaatatcgagcgcaagacgcgcgcgctcattgccttcggctgccgctttggtcaggtcgcggaaatcgctggaaacgccgctcacgcccgcaacgccgcactttttgttgagatactcgatcgcctgcgccaaatcgtaaccctttttatggcagagatattcgaccacggaaggatcgatgtcgcccgaacgggtgcccatcggcacgccgcaaaggggcgtaaagcccatgctcgtatccacacacttgccgcccttcaccgcgctgatggaagatccgttgcccaaatggcaagtgatgatctttaaatcttcgggctttttattgagatacttcgccgcttcctgcgatacgaatttatggctggtaccgtggaatccgtagcggcggatcttataatttttataatcgtcgtagtcgatggcgtacatatacgcgtaatcgggcatggtggaatggaaagcggtgtcgaacacgagcgccatgggcgtgccgggcatgacttccatgcacgcctcgatacccgtgatgtttgcgggttggtgcaggggcgccaactcgatattgttgcggcatttttccattacctcgtcgttgacgagcacggagcagttgaaatcttcggcgctgtgtacgagacggtgccccaccgcgtcgatctccttcatcgaagagatcgcgccgtattcgggatggacgagagcctccagaaccagacggattgccactttatggtcgggcatatcctgttcgatgatcttttcgcccttgtccgtcttgtgtttgagaatggatttgggaagaccgatgcgctcgcagccgcccttggcgataacgccctcggtgtccatatcgatgagttgatattttaaagaagaacttccggcatttactaccaaaattttcatgattctataacaccccttttcgtttaatttttataattgcgtttgcaacgcggtgatcgccaccgcggcgacgacgtcgtccgacttacagcctctggaaaggtcgttgatgggtttggcaaatccctggcagagaggtccgatcgcctggaacccgccgagacgctccgtaagtttgtatccgatatttcccgcgtccagatcggggaagatcaacacgttcgcatgccccgcgactttggagccgggcgccttggaacttgcgacggacgggacgatggctgcgtcaagttgcaactctccgtctatattcaaagagggagccttttccttcgcgagcgcgagcgccgtcgtcactttgtcgatatcggcgtgtttcgcgctgcctttcgtggagaaggagagcatcgcgacgcgcggctccatgcccgcgatccgctcggcggtctttgcggatatgatcgcgatctccgcgagttgttccgacgtggggttttcgttaagaccgcagtcggaatatacgaacgcgccgtcctcgcagtattggttgccgccctcgggcgccaccatcagaaaataactggaaaccaaaggaacgccgggcgccgccttcacgatctgcaaaccgggacgcagcgtattcgccgtcgaatgacacgcgcccgaaacgagcccgtccacgtcgcccgctttcagcatcaaaacgccgaaatacgtattgtcgtaagaaagtttttccgcctcttcttccgtcatgccctttgactttctcagatcatacaaaagcgccgcatattcctttctcttttcgctcttcgcgggatctacgatatccacgcccgtcagatcgacgtcgggattcgcctttctgatctcctcctctacgccgagaagggttatctttgcgatcttctgacgaacggtatcggcagccgcttttacgacgcggctgtcctccccctcgcaaagaacgatgcgtttgtttaaagcggacgccttcgctttgatgttgtccatgaaagtagccatttttctcctatgctccaatcgctttattttttttcgcttttggtatataataattttatatatcagtgcgtttaccatacagtattatagtatatttctcaaaaaaagtaaaggttttcgggttaaaaatgaagatttgcggcgtaatatgcgaatataatcctttccacaacggacacaaatatatgctcgaccgcgcgcgggagcaaagcgggtgcgattttttggtctgcgtgatgagcgggaactttacccagcgcggcgaacctgccgtttcggataaattttcccgcgcggaatacgccgtgcggggcggcgccgacgcggtcatagaacttcccgcggcattcgccgtatcgcccgcggaactctttgccaaaggcggcgtgaaactcttatcttccatccccgattttaccgcgcttgcattcggcgcggagagcggcacggcgcaaagttttgccgcgaccgccagagcgctatccgaggagagccgcgaattgaaagccgccgtcaaagagaaactgaaaacaggcctcagccccgtgcgggcgcgcgcggaggcgcttgaacagatttcgccgcccgaagtggacatggatcttttaaattcccccaacaatattcttgggatcgaataccaaaaagcgctctttcaatttgaatgcggcgcgcagatcttacccattccgcgcgtgggcgcgggttataccgatacaaagcagtacgcggattattcctcggcggcggcgatccgcaaagcggcggaagataaaaagtatcgctttatccgacgcaacgtgcccgaatacgtgttccgcgacgtgaaaaattttacctcgcccgcgctgtacgaaaagatcgcagtctattcggtgatgagcaagccagcctccgaactgaaaaagatcgccgactgtacggaagggctggaaaaccgcattcaggcactcgccaaggataaccccgactacggcgcgctcatcgaaaagatcacgaccaagcgctacatctcctctcggatccgccgtatcttcgccgcatcggttttgaatattaccgaagaactcatccgccagagcctgaaaaacaaattgtatctaaaaatacttgccgtcaatcgggaaaaggcggcggatatcctggcggctttaaaaaaatctcagttcccgctgatcgcgaggcgctccgaccttgcggaactttccaaaacggcgcaggcgctcatcgaaaaggattttcaggcgaacgaagtctatcagttggcgacgggaaagaagttcaacgacaacgcgatgcgtttggtttaaagtaaaaaaggcgcgacaaaagtcgcgcctttttcggttggcacaataaatccgagataaacctgtaagccgagttctgtctggtacggtcatctatctagacgcatcgtcgccgatgcgttcgagcgatattcacagcatatatcgggcgagcagcccatgcgacatatgcccaatcttgcaccgaacggggtttgcacggcacggcgcattactgcgccgtcggtgagctcttacctcccctttccatccttgcagattgctctgcggtctgtttctgttgcactttccttgaagtcgccttcaccggacgttatccggcgttctgctctctggtgctcggactttcctcatggcgtttccgtcacgcgaccgtatagtttactcgaatcgattgtcggatcattataactctttttatcgtgtttgtcaagcaaacgggggctgcggcattttacggcgggaccgccaaaacagttgaattttcaagcgttttgtaatacaatgtataaggaaaaatttttaatttttggagatggtaaaaatctatgaaaaaaacgaagatcgtatgcacgatgggtcccgcctgccagaatgaagaaacactgacgaaaatggcgcttgcaggcatgaacgttgcaagactgaatttctcgcacggggattacgccgagcacaaaaaaaatatcgatctgatcaaaaaagtgcgcgaaaaactgcatatccccctgcccatcatgctggatacgaaaggaccggaacttcgcatcaaaactttcaaagacggaaaaatcactttgaaagagggcgacgccttttcctttaccacagaagagatcgagggcgaccagacgcgcgtttccgtctcctataaaggcatcgtcaacgaccttgccaagggcgacaccattttattgaacaacgggttgatggtctttaaagtgaccgaagtcaccaaaaccgaagtcaggaccgtcgtcgagatcggcggcgtgctttccaataaaaagagtatgtttttccccgacaaacttctgacgatgacctatctgagcgaagcggacaaatcggatatcttgttcggcattgaacaggagatcgattttatcgcctgttctttcgtatccaaagcacaggacatcatagatatacgcaatcttttaaaagcgaacggcaatcccgatatcgatctgatcgcaaagatcgagagccgcgcgggcgtgaacaacatcgacgaaattttggaagtcagcaacggcatcatgatcggccgcggcgacatgggcgtggagatcccctttgaggagttgcccgccattcagaaacatctgatcgataaatgccgcttaagcggcaagcgctgtatcaccgccactgaaatgctggaatccatgatcaaccagtcccgtcccacccgtgcggagatcagcgacgttgcaaacgcggtctacgacggaacgagcgccatcatgctttcgggcgagaccgccgcgggacgatatcccgtgcaggctgtggaagcgatggcgaggatcgccttggaaaccgaatcgcacctcaataacaagtacggcgaccgccgctgcctgatctcgcccgatccgagcgacgcgctctctcattccgcgtgcgtattggcggaagatatcggcgcgaaagccatcgtcgtctgttcgaggacgggcggcaccgcaaggctcgtatcccgtttccgtccgaaaatggatatcatcggcatgaccgtcgaacccctttcatacagaaaactcgccctatcctggggcgtgatccccgtcatgagcgaagagttcacttccatggacgtgcttttctaccacgcgaaacgcgcggcggtcgcgacgggactcgtgaaaaagggagaccgtatcgtgattacgggcggcaatcccaacggcaagcccggaaattccaacgtcatcaacatcgaacagatataaaagtataagcgcccgctttcgcgggcgcttatactatagtgagagaataggaaaaaagttttgtgtaatctgttttgtatggctgtattataacccgtcaatat

SEQ ID NO: 3807 - DNA, 9432 bp, Unknown
  16S sequences of unknown bacteria
gatgccgattagcataaggcatataagccctgccgatatgtacattataatgtttagcaatgcacatttgactctgcgctttgtcgatattcctttattcatttcttccgcctcgctttacaatgagattaagcaccagatttattatcataatgaatataaaaagtacaagtgcgattgaaaagagagcttctctatgcaagcccgcagaggcgtatgacatttcgcttgccaccgcagtcgtaagaaaacgtacgcttgaaaagagtttcggcatatttcccacattaccggaaaccatcattactgccatcgcctctcctatcgctcttcctacacccaaaatcacagctgtaagtatgccgcttttggccgcaggaagtgtcaccttaaaaatcgtttccgtttttccagctccgagcgcaagagacgcttccttatattctttcggtactgcccgcagcgccgtttccgatacggaaattactgacggtaaaatcattaccgccagcacgatgattgcagaaaacagattggctccgtccggaagattaaatacttcccgcacacagggtacgattattatcatacctataagtccatagacaacagaaggtattcccgaaagcaaatccactgctgtgcgcacagtgcttgccacacctttgtttggcatttcggcaataaatacagcacacataattgccggcggcacacctattaatattgcagccaaagttccgtaaagcgaagtaagaataaaaggcaagatgccataagccggcgggtcggctgtcgcggcccacttagtaccgaataaaaaatccgttatcccaatttcgcatacagccggtatgccgcttattatgagaaacaaagtgatgacaagtacaaatatgacagcaagaagtccgcacagagtaaatatgtagctcattatcttctcgaaaatttctgccgattttctgagtttaatcatcgctttatctccattatttcttaaccggtactgcacccgcatctgttataaggccttctgcatcttcacttaccgcgaaatcaaagaacgcctgcgctgcctccgaaagcggttcatccttcggagttacgaaaacaaagttacgctgaattttatattctccatcctgtattgtttcctctgtaggcactactccttctaccgcaagcagctttaccgtatcattaacagaagcaaccgatgcataacctatcgcattagggtttgatgaaactgtctgcacaacatctccggtcgaagtaagttcctgtgtatattgacacaaatcttttgtgccggttacctcttcaaatccatcgcgcgttcccgaagccgcttctcttccgattaagacgatcggtgcatcgtcgccgcctacttcattccagtttgtaatttcacctttatatatagcgctgatttgctctatcgtcaggtcgcttaccggattctcgttgttcacaattatgcctattccgtcaatagcaatcactgtctctgtcaggttctgcttttcctcgtcggttaaattacggcttgaaagtcctatatcgcatcttccttcagctacagcctgtatgcccgcacctgaaccggtaggattatatgttacctttacgttctggttttcttccatatagctttcgctgagatatcctatcaccttctccatcgatgtcgaaccatccgtcgccaccgtctgagactctgatgatgcgcctccttcatcagcatttccgcagcctgtaaatattcccgcaaataatactccgattaacattactgctataatctttttcattgaaattatcctccttgttattttccttttataagcagagtatatcaaagcgtatgttaattccgaaagtatatttatgttaattgtatgttaacaaaaaatgaaaaaacccgctgatttcagcgtgtataagtttgacgagggtgtttttgtaaaacttggcaaaaatacagtaaagtcgaggggttttaagcgcagaaagtgcgctatatcgcgaaaaattggtatcatagctaaacatcattatgcccgcttttgcaagggtatagccgcagcaagcgtgactttccgcggaaaaagagcaaccgcggcgcaggcgactgactttttattacataaaaaagccggaacaaactttacttgctccggcgtggtgcgcgataagggacttgaacccctacggtcgcccgccagatcctaagtctggtgcgtctgccaattccgccaatcgcgcataatttcatatgctgcatcgtaaataagccgcgatacaacatatgtaattatatcggattttttgcgaattgtctattaaaattttacatattttttaataaccaatatatccgccgcgcacgctctacttatatataactgcctgccacggctcaagcctataaagatcatttcctgggcccaatgcattatcgagcaccggctcaagtccgcagaaatctatatttttatcgaggcttgccggttcatccgacatatttacagctacgagcactctttcatcttcaaaacgacgctcgtacaccatagcgtgctcacagccgctctctattctcacaaaatcaccaaacagcaacgccggagtaccagctcttaacgctattgcctttttgtaaaaattaaataccgaattctcatcagcaagctgagcctctgcatttatctcatccttgtttttattcacctcaatccacggtgtaccgtcagtaaatcccgcctgctcgcttgcatcccactgcatcggcgtacgtgcattatcgcgcgaacggtaacgcaggttagcaagcgcttcttcctcactgagacctgcttcatttatcgcatatttatagtaattaaacgcatcgacatcgcgataatgttccatcgagtcaaagcctgcgttcgtcataccgagctcctcaccctgatatacaaaaggcgtagccaaaatagtaaactcaatagccgcaagcagcttcgccgaacgctcgcggtacttgccatcgtttccaaaacggcttacgggacgaggcaaatcgtgattgccccaaaaccagctgttccagccaccgccggcaggaagctcagtctgccaacgctctataacatcgaatagctgtgctgccgtaaaaggtacaatatcccacgcgcctcccggtccaaaatcgagctcatcatgctcaaacatatgattcatactgagctcatgtctgtcctctgctaccatcaggagcgtttcctctatatctgacgccgagcattctccgaccgtcacgatacttcttggcgtaaatatcctctcattcatctcccttaaaacatcgtgcatagtcggctgattggtaaaaaacggacggccttttacataatcaggcgcatcctccggcgcatccggaaatctctggtcttttccgattgtatttatcgtatccatgcggaacccggccacacccttgtcagcccaccactcaataatcttataaacctcttcgcgaagctcacggcactcccagttgagatccggcatcgacttcgtataaagacgaagataatactgtcccgttgtctcatcatactcccacgcaggttcattgaaatagccgcgccagttattcggagccgaaccatccgctcgcggatctttccatatatagaaatcgcgataaggattatcgcgcgatgaccttgattctataaaccacttatgcctgtccgaggtatgattgaacacaagatccatcattattttaatgccacgctttgcaagctctgcggaaagctcttccatatcttccatcgtgccaaactcaggatttatctgataataatcgcttacatcatacccattatcgtcattcggcgacgcgtacaccggacacagccacaccataccaactccaagctccgcaagatagtccgctttctctataattccgcgcaaatcaccgataccgtcaccgttcgagtccttaaagctccgcggatatatctgataaattacagtcgatttccaccactccgcattctttttatctatcatatttacctcccgacatctgatttttatataaatttctttatgtccatattatcagttttttctgaaaatgtaaatattaaacctcgcttgaaagcagccttcttaaaatcatttctctgttatttataaacatcctcgttactatataactgtccgtatcctcatattcgcatgggtgcaccgttccttcatcgaaagtaagtatctccgctcccggcagtccgagcaaaatcggcgaatgcgtgactacaataaactgcgccccgtgttttgcgcactcatatatctcagcaagcatcgtaagctgcctttgcggtgaaagcgccgcttcaggctcatcaagcaaataaaggccaccgccttcaaaatacttttgcgcaagcgcaagaaagctttcaccgtgtgacttttcatgatatctttctgacggatgtgcaaagtccgaatactccttttcttttgtcgccacattatagaaactctctgcacgcagaaaatatccgcttcccggtctgttatatccgcgcacaagtctcacagcgtcacagagctccgaatgcgaatcatatgtcgaaaaactgtaattctttgttccgccctcaggattaaaacctgcggaaacggcaatcgcttccagcaatgtcgacttaccgctcccattctctcctacaaaaaatgtcacaggttttttgaacataagttcctgcaaactgtttaacgcctctatatttctcaggtagctttttgcacctatcaagttccattctatccttatgccctgaataaattgcccgttcatttgcttttctccttttgcttcctttctctggctcatatgcttatgatactacacataaaatataaactcaacatcgagctgcaatttactcgaagactctatttattgacctgcaaaagatatttattttctcaagaaaaaacgagcgcctcaaagcgcccgcatttcatatatcattatttaatttacgctgcattatatgcattttttacgcgcgtttttcgcatatacaatattccgccgattacaagccaaaccgcagcaaacactataccaccgattacataatgacctatagcatccattcccgcacctttaagcataatatctttaagcggattgtaaaagtagtaaagcggccatatcgccttcattacaggagcaaagcctgcaggcatcatatattccggccagccatagccgcagcacagcattgtcggaatcgaaaggaacattgtaaactgcgatgcatgtattttttcctcaaacactgaagccaccacgagcgacaccgctaaaagtccgagcaaaaatatagcgtgcagcaaaatcacataaaacagattaccgttaatcggatatgcataaaccaaatgaactataagtatgcaggagagaagtccaataagactcagtgccgcataaataagcagcgtccgtaaaagctcgccagaaaacagcctaaacacaggcgcttttccgccggcttcaccgcacaaagcactgccgccttcacgcagcctgtgcttttcatctatcagaagcccgggcacagtagaaagtatggtctgctgcacgaatatcccaaacagtcccgcaaacagataatataggtaacaggtttgcggattataaagcctcctgtccgcaagattcatcgtatacacattctgctccgcagcgctcggcttcatatcacccgattccagatatttcatctgtacacttgcatttgccatcataagaatcgtcgtgctgttaagttgcacattactgcaaacgagaaaattagagccatctacgagcacagtagcctccgcgcccgcctttctcgcaagatcatcgccaaaaccctccggaattatcagcgcgccgccaagctcaccgccgatgagcatatcctctatctccgcatacgaatcaacatcctccgtaatttcaaatccggggcaatcgtaaaaactgtcgacaatctgacgcgaattttccgacttatccatatcatatactgcaaatggcacatgctcgacaaatatcgggctcataacatatccgaacgccagagtaaacaaaatcggaacaaatatgagaactataacgggctttatgcgcataaacctttcactcattacgcattcaccccactttcggcatttttaccgctttctgcaatacccaaagaaaactccgcatctacgccctctctggagctctttctgtgcaaaaccgcatactttataatcgccagcaccaatacctcgcatatgaaaaatgcaaagagaaacgccatatcatcaaacagatgatgcatcttaagcggcttcaggcaagtatttctgaccgtgtcgctgaaatatgtaaatggaagcagttttgccacaaactgcatcgctttcggcatcgcaaccacaggaaatatatatcccgcaagaattgatgtcggcagcaccaaaatacacgatatctgcgtacataacagcctgtctggaagaattgaaccaactatatatccaagacatgatatatcgagcgcaaacagtattgtaactattgtaaatcctataaatgttccgcgaagcggcattccgtaaattatccactgcacagccatagttgcaaaaaccgaagctgttcctaaaagagcgcacagggcaatattctttccgtgacccagaattccgattcttttatccctcatcgcaaatccaaactccgcaccgcctatagcaatcgctatctgcacaacactgcagagcatacccggaagtgcaaataccctgaaactcctcgttggattatacataatcctcgtcacattatcaatcggctgcacatagttcatcacctgactcggcgctattccctgcttaccctcgtaaacattcatcatatacgcagacttcacagtcaatagtatctccgtcatgcttgtcttagatgacactattacaggaagagtcgaaccatcgtatatcgtgagaataaccggcgcctcaccttctatcacatcggaataaaaattctccggtattattatccccagatacgctttgcccttatatatcatatcttcaacttcatcatagctgtccacatattcttttatatcaaaatacgcactgtcatcaacataatcgagaaacattctggtaaaagagctgtcatctgcatccataacaacagtaggcaccgacatagccacatccgctttcatctcataaccgataatcaagctcgacataacaggaatgatgaaaaacataagaattatcatcctaatattacgcttatgttccactttatgaccccactatctgctctcaaaatccacaacgaccgtcattcctgaataaagttcctccggagtgtctataagctccaccttaacgccgtatgacagtatatcaaacgctccgttctcattggtcgcacgcttagttgcaaagctcggcttctgacttacatttgttatttttcccgtaaactcttcgcccggataagccgcaaatgtcacttttacctcatctccgcggtgcactttcccaagctgcgtttcttcaacatttacctccacccacggattttcaggcgacgtaacagaggcaacaggcatacctgtagaaataagctcccctttatctacattaaccgctgaaacaatgccgtccatcggcgcctttatctccgcgttttctaagtagctgtttacttcagctaccgcaccatccgcctgcgccacaagtgcattcgccgctgccttatcctccgtgcgcgcaccttcaagcgccatatcatatgtttctttagccgctatatactgagcttcaacttggtcaaacgtcgactgcgctatcgcctcttcctgaagcaacactttcatacgttcatacatcttggcggcgtattcataagcagccttagcctgagctacttcctgactgcgcgcacccgcatccgccatatcagcctgggcctgtgcggcagactgtgcaccttctgcctgcatcagcttagcatccacgatatcacttttcattctcacgagcacatcgccttcttttacctcatcaccctcagaaacaagcacttcttcaatcgttccctcaagcatcgaattaagtgtcgattcagtcattttaaggcttccctgcaccacgagcttatttttttcgtgcgcctgcaccgccgcataaataccgcataaaagcacgataacaagcacaagtacaattacagtcacagttacctttttcttttccataataatctcacattcctttttttatttcatttatatttcttcttcactctccgctattgccatatcgcacaaattacgataaaatatttatatattttttagcggagattattaaaatgtcacataatgcaaaatcggaactaaccaaaaatgctttggccgattcacttaaaaaacttatgatttcaaaacctataaacaaaatcagcattcgtgaaatcactgaaagctgtggttttcaacgcctcaccttctattatcatttcgatgatgtgtacgatcttttgcaatggacgatgcgccgcgaactcatcattcccattaaagaaagcggggctttttccacttggcaggaatcaggaatttatctgctgcgctatcttaaaaacaataaagccctttcgctttccattttaaattccataggccgtgaaacgctcaaaaatctcatttcaaatgatacatacgagttgtgcatgtatttcctcagaaatatcgggggcgaccttgatatttccgatgaagattatcacacactttgtaacttttactgcgtatcgctcgccgcactggccactaactggctcgaaagcaacaccagcgaaacaccggaagaagctatcgcaaagctcgaaacaataatagaaggtacagcacggcacgcactcgagcgattcgctaaaaaagatagcccctcgcattcataatcatttgttttatccgtaaagctattaaaacggaatgcgcatagttccgatgccctgcgcatcattatactctatcactgcaaggttatatgctgccgcagcattagctgcatttaaatttgattgatatacttttacctgcatctcaagaagctcatccggagtggaaagaccctcttcatatgtgagctcgacgagccttagaccttcgcttgcgtactcttgaagtgcagccgcagcggcaagctccgcctttttatcgcttacaaccgccgctttatttctcacatctatttctatctgtacccgagcgtcatttgccgtcttctgtgcggttttataatttatgtccgctgtcatacgcgttg

SEQ ID NO: 3808 - DNA, 4033 bp, Unknown
  16S sequences of unknown bacteria
cacttgaaaagtgcgaacataaaaacagtttcatccatatcctccttaataaattccgatttagtaaacggatattccatacagcccgcattccatccgatcacagaaaattggcaggcagccaaaatgcccgtcgtttgagaaaagccctcacatcaactgaaacagtatgctgtgagggcttctccgggctttcatgcaccgtgatggatcgcggccatggagcgtcttactgcttttccgccgcccagtcccggcactggtcgatgcggtcgccttcgctgcctgttagcgggtcgtaggcgaactcgtgcagctccttgcaaggaaagttggggcagaagccgcagttttccaaacctttgccctcgcagcagtccttgatggggcagcgcttgccccagtagggcttcttcattttcaggcagccggggcatttcatgacgtcccggtatttgcattcgctgcatttcatgccgcagcgggtctcgatcatctctatcttcctcccttggcaaacgaatggggacggcaggggtttcactcctgcaccccgacaagggcttcgcccttgaccctttattgaccgcgtatacgcggtcaataaagtgggattgtgaagggcaaagcccttcactgcggggcttggggccgcataggccccaactatcgccgcttagtatagcagtgggaaaagcggctgtcaacttgcgattcggggcgggctatgctacaatcggatgggcatttttcggaaaggagcgggcggcatgaagctgatctcgtggaacgtcaacggactgagagcctgtctgggcaagggctttcaggattatttcgatcagaccggcgcggacgctttctgcattcaggagaccaagatgatgcaggggcaggccgaatttgcgcctgagggatatgcgcagtactggaacagcgcggacaagaaggggtactccggcacggcggtgttcacccggatgcaccctttgaacgtgacctacggcatgggcgtggacgagcacgaccacgagggccgggtcatcacgctggaatttcccaaattttatctggtgacggtctacacgcccaacagccagcgggagctgacccggctggcctaccgcatgacgtgggaggatgcgttcgccgactatctggtcaggctggacgaacagaagcccgtggtggtctgcggcgatatgaacgtggcccacagggagatcgacctgaagaaccccaaaaccaacgtgcataacgcgggctttacgcaggaggagcgggacaagatgtccgccctgctggaacgggggttcgtggacagcttccgctacctgcacccggacgaccgggaccgctacagctggtggagctacatgatgaaaagccgggagcggaacatcgggtggcgcatcgactattttctggtgagccggcgcatcgcggaaaacatcgtatcggcggacattgacgatcagatcatgggcagcgaccactgcccggtcattttggaactgaagggaatggaggaagaagcatgaaaattttgtttgcgtcggatattcacggttcggccagcgcctgtgagaaggtgttggagcgggtgcagaccgaaaaggcggatcggctgattctgatgggagacattttgtaccacggcccccggaacgacctgcccgaccgttacgcgcccaaggaggtcattcgtctgctgaatgaaagccccctgacgcccctgtgcgtccggggcaactgcgacgcggagatcgaccagatggtgctgaatttcccgatcatggcggattacgccctgctgccgctggaaaacggaagctgcgccttcctgacccacggtcatcttttcgatcgggagcatctgccgccccacaagcccggagacgtgctggtgaacggtcacttccacgtatacgccgccgagcctgcgggggatatgttctacgtcaaccccggctccgccgctctgcccaaggaaaatcaggaaaagagctatatggtctacgaaaatggcgttttcaccatcaaagcactggaaacaggcgaaacgctgaagaccttccgccttttttgacggaaaacagaccaaaaaagcatgaagaactcgtgaacatcgcaaaaagaccttgcccttgcttcggaaatcgcgtataataatgcgagcaacttcattactttcattaggataggagagactttttatgcgcaagcgtgttgttctggccctgctgctcgtggtggccatggtagtaaccagcagttgttccctcgtcgtcaaggacgcggaggtagacgcccagacgcctattatcaccgtggtggggcagaccttcaccaagggcgaagtgaacgctctggtgcagaattcgctgaattatcaggcttccatgtattcgatgtatggcctgacctttgacccgacctccgaaagcgccatttcctccgcgcaggaaagcgttatcaatggcctgatcgagcaggctgtggtggatgccaagatggacgagttgggcatcgaactgaccgaggaagacttggccgagattcagacggaatctgagagcacctatcagggctacaaggacaccatcaagagcgccgtctactccgataccgaactgaccggcgatgaactggaagccgcgattgaggaaactatgacgcagtacggctatcccacgctggacgagatcgtggaaaacaacaagaccaccaagcgcaccgaaaagctgaaggcggaagttgtcaaagacgtgaccgtcaccgacgaagaagtgcagacggaatacgacagccgcgtggaaaaggccaagagcgattatgaaagcaatcccggctcctacggcaccagcgtgaccaacggcaccaccgtttattacacccccgccggataccgctatgtgaagaacatcctgcgcaagttctccgacgaggataaccagaagatcaacgatatccagagccagatcaccgacaagcagacccagctgagcaatgtggaaacctctctgagcgatctgggcgaagccacggaggacgagtccgaggagatcgccaagaaccgtcaggagctgaccgacacgcagaccacgctgaatgctgagatcgccgatctgcaggcgcagaagacggccgccgaggaagctgcctacgctgccctgcagcccgttatcgaagaaattcaggcgaagttggctgctggtgaagactttgacgcgctgatggaagaatacggcgaggacaccgggatgcagaaggagcccgccaagatcaacggctatcctgtgtgcgagaagagcaccaactgggtggaatccttccgtgacgccgccatggcgctggcgaaagtgggcgatgtgtccgagcctgtgcgcagcagctacggcatccatctcatcaagtatgtgagcgacgcggtggaaggccccgtggctttcgacgatgtgaaggacactatttatgaatctctgctgagcaccaagcaggacgacgcgtacaacgccgctgtggacgagtgggtcgccgccgctgacgcgaaagtcgaccgcgacgcgctgaaggactaacaaacgaaaatgaacatgggccgctttccgaaaaggagagcggccctgttttgatgggaaaatggggatgagccgccctcgtgtgagggaagggctggccgtttgctgggaagttcgtttcttttcggaaaggagccggagggatgcaggcaaatagcaatcggagcgcacggcagtgcggcccgcgccgattgtttgccccgaggaaagcccactgtaagcgacgggaaaagccaactttgccgtaggggagcccccgctaggggtttgacgcgccgactacggcgcgaacggtggggctgccgcccccagggggatcgtactttctttcgaagcgaaagaaagtaccaaagaaagcccgcggcacggcgactccagaggcggcccaccccgctgcgcgtaattcgcaaatatcggcgttccgggcactgccgtgcccggcccttgtattt

SEQ ID NO: 3809 - DNA, 5225 bp, Unknown
  16S sequences of unknown bacteria
catactgaagaacaccgacacaatcgtgatgacgctggacaccagctgcgtttccgcgatattttttacccacgaccatctgattgttttccacgataatgctcggacggagcttgagcaggttggccccgaatttggccactcccgagcagcgcccgccggcatgaagataatcgagagtttcgattataaaggaaacgtccagccgctcgacggcctcctcgcatttttcaacgatttcatcggccgaaagcccctttgccgcaagctcggcggcgagaagggcgatgtgccccgttcccgaggagaggtttttggaatttatgacgtgaaccccttcaaactcctcggccgcaacctttgcgttttggtaggagcttgaaaggaaactgccgatgtttacatggatgacttcaaagccctcgtcggtcagttttttgaaaaagtcggaatattcgccgacgctgaccgcgcttgacttcgcaagcttgcctgttttctcgtagtatccgaagagatcctccggcacggcgtcaacaccgtcggaatagcttttgccgttcatctcgatgtgaaggggggtaatggaaaggccgtatttttcaatcagctcgggggataaatccgccgtgctgtcggttgtaactttaataggttttgacataagccgcctcctttgtataaatcttactaattatatcacctaaatttttttatgtcaagaaaatatattggggaaatcgctcataaacggctgtttcgctgaatttgccgctcgatccacgccataagaagatttacgattttttgctgctgagcctccgtcagcccgcagccctttttgaccctgtaccatttttcgagacagcccctgcagcagcaaccgcaggcgtgctgagccttgaaaacgggatgtcctttcatgggggtctggctgccgtcgtttttcggaaaagcgggggcaaggcgctctctgacaaaatcctcggcgtgacggcgaacggtttcggttcctttggtcgagatatattcgatatcttccttgttcaaatgaaaggaactgcgaaatttcgacctttcaaggcggtcgagagcctcgtttacggtttgcaaaataccaccttcaaacagttgaaaaaaagctgaccttgtgttaaaatcccgataaaggaatgattttatggataatatttttttgacgatcgccgtaaccttttttgccggaatgggagcgggactgggcaccgggtttgccggcatgagcgccgccgccgtcataagcccgatgcttataacttttctcggaatcgagccgtatacggcggttggaatcgcgcttgcctcggatgtgcttgccagcgccgtttcggcctatacctacaagaaaaataaaaacctcgacataaaaaacggtctgataatgatggcggccgtgcttgtctttacggttgtgggcagctttgtttcaagcgtcgtcccctcggcgaccatgggaaatttttcggttttcatgacgctgctgctcggcattaaatttatcgtaaagcctgtcatgaccacaaaggagcagatggaggccgtgagcaaaaagcggcgtattatcggctcgattgccgcgggaagtcttgtaggttttatatgcggatttgtgggtgccggcggcggaatgatgatgttgcttattctgacctcggtgctggggtatgagctcaaaacggcggtgggaacaagcgtctttataatgacattcacggccctcaccggtgctgtttcccatttttccttcggggatatgccgaatttgaccgtcatggcgctgtgcgttgtgttcactcttgttttcgctcgggtggcggcgctttttgcaaacaaggcaaagcccgaaaccctaaaccgcgcaaccggagccgtgctcgtcattctcggagccgcgatacttgtattcaatcttatcaaataacggccgcgccgtaaaggttttcggctatctaaaaaagctccctcgggagctttttgtttatttgcttcccttctttttgaaggtgaagcgcttgattttgaggggcttttcctcgcccttgaaaatccgcttgatgttttcggcgtgttttatgatcgtgagcgccgaaaagcaggcggccgacagcaccacaaaggcgtcaagagggatgaagaaggggcggtattgagccgaaaaggccgtggccgttatggcgtcgtaggcgggggagtatgtaaacatgaaatacatcacaaagggatagcttatcgccgacaccaccgacgaaaccgatataatgcggaaaagaaggtagaatgtgacgaatatgccgagcacaatgagaaaaacgcgccagtcgagtatggccatggcaccggcaatggtggaaattcccttgccgcctttgaatttgaaataaacgggataaaggtgtccgagaatacagaaaaatccgcatatgttggcggcgtagacgggcagcaccgccgaagcataggcaaacccttcggccgacatcatttcgggaagcttgggataaaccgccatgagaaaatcaaacataaaatattttccgagacaggtggcaagcactgccttccccacgtcgaaaagcagggttatggcgccgggaagaaaccccacaatgcgcatgacattggtcattcccgcatttccgctgcccgagcggcgaatgtctctgccggtgaaaattttggttacgattatggcaaaatttatgctgccgagaaggtaactgacaaggccgaaaagaccgagaaccagaagcacggtaaccttataagacatttgaactatcccctaaattttattctccgcgctcgcgaatgaccattctgacgggcgttccctcaaggccgaaggtcgagcggatttgattttccaaataacgctgatatgaaaaatggaaaagctccttgttgttgcaaaaacaaacgaatgtgggcggctttgtggaggcttgagtcatatagtaaattttaagccgtttgcccttgtcggtggggggctgaacccgcgcggtcgcatcggccaaaaggtcgttgagcataccggtggatatgcgcatattgttttggtcgtttacaaatttgataagctcgaaaagccgttcgacgcgggaacctgttttggccgaaataaatattatgggagcgtaggacatgaaggcaagctcgttcatgagctcgcttctcattttgtccatggttttgtcgtccttttccacggcgtcccatttgttgaccgccacaatgcaggcttttccggcgttgtgagccatgccggctactttggcgtcctgctcggtgaagccgtcgacgccgtcaatcatgatgacgcacacgtcggctcggtcaatcgccatttcggcgcggatgatgctgtatcgctcgatgtcgtccccggcctttgaaacgcgggattttcttcgaagtcccgccgtgtcgatgaaaaggaaatttccgaaggagttttcgattttggagtcgacggcgtctcttgtcgtgccggcaatgtcggaaacgatggaacgctgctctcccgcaatgcggtttataaggctggatttgccggcgttgggctttccgatgaccgccaccttcacggtgtcgtcgtcatcgtcttcctcttcaaagggcgggagcgccttgcaaacctcgtcgagaagatctcccgttccgtgaccgtgaacggccgaaacggcaatggggtctccgagacccaaattataaaattcataaaattccgcgggaacctcgcccactccgtcgcacttgttgacgcaaagcacaatgggctttccgcttttgtggagcatggcggcaacctcgctgtcggcggcggtgacgccgtcgggcatggatgtgacaaggcagatgacgtcgcaaagctcaatggcaagctcggcctgcgctcttatttgggagggaatgatttcctgtgaatagggctctattcctccggtgtccacaagcatgaatttctgaccgcaccactcgcagggagcgtatatgcggtcgcgcgtgacgccggggcggtcgtcgacaatggacagcctcgagcctataagcttgttgaacagggtggatttgccgacattgggtcggccgaccaccgccactaatggtttagacatttttatacctcttacatagtttcgggagcgtcgattttgagcagctccagcacgtttttaagaaccgttttcgtgcatatgcaaagattgagacgggcaaacataagctcctcatcgtcgcagcgcacgcggcaggaattataaaatttatggaacagcgtggcaagctccacggcgtatcttgtgatttttgacgggtcgagagcgacggcggcgtcgatgatttcgccggtcagcgccgcaaggtggcgtataagctcggtctcctcggaagcggtgagcagcccgaagtcacagctttcaaaatctctcggagaaatgccctcggccgcaaggtttttgagaatactgcaaatccttgcgtgagcatactgaacatagtaaacggggttttcgctcgactgctcaaccgcaaggtcaaggtcgaattcacaatgggtgttgggctcgcggagattgaagaaaaatctggccgcgtcgattggaacctcgtcgagaagagtgacaagggttatggccttgccgctgcgttttgacagcttgacgatctctccgcctctgacaaggcgaaccatttgcataagcacgaccttaaggcggtcgggatccaccgacagagccgaaagagcggccttaagcctcggaacatatccgtggtggtcggcgccgagcacgtcgattgccgtgtcaaatccgcgggtgacaagcttgttatagtgatatgcaatgtcgggaacaacataggtgggcacgccgtttgaacgcacaagcacaaaatccttgtcggcgccgaactgctcggccttgaaccaaattgccccgtctttttcataggtgtgtcccttttcggtgagaatgtcgacgatttttttaacgtcgccgctcttgtgaagggtactttccctgaaccaaacgtcatattttatgcggtatttttcaaggtccttttcaagcccctcgatgttaaggggaagggcatagtccacaagagcctttctgcgggtctcgctgtcggtatcgacaaatttgtcgccgtaaagctcggcaaatgcctttgcgtggcttttt

SEQ ID NO: 3810 - DNA, 6775 bp, Unknown
  16S sequences of unknown bacteria
attgaatttcaccgtcttggcacctttgatttcggcgcgggcggagtgtcggtggcaatcggcgagcttgccgacggactgctcatcgaccttaacgctttgcccaaaaaatatgagggtctggacggaaccgagcttgccataagcgaatcccaggagcgcatggccgtggttatcgagccggaaaacaaggaggaatttctccgtcttgccgccgccgaaaatctcaaggcctgtcccgtcgccgtggtgaccgaagatccgagacttgttatgaaatggaacggcaaggagatagtcaacgtcagccgcgaatttttgaattccaacggcgccgaaaagcacgttgacattaccgccgcaaagcccgaaagctttgaaaagaaaataagcggcgaatttgccgataatataaaggccatggcgggcgaccttaacatctgttcaaaaagaggtctttccgagcgctttgactccaccatcggtgcgggaacggtgctcatgcccttcggcggaaaaaatcagctcacccccgttcaggccatggttcagaaaatttcggtggagaaaaagcacacaaacgactgctctctcatggccttcggatataatccttttataaccgaaaaaagcccctatcacggcgcctatcttgccgttgtcgaatcggtttgcaagcttgtggcgtcgggtgcttcctttgaggacgtttatctgaccttccaggagtatttcgaacgcccgaacggcgaaaaaagctggggcaagccgctgtcggctctgctcggcgcgctgaaggctcagacagagcttggcattgccgcaataggcggaaaggattccatgagcggaacctttgaaaatattcatgttccgcccactctcgtttcctttgccgtgacgaccgataaatgcgataatattatttcgaacgattttaaagctgcgggtcacaaggtgtttttgctcagccccgaatatgacgaaaacggtctgccgaaggccgagtcgctgaagaagcttttcgcaagggtcacaaagcttataagagataaaaaggccttttcggtttacacccccggtatgggcggtgttgccgaggcggtcatgaaagcggctttcggaaacggtttcggatttaattttgacaaaggtcttgaaatggatgatattttcggttataattacgcaacctttgttgtcgagacggccgaagatcttgaaaacgcacttctgctcggtgaaattacggcagataaaaagtttgcctatcgagacgaagaggtaagctttgacaagcttcttgacatatacgagcaaaagctcgagtcggtttattcctgcaacatagctcagcagggaaccgacgtcagaaacatttcctttaatgccgaaaagcgggtctccccggcaataaaaaccgcaaagcccaaggttctcattcccgccttccccggcacaaactgtgaattcgacagcgcaaaggccgtttccgacgcaggcggagaagccgagatatttgtcataaacaacctgtctcccgagggagttcagcacagcgtcgaggcctttgccgataaaatatccgacgctcagatgatattcattcccggcggtttttcgggcggcgacgagcccgacggcagcggtaaattcataaccgcctttttccgcaatgccgaaattaaggagcgtgtagccgagcttctcgaccgccgcgacggacttatgtgcggaatttgcaacggattccaggctcttataaagcttggtctcgtacccttcggaaaaattatcgataccgatgagcattgcccgacgctgacctttaataccattgcccgacatcagtcgagaattgtgcgcacaagaattgcgtcaaatatgtcgccttggctttcttcggcaaaggtgggcgacatttacagcgtgcccatttcccacggcgagggcagatttattgccgagcccgagcttataaagcagcttgagaaaaacggccagattgccacacaatatgtcgatcttgacggaaacgccacggcggacatacattttaatcccaacaattcggtgtgcgccgttgagggaataacctctcccgacggcagagtgttcggaaaaatgggccacagcgagcgtgtcggtttcggactttacaaaaacgttcccggcgattataatataggtatgtttgaaaacgccgtgaaatatttcaagggttaaggagtagaatatgatgaccgatattgaaattgcacagggctgtcatatgcgcccgataaccgaaattgccgcggctgcgggaattgacgaaaaatatatcgaacagtacggccgttataaggccaaaatcgatttgtcgatcatggacgaggtcaaaagggacaacggaaagcttgtccttgtcaccgccataacgcccaccccggcaggagagggaaaaacgaccaccacgataggtcttgccgacggacttaaaagaatcggcaaaaatgtcacggttgctctgcgcgagccgtcgctcgggccggttttcggcgtgaagggcggagcggcaggcggcggatatgcccaggtcgttcccatggaggacataaatcttcattttacgggagattttcacgcaataggtgccgccaacaatcttcttgccgcaatgcttgacaatcacattcagcagggcaacgctctcggaatcgatgtgagaaagataacatggaaacgctgcgtcgacatgaacgaccgccagcttcgttttatcgtcgacggcatgggcggaaaggcaaacggcgtcccgagagaggacggttttgacatcaccgtcgcaagcgagattatggccgtgctgtgcctttcaagctctgtctccgatttgaaggagcggctttcgaaaattattgtgggctatacctttgacgacaagccggtgacggccggtcagctcaaggctcagggcgccatgaccgcccttttaaaggacgccttaaagcccaatcttgttcagacgcttgagggaaccccggcctttgttcacggtggccccttcgcaaacattgcccatggctgcaattcggtcacggccaccaagcttgcccttaaaatgggcgactacaccgttaccgaggcgggattcggagccgatctcggggccgaaaaattccttgacataaagtgccgcatggcggggctcactcccgatgcggtcgttgtcgtggccaccgtccgcgcccttaaaatgcacggcgggcttgcgaaaaccgaacttgcaaatgaggacatttcggctctcgaaaagggaataccgaatcttcttcgccatgttaaaaacatcaaagaggtttataagttgccctgcgtcgttgcggtcaaccgtttccccaccgacaccgacagggaaattgatttcataataaacaaatgccgcgagctttcggtaaacacggtgctttccaccgtttgggccgaaggcggaaagggcggagaggcgcttgccaaagaggtcgtccgcctttgcgaggaggaaaagggcgatttcacctttgcctatgagtcggaggcttcgataaaggaaaaaatcgaggccgttgcgaccaaggtttacggcggcgacggggtgatattcactcctgcggcgtcaaagcaaatcgaaagcctcgaggaactcggcttttcaagctgcccggtgtgcattgccaagactcagtacagtttttccgacgatccgacgaaactcggagcgcccgagcatttcaaaataacggtcaaaaacgtgaagatttctgcaggagcgggttttattgtcgtgctgacaggcgacattctcaccatgccgggtcttcccaaaagccccgctgccgagcgcattgacgttgacgaaaacggcaaaatcacgggactgttctgataactttgcaaacccgtcgggaaaccgtcgggtttgcggtatattttgcggccgaaaggtcactttaaaaacggaggtaaaaaattatggcttattatttcaaggacgtttctcacacctttaacgagtatttgctcgttccgggatattcttcatccgattgtattcccgacaatgtgtcgcttaaaactcctcttgtcaaattcaaaaagggggagcaaccgtctatttccatgaacattccgcttacctccgctattatgcagtcggtttcgggcgaaaagcttgccgttgctcttgccaaggagggcggcgtttccttcattttcggttcccagtcggtggaggacgaggcggccatggtaaagagcgccaaaaacttcaaggccggctttgttgtcagcgacagcaacatctctcccgacgcgactcttgacgacattataaagcttaaagagaaaaacggacattccaccattgccgtcacaagcgacggaacggctcagggcaaactgctcggcattgtcacctcccgtgactaccgcgtcagccgcatgagcggggacgagaaggtttcctccttcatgactcctcttgaaaagcttgtggtcggaagcgccgacaccactcttaaggaagccaacgacataatttgggacaacaagctcaattctcttcccattgtggacgaggacggctctcttaaatattttgttttccgcaaggattatgacgctcataaggacaatcccaacgagcttttggacgagcacaagagatatattgtgggcgcaggtatcaacacccgcgactatgccgagagagttcccgcccttgtggaggcgggagccgacgtgctttgtatcgactcctccgagggcttttccgagtggcagtcgagaactatcgactggataagagaacattacggagacggcgttaaggtaggcgccggaaatgtggttgacaaggagggcttcctgttcctcgcaaaggcaggcgccgactttatcaaggtcggtatcggcggcggttccatttgcataacgagagaaaccaagggtatcggccgcggacaggccaccgcccttatcgatgtttgtaaggctcgcgacgaatatttcgaggagaccggaatttatattcccgtttgctccgacggcggtatcgttcacgaccaccacatgacccttgcccttgcaatgggcgccgatttcctcatgcttggcagatattttgcccgctttgacgaaagccccacaaacaaaatttccataaacggaaattattataaggaatattggggagaaggctccaacagagcccgcaactggcagagatacgatttgggcggcgacaaaaagctgtcctttgaggagggcgtggattcctatgttccctatgcgggaactcttaaggacaatgtgggcctttcgctgagaaaggtcaagtccaccatgtgcaactgcggcgcgctgaccatccccgagcttcagcaaaaggccaagctcacccttgtgtcggccacaagcattgtggaaggcggcgctcacgacgttatccaaaaggaaacctcggtcagcggacttaataaataaagattgctgaaataaaaaaatcagacggttcggtgtctttccgagccgtctgttctttttgttataaacacgttggtttcaatcgaacggttatttaaatgacataattgtcgacggggccgtctttcataaggtcggcaacggtaatgccgtcgaaaaatttgttggtcatttcataaaattccttccacatggaaatggtgcggcattcctcggcaatctcacagggtggagcgcccttttcaagacaggataccggggcaagatcgccttcggcaagacggagaatttccccgaccgtgagaaactcaggctctctcttgagcttatacccgccgcctttgccgtgaattccttccacaaggccgcttttggtcaaaagaggcataagcttttcgatatatttaagagaaattttttgccgcgcggccacctccttcatggggatatatccgccgtttctgtgttcggcaaggtcgataataacccgaagggaatatcttccttttgtggaaattttcatttttttcagtcctttaactgtgcgtttatctgctcggcaaatctgaccgtttccatggcgtccttggcatatttgtcggctccgatacgttcggcgtattcgggattcataaccgctccgcccacgacgattttacattcgggaacggcggcgcgaagttttataatggtgtcctccatggcggggacggttgtggtcataagtgcgctgagcccgcaaagaggcgcgcccgtttttttgaccgtatccacgattttttcggggtcgacgtcctttccgaggtcgatcacgtcaaaatcatagttttcaagcagggtttttacaatatttttgccgatgtcgtgaatatcgcccttgaccgttgcaatgacgaatttggccttcttttccttttttacttcggaattcgccattacggttttgatgacctcaaaggcggccttggcggcgtcggcgctcatgagcagctggggaagataaagctttttttgctcgaatttttcgccgacgatgttaagcccggggatgatgtgatcgtttatgactgtcatggcatcctctttttcaagaagcgctttacagctttcggcggcgcgttccttaagccctctcaccacggcgtcggaaagcgaaccgtcgcctccgacggcgctgtcggatgctgtttttatgaccgacgactcctcgagattttcggcaaaggagatgtattcggtgcagttcttatcaaatcccttgagcagcaaa

SEQ ID NO: 3811 - DNA, 4062 bp, Unknown
  16S sequences of unknown bacteria
gtgttcaatgcctgcatcgcttcgctcaggttgagcaatgcggtgacgacttcggtcgcagtcggcgcttccttatccaggatggcctgtgcagctttgattgccgcctgcagagcagcatcgtcagaaccaagcgcatttgccttctcgaccatattgctcagtgcctgcaatgcgacatcacttgccggatttccaggttcactcggctcctcataaactttatgtacatagaactcagctgcggatgcaaacattcttccagaatcactcatgccctcagttgcgacaaagcgcagataacgtgcttctaccgcatcaaaacgagcagtcttcagagaagagtttccagcccatgtaccattctcgaccagcgcagtccattcatcatccgcattcagcttataatacagcgaatattcggtgatgatgccgttggtgccgctctgtcttggcagataatcaaacttgtcgatctcatatactgcgttcatgtcgatctccaccgttgccggaagctcctgatatggcgtgtagttcgaatgccagaacgtgctcgtattgccgtcgaatgccagttctaccggtccttcgcttcctgccagcgggttctcgttgtcagaagttaccgtgaaggtagaagaatccaggatcgtcggatcttcatatgcgccctcgctcacgaccacattatcgatcgtcgcgtcgatcgcgttcgtctttgaaccgatccgctgcagcggcaatacgaaggtagcgatagtgatatcatccacacgcacttcgccatccgtctgacggttgcgatacgtgccgactgcggcataagtctcgccgtccacgatcagcgtcgtctttgtgccatcagtggaaataataatatgcgtcgtctctcctaccgggatcgtgtaatcaaagtagtagtcatacagctcacgggtgaagccaagacgtccgtcatccatgatgcggatgctgtgggcatagtcctcattgccttctgtgtctgcctcaaacaagatgctgcctgcttctggttcttcatccagcgtgatgtcgaattccagcgtattgccagtacccagtttcgtgatcggcgtctccacatagctttcgccgccattgagctgcagctcaccattttcgatcgtcacatttgtctcattgctcagatcgcggtcatttgcggaagaatcttccagctcgcttccagcactgaattcatattccatatattcaccgtcttcggcagtttcttcatgatatggattgttgttcggtgcttcgcccaaagcatctgccgctgcttccatttctgcataggtcagattatctgcttcgccccagttcttgctggcaagcgtcgggatagcatccgcgaaacgatcatatacgtccaattccgagataccattggcacgagtgtcgatagagtcattccagatggcaaacgtacttcccagcatctgatcagatccggctggaatggtcgttgatcccatcgtattcggcttccaattgttatacagattctgcgtattcagataatcaaaataatatcccgcagccggcaccatataaagcatgccatctactgtattgatcaattcataacctgcgttatacatatctgtaggattagcccagccagtgttccaaacattcagctgaacgccttcactggcaacttctgcttctccaggcatctgagaaaggcttccccacatacgaacggtccttcccttgccctgcacataattgatcaggtcattagagaagacacggaagcgattcttgtcgccatagtattcatcagtaccgatatgtacggtcatgctctcatcgaacatgtcatcagtcagatattcattccataaagcttctacgaaagccaggctttcaccatacttttccggagccaggttgaactgctcaccagcgcggttagcattgccagttacgacatgatcgagcatgagatccggacgaaccttggtaaatgcgcccgagtgacctggcgtatcgaactcaggaacgatattcacgcccatagcacggctgtcaaggataaagtctctgaattccgctttcgtgtaatacatatctttattggtcagatcggctttgttcaatccgccgtttccgccttccttgatatccgattccagacggaatccagtgtaagccagatcgcgtgcttcttccgcgttttcatagtcttcatagaagatcaggttatcattcagatgaacggcaaaatcattcatcttataatatgccatttccttaacgacagactgcagtgtttccatagaagcaggcttacgcgctacgtcaagcataaagccacgtacttcaaatttaggatagtcacgcgtaattcctttcggcatcgtgccgtcattttgtttgaggatctgcagaatagagcgggtcgaccaatatgcacctgtagcctgctcagccttgaccgtcacataatcgccgatctccatgagatacccctcttcatccagcatgctctctgcatccgcgacaaaatagaaatctcctgcctgcggcgtaccgtctttgacgatttccatcgtcatgccgctctcatcagcataatccgcctgcagtgcctctgctgcggctgttgcgatgtcagatgcgtttgcatcgatcacgatacgtgaagcttctgttggcgcgaaagtaccgctggtgccatgccattccgcaagttcaggaatgacgatcggcttcgcattctcaccctcatcagcatattgaccactgacttcaagcgtaaattcatcagattccgcatgagtgccatcagctttggtgaccttgtagacacctttgatcgttttgcctgtcaacggcttatagatgtttccatcacgatcaatgacctgctcataatctgcgaggaactccacagtaaaattctccggcacttccggcatcgtcagcgcggtgccatcttcattgatcacaggagcatcgagcatcgatgcgacttcttccgcgctggccccctcagagatctgtgccggttccatcgcgtaactttcaaattcagcaacagaaacattaggccagttgatatcaccgccattataaccgtctacgacaagacggatctgctttgcccatacacctttttccaaggtgatcagctcattggtcttagtgatcggcgtatcggtactgtacaccgtcgtgaagttatcactgtcatcagccgcgacatcgatatgatagctttcaatgttcaaacgttcccagatgatacggaaatactggacccactgtgatgcaggaagcgttactgtcagcgtacgctccgcaatcgctgaagatgaattcgttgcccatcttgtcagcttattgccatcaatggccatctctgccctctgtgtatctcccgtggtcggttcataatcgctggcagtggccgtgccctctaagctatagttttcatctggcagcacagtgctggggatctcgttctcatagatctggaaatcataaacagagacagaacgccagttattatccccaccgttatagccatcgatataaagacgcacataacgagcagtgactgcttcttctaaatggatattttcgttaattcccgaaataccttcatctccggcctttgtgtataccgtttcccagctgtcatctgctccggaatctgatacctgaatttcataaccagtgatgttcgtacgttcccatgccagaacaaatgactggaaagtctgcgcttcaccaaggtctacctttaaccacatcgcctttccgtcagaatgggtattggttgcccagcgagactgctgcttcttatcagacacatcacgattgacgatgccgtcaactgcctttgcggctgtataataatccgtttcattttcactggatgttgccaccttattcaacgccaggtttactggcgcttccaccgcaaaaagcggctgcgcctgaactggcaacatgctcagcgccattcctcctgccaataataacttcatcgtttttttaagcatagattacttcctttccgat

SEQ ID NO: 3812 - DNA, 15038 bp, Unknown
  16S sequences of unknown bacteria
atataatataacaaatattgcgttttttcgcctttttgcgcggcaaaaaagagagggctgtggaagaaatcaggcggcggaacgtttgacagttggagggattggaaagcatgtcggatcagatgcagaagagggacagtcagctgatttttggcagaaatgccgtgctggaagcaatcaaggcaggagctgccattgataagctttatgtggcaccggtggaacagaaagggagtattgggaaaattatttccctggcaaaatcagcgggcgttccggtcaaggatgtgacaggacagaaactggacgctatgaccggcaatcaggcacatcagggtgttgcggcgacgattgcggcggcagcttacgcgacaatggatcaagtttgggagatggtccgcaagaaaggagaaaagctttttctgatccttgcagacgaaatagaagatccgcataatcttggcgcactgatccggacggcagaatgctgcggcgcgcatggaattgttgttcccaaacgacgtagtgcggggttatcccccacagtgtataaaagttctgcaggagcagtgagccatattccagtggtgagggtggcaaacttagtgtctttcattgaagaatggaaagcgaaaggcgtgtggttttactgtgccgatatggatggccagacttggtgccagacagatttcagcgggcatacagctctggtggtcggctcagagggcaatggagttggccgtttggtcaaggagaagtgcgactttaccgtttctttgccgatgctgggcaaaatcagttcattaaacgcttcagtggctggcggtgtgctgatgtatgaaatagcaagacaacgtcttgccatccaagcgagatagaaaggaggagctgatatgcccaattcttatgatgtagatgatattttggaagaaataaagcgaaaaaaaagcgcgaaagcaatgccggaacagaatacacagcgccccaggccgacagcttgggaccgtgttgagccctctgcatcggtaaacgcgcctgcagcagaacagctccagcaggcatcctctctggagggattggcagatttttttggcagcaacgcaaagtttgatatcggtacgcaggataagaaatctcatcatcgtgccgatccgtcccggcgggagcaagtacaaacaccgaaaacaaaagaaatggcggaggagtctgcttggcaggagtcggagctttttcgtacggagcaaccgaaagatatacaggacatgcccgatccccggcgggaaattcattttgatttggaacaatggcagcaggaggaggaaactccccggcagccaatcttggaaaaaacccagttgaacatacctctttccgctgttcgggagctggaagaggatgagatggaaaatttggaaaaaacccagagtatccccacggctaagccggcagatcattttgattttgaaagcctgcagcgtacgttgcatgaacaggagaaggatctggaaccggagcctttttccggcgaagaaacagaagatgatgaagaggatattgaagatttccgtacaccggcggatattgcgccaattcgtcacgacctgcagtcttctctgttttcgctcaatgttcgcattgcagtggtagcagtattgtttattggcacattgtatcttgcattggcccagacagcaggacttccgttgcctgcttttatggatatggaaacacaaccccgcatttatatgattgtaaatctggcccttgtgattatttcggcgctggtgtgcaacaccacagtgggtggtggacttgcgtcccttttgaccatgcatgctgacggggattctttggcagcattggcggtgatatccacaattgtgcaaggagtagcagtggcggcgtttcctcaaaaactgcaggagcagacactgggactattctttgtagcggctgttttcgggcttctttgtaatgtgtgggggaaaaagacaatcgtctcccgaattgaagggaattttaggattgtttcctctgagatgccgaaaaaagcggtattatatttgaaaaataaggaactggcccgagaattaagccgggggatggatttgaatccgcctaacttggcatatgccagcaaaacaggatttcttacccgctttttggaacagtcttatgagccggacaacagcgaaggattgttccgggtgatagcgccaatggtggcgttatgcagtttggtagttggtggagccagctattatctgactcgagatattttcacagcactgactgctttcagcgctgtgacctgtattgcttcaccggtaacagcaacgctttatgccaattatccgctgctgcgtgcacagaagtctcttgcgaaagaaggggcgcagctgaccggctttgaagcggtagatacttttagtatgatcaatggcgtaacggtagatgccagtgaattgttccccagcgataatgtactgctgcacaatatcaaaatgtttgagaagcgccggattgatgaggcgattttagatgcgtccagtgccttgtgctcttttgatggtaccattaaaaatgtttttatgaagatcatacaagggaaaatggagatcttgaaaaaggttgaaaatttagtgtatgaagaagggatgggactgtctgcctgggtggatggcaaacgggtactgattggcaacagcgcattaatgcgccatcacgaaatctatactccttccgccgattacgaggcaaaataccgtgtaggcggacgggaattgatctacctttctaattcgggtgaattaaccgccatgtttgttgtcagctatcagccggatcctcaaattgcacaggaattgtatgagctggaacgcaaggggattggattgattgttcggtctacggatcccaacctgacagctgaaaaaatcgcccagatttatgatttaccggttgagatggtgcatgtcattccggcaaaattacacagtgattttgatattatgactgcccggaaagatacggcaccatcaggtttatcttttgctgacggcgcagcgtccttgttccatggcgtggctgctgcgatttcggtgaaaagcgcgattgctttggggacggtgcttcagatcgtaggaattttgctgggatatggcattatgacagtttttacgttgctgggcgcaatgcagaatgcgaacggactggcagtggtggcttttcagcttttatggggagccggtacgatgctgttttccaatctgcggaaaatataatccgtaattcaatgaataaagcacccgaggttctccgggtgctttattcattgtgggaagaacatttctgtttcggctgtattatgtttccaaagaagattagaaaacggataaaaatgattgggaaaagagttgactttttcaggatatctttatatgatgactatggaattaatatgaattagttataatttatatagttcctatatttaaaaaatatggatagaagggtttttgcaatgagagaactactggatttgttctggacctttgcccgaattggagggctgacttttgggggaggctatgctatgttgccgattttacagcgggaggtggtggaaaaacgccaatgggtaagcgatgaggaactgatggattactatgcgattgggcagtgtacccctggcataatcgccgtgaatacggcaacctttgtggggcagaaaaccagggggataataggcggtattatagcgacattaggagtggtttttccatctttggtgatcattacagtcattgccgcttttatccagaattttgcggatttggaaattgtaaaaaacgcttttgcagggattcgcatctgtgtttgcgttctgattctcaacgcagtaatcaagttgctgaaaagctcagtggttgataaagcgacattggttatctatgctgcggtagccgtagggtcgattttaaccagtgtttcacctatcatttttgtactgctggccggtattgctggtgttttgctgcaaaactggaagggaggcgctacgaaatgacctatttgcgcttgttttatgagttttttaaagcggggctgttttcgattggtggagggttggccacacttccttttttgtataacatttcggatacaacaggatggtttacccatggacagctggcagatatggtggctatttctgaatcaacgccggggccaattggtgttaatatggctacctatgtggggtttgccacaggtggaattcccggcgcagtaattgcaacgattggattgattacgccatctattattgtcattttagtgattgccggatttttaaaggcttttcgggataacaagtatgtaaaaggggcgttttatgggctgcgcccagcttcaactggactaatcactgcggccggcttctcggtggtgatgatttctctggtacggcttgatgcattccgtgccagcggttctattttggatttgtttaattggagaggacttttgttagcagcagttattttcctattgacccgtgtatttaaaaagctgcatccagcggtatttatcggtgcatccgcggtggcaggaatcttatttggatttgcaggggtttcgatatgaatatcaaacagctgcaatatttcgttactattgtggaaaatggcacgattactgctgctgccaaaaagctggggatttcccagcctccgttgagtgcgcaaatgaaactgttagaggaggagctgggcgttacgctgatggagcgcggtgccaggcaggttcgtctgactgacgcggggcggattctgtaccggcgggcggtttccattgtggaattgactgacactactttaaaagagttgaccgattttagaagcgggatatccggcgtactgcggttgggcactgtatcttcctgcggaatcggattgctaaaaagtaaaatggctgcatttcgggacaaatttccggatgtgtgctttgaaatttgtgaagggaacactctggatctggctgaccagattcgaagcggtgtgatcgatctggcgattgtgcgggcgccgttccgctcagaagagttttcctgtgtttttttggaagaggaaccgatggtggcggtgggcgatgaaagttatttttccaagatgccgtgggattctgctacgttggcagatttggaaggcttgccgctgatttgctatcggaggtgggaatcactcattcgggcaacttttgaggaggagggaatcgttccttacatttattgtttgaatgatgacgccaggacttctttgatgtgggcatcggcaggattgggtgttgcaattgttccccgttctatctgttcggtcatcacacgaaaaggaattgcttataaaagactcagggaaaagggaatgtatacacggatggcggcaattcgcaaaaagggtggatactgtcctccgttgatgcaagagtttttgaatatttttgcacaacaggagtaaaagtgtatggatctatttctctaagtaaaatggaccgggtttatattattttggcgggctgccatggcgacagtaactgcatttacagcattttcaaattgtcagattttattttcacaatacttcacaaatctactaaaaaattggcagcttgcgttacgcaagctgccaatttgtgttctgaccaagattcataaaaacgttcatggaagggcatgctttttccccggactgtgtggctcgaaaaacatcataaaaaatacaatgcagagaagaaaacagcataaaaggatggagcggattccccaaaaggaacaaaaccaagcacctgccgctgcaccaactagaaagaaaaggataatgccatagcaagaaagactctgacgcagcaaaaagaggtctcgggtgtggagaaaatgaatcagcaattcagtaccactacgcagatttccggtacacatggtggtagcaagatgattgccattgatttttcggaagccttgcacctggatagaacaaaccagtgcaaccaaaacattggctgccatatcccaatttccggcaggaagaaaagcaaccgaagccagtgtaatgatttccaacagaatgatgatttgtctccagtggagccggcggcctttttggaagcagcggcatgtgacttcggctataaggacgccggcgatgaaagccagaatcgggatgagataatattgtgctttctgaaattgtccaccggccagattcatcgccagaagaaccagattgccggtctgcgcattggcaaagacacgccctcgagttaagtaggtatatgcgtctaaaaaaccaccaattaccgccagcaaagcacccaaacaaaaagtttcggacatttgttttccttttttatcgttcatggaattttatcacctaatatacattgtatgatttcgtttttcagggaagagtatagcacagacggccaatggtgtaaagaataatagctctttttgataaaatcggtagagtgacacgccataaaatgaaaaaagttcttttggtgaaaaatattctgatcaaaaaagcagcgcaaagagataattttcattatggattgggaatatgatttgaagataaaaaagaaaaatacactttgagcatagaaagatagaatttgaaaggttaaagatttttatattgcgtggaggatatatcgggaaactgtaataagcaaatcttgcagcagaatgatcggaacttttcatttccgccaaaaacctcccattaaaaaatgggaggtttttggagtagcagtgatttgccaaacaattttatcagcctttttctccaaaaagctgatttattcagcttgcggttccgggtctgcgtggacagctgttttagagcgccaatttcctttgaaataataaatactgatcaatacgcagttaacgatcattgcacttgccattgcaacaaaaagtcccatatagttatgcggaaccaccgcacagaaataggcaacaggaattcgtacaacaagtccgcacagagaagtaatcattggggcaatggaagcaccggccccgcgcatggcacctccgacaactgaaccaattcccataatagtataaatgaaagccaaaaatcgcaggccgttcatagccatttcaataacaggttcgttgctggtaaaggcccggagcaaataatgaccgaacagcaggaaaagcacgcccattacaagtccgatgccggtaaccattgctgttgcagcccggatgccttttttggtacgctcaagctttccagcccccatattctgtcccacaaaggtcgcaattgcgctgccaagacccatcatgggcataacggcgaacccgtccactttcatgataatgctgttagcagcgataaaatcagagccaaatccgttggtaaaggactgaacaaccatcatgcctgccgaataggccatttcctgaatgccggaaggcaggccaagacggagaatatgcatcaggctttcttttttgatccccagatgccggaactgaatccggacggcatacctgccgagatgaatgcgcaaaagcaccaatacagcggatgaacattgggagatcagagtggcccaggccacgccagccactcccatattcaggtagatgacaaataccaggtccagtacaacgttcattaccgaacagaagatcaaaaagatcaacggccaacgggaatctcccataccacgcaggatgccgctgcccatattatagatcatattgccgatcgtagcgaaaaaaatgatggacaagtaggtagtggaatcttctaagatattctccggcgtctgcatcaaggaaaggatactgcggctgagcagcgccccgagtacggtgatggcggcgccgagaatcagtgttaaagtaaaagaggtgttaactgcatcctgcaactgtttttgccgttttgcaccaaaacactgggcgatcagaatacctgcacccatggaaagaccgaaaaacagggcattgaagcacatcataaccgaaaaacagacaccgacagcagccaaggcatcagatcccacaaagtttccgacaacgaccgagtcggctacattgtaaagctgatttacaatattgcctgcaataagcggaagggcgaacagggtcagtttggatacgatgccgccttccgtgaggtctccttttcgaacgacggctctttttgattctgccattgaaaacttcttcctttcaattcaaatagactaacgtttcaattctatcaatatttaataaaatgtcaacaaaaaccgaagaagtttgtcatataggacaatgataccaaagttcgcaatggtctgcatggtaataaacacggcgagaaaaatagagaaaagccgcgaagtttcgcggcttttcataaaaatatgatgatttattttggaagcatgcggttaaaattatgtagggttctcctctgtttgcggctcgtcgaacttcgtttcaattcgttttccgcagaccggaggagagtaccgccaataggacagatgatcctcctgcacaaaataatgaaaaggttggaccggataagacgcgtcgaaagcatctaccaagattagctttaccttcattttttccggaatcaggcttttgataaaaacactggcatgctggccgggaaaaacatcgtctcgcggctcggccagacccgccagattaggggtcagttcaataaaaaccccatagctttctgaagaacggatgacgcctgctaccgtttctccgggagagaacagtgctgcattttcctcccagctgcccaacagctctttgtggcttaaagccacacgtccgctcggttctacctgacgcaccactgcccggattttttgtccgggagaaaaccggtctctcggatgagaaatgcgggaaaccgagatggcatcaatcggaataagggagggaatgccgcatcccacatcgacaaaagcgccgaaaggctccaaatgggtaacacgaactgggataatatcgccggggtgcagctttttgacgtagcgttccatacactcttcctgtacctgacggcgggaaagaatggcgattggttcaccgtttggcccgcgatcaaagcgcaggatgcgaaagcagaccactttgtttacccgggaaatcagggcgatatctttggtggagccgtcctgaattccgatggcgccttcctcttttggaatgatccctttcatgctgattaaatcgacgatcagattgtgcccggaatcgcatagggtaacgcgcccttcgaggacccgcccttcccgccagctctcttgcaaagatgcagtactttttaatgatgcagtgttttccacggtattccataaacagccttccggcagatatcgttccatttttatcctccattctgcccggcttgtgtaaggccgccgccgcgcattttttgtccgttggggacttctctgggaaatatatatgaaacgaaccgcctggatatgacggtttactggatagatgcgccggagcctcccaagctcagtagccggctgtggatctgactagcctgatcgtccggacaggataggcgaagcgtacagcccagtgcatgaggttccgccttattttcagagtgcagaatgacaaaaccatcaggtaccggctgggaaggaaaggtcatcaactgccctgccatagcgactggtggcgtttttgcttgatattcttttgcttccaaactttcttctttgatggcatatccgtgctgacgcagagaatgaactgcttgctcggcaagatcctggtcagcaaattcacagcttatttgcttcatttttactgctccttttcttttcaatcgatattatttttgccggttaaatgcaaataatcgatgaaaagaattggcatttgcacggaaaatctggtatactattttttacgtattagtaaagtgaggtgcccatgttggacgtccagattggcgatgtgctgacgatgaaaaaaaatcatccctgtggtgaaaatcgttttttggttttgcgggtcggaatggattttaagatccgttgtttgggatgcggccgtgaagtgatggtgccgcgcagcaaagtggaaaaaaacatccgaaaaattttccgcgcagaggaacatacctagtgcggtaatgctgtaccggtctggcagaaaaccaaaaggatcatcgaatggaacggaggatttttatgtttgaaaaattaaaagacgttgccgcacgctatgagcagatcaacgaaaaactgatggatccgacagtggtgagcgataataaccaatataaaactctgatgaaagagcacaaaaacttaacgccgatcgtagaaaaataccgggaatacgaaaaggccgaagcctctttggaagaagctaaagaattgctggaagaaggcggcttggataaggattttaaggaaattgtagaggaacaaatgactaccagccgcgatgagatagaacgattgggagaggaactgaagatccttcttttgccgaaggaccccaatgatgacaaaaacgttatcattgaaatcagaggaggtgccggcggcgatgaggcggcgttgttcgctaattctctgttccggatgtattccatgtacgcagagaccaaacgctggaaaacagagattttaagcgcaaacgaaacagaattgggtggatttaaagaggtgagcttttccattgagggagagggcgcctattccaagctgaaatttgaaagcggtgtgcatcgggtgcagagagtgccggaaacggagacgcaaggccgcattcatacctctactgtaacggtagcggtgttgccggaggcagaggaagtggaattggaaatcgcacccggtgatctgcagattgatacctaccgctccagcggcgccggcggtcagcacgttaacaagaccgaatccgccatccgcatcactcatctgcctactggtacagtggtagagtgccaggatgaacgcagccagcacaagaacaaagaaaaggctatgaaaattctgcgttcccggctgtatgagcggatgctggaagagcagaatgccaagattgcttcagagcggaaactgcaggtgggtaccggtgaccggtcggaacgtatccgtacctacaattatccccaggggcgtttgaccgatcaccgtattggactgacactgtatcggctggaagcgattttgaacggcgacttggatgaagtagtagacgctttgcgtgcctatgaccaggcagaaaagctcaaaagtcagggagaggaataaaaatggatacccaaattttaaaaatcgcttcgatttttgaaaatcccgatgagctgcagcaggcggcggatattctggctcgcggcggtttggtggcatttcccacggaaacggtttacgggctgggcgccaatgggctggacgaagaggcggtgcgctcaatttatcaggcgaaggggcgccccagcgacaatccgctgattctgcatatctgcgatacagaaatgctgcctcaactggccagggaaatcccaaaggcggcgctcaagctggcgctggaattttggccgggtccattgacgatggttcttccaaagaccgagcaggtgccggatgtggtttccggcggactggacacggtagcaattcgtttccccagcaatctgatcgcaagggaactgattcggcgcagcggtaagcctatcgcggcgccttccgccaatttatccggtagtccaagtcccacaacggcgcagcactgtattgatgatctgatgggtcgagtggacgcaatcgtagatggcggcagctgtggtgttgggctggaatccacggttatttccttggcaggagagattcccactgtgctgcgtcccgggggagtaacggttgagcaactgcggcgggtattgagcgaggtccgagtcgatccagcggtgacccatcccatggccgccgggcagaaagccgcgtcgccaggaatgaaatataaacattacgcacccaaagccaaggtcgttttggtaaatggcaatacagagtcgtttgcagaatatgtcaaccagagaaaaagcgacggtgtcttcgccttgtgtttttcagaggatcttcccgttttggaagtgccttcagtctgctacggcggcgaaaagcacgcggaagagcaggctcatgcgctgtttgatgcgctgcgccggctggatgataaaaaagcgcagttggtatttgctcactgtcccagccaggacggcgttggattggcggtatataatcggcttttgcgggcagcggcttttgatgtggtaaaactgtgacggcaaaggagttttcaacatgggatgtttggtggtagggctgacaggacaaaccggttccgggaaaagcacagtcagccggatactgacagactgcggcattccggtgattgactgcgaccgcctggcacgggaagcggtggagccgggcagtgaatgtcttttgcagttggtacaggcgttcggggctaaaattttgcagcaggacggaagcttggatcgagcaaaaatggcggcgattgcgtttccggatccggaaaaactggaaatgcttaacagcattacccataaagcgattttgcggctgttggaaaagcggctggaaatgctggtctctgctggtgaaacgctggtagtggtcgatgcgccgacattgtttgaaagcggcgcagatgagttttgcagtattgtgattagtgtgattgcgccggaatctttgcggtatgagagaattttggagcgggatcacctggaaccagagtcggcaaaaaggcgaatgggcgcgcagaaggatgataatttttacaccggacgctccgattatgtactggtcaatgatggttcggtaaaggttttagaagaaaggacccggcagctggtccggattttacaaaagaaagcaggtgaatgatggtcattcgaaaaggcggcgcgttgctgctggcggtgattttgttgattacaggcatctttggtgcggcaaaggcgatgcggtatttctatcaaaaggcatatccgctggggtatgagcagctggttctgtctgcctgcgaggagaacgaactggaaccgtcttttgtctttgccgtcatccgcaccgaaagcagctttcggccagatgcacaatccagtgttggtgcacggggattgatgcagattacggaggaaactttccaatggattcagtttcgcatgaaagatgaaagcggcgcaagttatgatgatctattcgacgaaaaaatcaatattcagtatggcacttttctgctgaaaacgctgctggatgagttcggaagtgaagccaatgctttgtgcgcctaccatgcaggatggggaaacgctaaaaagtggctgcagaacggggaatatgcaccggatggagaaaatatccagaatatcccgtttggagacaccagccggtatgtcgaaaaagtaatagagactcaaaatacctatgaaaagctctatgatttttctgttgaacaataaaaaattccacaaagaattttgtggaataaaaagatatataaactagaagttgtaaggaggatgcaaaatgtcaaacgagaacaaaacacaaggtcaactactggaggaacagcttttaatggctccgaaaaatggcggtgagagccttgctgcggaagaaatcgccaaagcggatgcattttgcgaagggtacaaagctttcttaaagcacgcaaaaacggagcgggaagcagtagcgcaggctattgaaatcctaaaagctcacggctatgtagaatttgatccggacaaaaaatacggaccaggagataaagtttatgccagtaatcgcggcaaagcgttgtgttttgcaaccattggcacccggtccatgaaagaaggcatccgtttagtcgcctctcatattgattccccccgggtggacttaaaacctaatccgttgtatgaagatgcggaaatcggttactttaaaacccattattatggagggatccgcaagtatcagtggacggcaattccgctgtctttgcatggcgtgattgtgaaaaaaggtggagaagctgttgcggtttcggtgggagaagaaccgggcgagccggtattctccatcacagacctgctgccccatttaagcaaggatcaggatgcccgcaaactgggtgacggggtgcgcggtgaggagcttaacattgtaattggttcccggccatttcgggatgacaaagcgagtcagaaggtcaaattggctatcgccaaacttttatttgacaaatacggcattgtggagagcgatttccaggcggctgacctgcaggcagtaccagcgtttgccccacgggatgtggggtttgaccgcagcatggtaggcgcttatggacaagatgataaagtttgtgcttatacttctttgatggcggcgattgaagctccagcaccggagtatacccatgtgacggtgatggcagataaggaagaagtcggctcacccggcgctaccggtatggggtctgattattttgtttattttatcagcgatctggcgaaaccgtacggaattgaaggaagaaccgttctgacccataccaaatgtctgtctgccgatgtgaactgtgcgtttgacccatctttccccgatgtggcagagcggcgcaatatcgcttatgtcaactatggaacagtattgaccaaatacactggatccagagggaagtccggctgcaacgaggcaaccgccgaatttatggggtttgtccgtgatttgtttgacagcgagggtgtgctttggcagactggagaaatcggcaaggtggatcagggcggcggcggtaccgttgccgtagaaattgccaaacacaatgcggacgtagtagacattggcgtgccggtgctttccatgcattctccgtttgaactggtttcaaaaattgatacttacatgacctaccgggcttttaaagcctttttgaa

SEQ ID NO: 3813 - DNA, 19013 bp, Unknown
  16S sequences of unknown bacteria
ccggtgtgcgctgccctggcgaagagctggagggtgtgctgggcggtatcgacttcctgcggggcgttgccatgggccaggcgccggagatcggcaagcgggtcgccattgtcggcggcggcaacacggccatggacgcctgccggacagcagtgcgcctgggcgcggagaaggtctatgtcatctaccggcggacggaagcggaaatgccggcggaagccatcgagatcgaagaggcccgggaagagggcgtcaccttcaaattcctgaccaaccccgctgagatcctcggtgagaacggcaaggtcaaggccgtcaagctccaggtcatggagctgggcgagccggatgcctccggccgccgtgcgccggtgccggtagaaggcaaatttgagatcctggatgtggacagcgtcatcgccgccatcggccagaaggtcaatcctgtgggcttcgaagccctggagtgcaacagccgcggcatcatcgccgccgacgaagcgacctaccgtaccagcgtcgagggtgtgttcggcatcggcgatgcgacgaacaagggtgcgtccatcgccattgccgccatcggcgaaggcgaccgttgcgccgaagtggtcgattcctatttgaatgggaaccttgtcggctattgcaagccgtatgtctcggagcgccaggtcagcgagaaggactttgctgaccgggagaagatcgcccggatccagatgccggtccgccccgccgaggagcggaagcatgacttcaaggaaatcaacctgggctttgccgaggatgcagcccgggcggaggcaaagcgctgcctggagtgcggctgctttgattacggcgaatgccgcctgatcaagtttgctaaccgagctcccatcgacccgcagcggctcatgggcaagaatcaccctgcctataccgagcagcgcctggcagtcatcgagcgcaaccagggcaagtgcatcctgtgcaaccagtgcgtccgggtctgcgatgagatcgtcggcaagggcctgctgggcctggtgggccgtggctttaatacggtcatcaagccggaattccagagcgaagagacgatcaagatctgtgcgtcctgccgcaagtgcgcagagaactgcccaaccggcgcactgaagatcctcgattaggagatcaaaaaccctgaaaaatgaattgtaaaaggcatggccgttccaaaacggccatgccttttcgtctgtataatctataaaagcggccataccgggcggagtaccggtatggccgtctatttttttgttgttttaccgccgtgccagcggcgtggagtgctcctgggccagcagcagctcagtcagaatgctgttggagacgagcatgcctttgggggtcaggtgccagcgggtgtcctcctgcttggcaaggcccatttccttgcatttttgcaggatctggtccagcgggcggaacggcagcaggaagctgcggacatattcttctgaatcaatgccctgcaccgtccgcagacgcagcatcaggtactccccggcccgctcgcggctggggatctcctcgcattcactcaggattgcgccgccggtcagaatgccgtcacagtaggcggcaagatcccgagcgatggtaaagcgcttgccggcgaaatccgaggcagctgaggggccgaagcccaggtattctccgccggtccaatatttcagattgtgccgggaggcgaagccaaggcgggcaaagttggagatctcatactggtggaaccccagctcatccagcttgtcgcaggtgtagaggtacatatccgcctgggtgtctccgtcggggatattgacgcagtccttatactcccagaggggcgtgcccggctcaaccttcaggccgtagcaggagacatggtccggctccaggtccatcacatggcagagcgtctgctgccactggggcagcgtctggttgggcaggccgtacatcaggtcgatggagagattttcaaaccctgcggcccgggcctgctccacagcgtggatggcctgggcgtaggtatgcgggcggcccagctttttgaggacctcgtcctcatcgttctggacgcccaggcttatgcggttaaaaccctcgttgtgcagcgcctgcagcagcgcgggggagacgctgtcgggattggcttcgaaggtgatctccgcgtccggcgaaatctcaaagcgccgctggagctcgttgaaaatgcggatcaatcctgctgcgccgaaaaagctgggggtgccgccgccaaaatagacggtatcggccacatacccggcggcccgggcgccagcttccttgaaatggctcgtcagcgcctgcagataccggtctgtcacggccttttcccggctgccgcccagggagtagaagtcgcagtactggcatttgctgcggcagaagggaatgtgaatataaatgcccaattcccgctggggcaggacttttttttcatatggcattttaaagttaaaggccatgcgttgttcttcctttcgcgatggatgtgggcttaatcgtccattttcagcacggccataaaggcctcgctggggacggagacggtgccaaagctgcgcatccgttttttgccctccttctgcttttccagcagcttcttcttccgggtaacgtcaccgccgtagcacttggccaggacgtccttgcggagggctttgatggtctctcgggcgatgatcttgccgcccacggcggcctgcaccgggatctcaaacatctggcgggggatgttctccttcagcttttcgcagatcttccgggcacgggcgtaggcgctgtcggcaaagaggatgaaggacagcgcgtcgataacatcgccgttgagcagaatatccagcttgaccagcttgctggtccggtagccgtagagctcatagtccagagagccatagccccgggtgcgggatttgagggagtcgaagaaatcgtagatgatctcgttgaggggcatgagatagtgcagctcaacgcggctctggtcaagataggtcatatcctggtactcaccccggcgctgctggcacagctccatgatattgccgacgtactccggcggtgtgatgatgctggccttgacaaacggctcctgcgcctcttgaatctccgccggatcggggtagttcagcggcgtgtagacctcgacggttgtgccgtcggtcttcgttacgcggtagacgacgttcggagctgtcgtgatcaggtcgaggttaaactcccgctccaggcgctccatgatgatctccatatggagcagccccaaaaagccgcagcggaagccaaagcccagggcgatggaattttcctgctcataggtcatggaagcgtcgttcagcttcagcttttccagcgcatcccgcaggtcgtcgtatttggagccgtcggcggggtagacgccggagaagaccatgggctggacggctttatagccgggcagcgcttcggccgccgggttttccaggcccgtgacggtatcgccgacccgggtgtcggagatcgtcttgatggaggccgtcagatagccgacctcaccggcaccgagctccggcgcggcgatcatgccccgggggctgagatagccgacctcgacgatcttatagactgcgccggtgcccatcatccgaacctccatgcccggccgcatcgtgccgttcatgacgcgcagatagacgacgacgccccggtaggagtcgtactggctgtcaaagatcagcgcctgcagcggcgcagccgggtcgccctggggggcggggacgccgtgcacgatcatttccagcacagcgtggatattgatcccatttttggcggagatttccggcgcgtccatggcggggatgccgatgatatcctccacctcctgcttgacctcctggggccgggcagcgggcaggtcaatcttgttgatgaccggcaggacctccaggtcgttgtcgatggccagatacgtgttggccagtgtctgggcctcgacgccctgggaggcgtccacgacaaggaccgcgccctcgcaggctgtcaggctccgggagacctcgtagttgaagtccacatggcccggcgtgtcgatcaggttcaggatataggtctcgccgtcgtcggcctggtactgcaggcggacggcgcgggctttgatcgtgatgccgcgctcccgctccaggtccatggagtccaggatctggtcctccatttcccgcttgtcaatggtattgcactcctccagcaggcggtccgctagggtggatttgccgtggtcaatatgggcaatgatcgaaaaatttctgatttttgcgcgatctgtcaagtggttcacctcataggcgcaaggcgcgccgaattcttgttttttccattataccgggatttccgccctttgtaaagcgcctgcgttacagatattgctgcgttgccacgtcaatcacgccccgggttgtcagccgcagctgcgggatgaccggcagggacatgaacgagagcgtcataaacgggtcgattccggtgttgacgccctggcggaaggcggcggccttcgcctgctccagccgcgcgttgacctggggcaggctgccctcactcatcagccctgcgatctccagcacgacctggccggtgatgcggcctccgtccgccacgacgatgccgccgccggatgcgacgacctggttggcggcaaaggccatatccgcctcgtttgcgccgacgacgatgatattatggctgtcgtgggagactgaggtcgccaccgcgccggatttcaggccgtagccctgcaaatagcccaggccgatgtgcccggtgcccttgtggcgttcgataacggcgattttcagaatatcctgcgcggggtcgatatggtcggcatagccgttgtctgtcgtgatgatctcgccggggaccatgccgagcatggcacgctggcgcggggttgcaaagtcgtccgccgtgaggggggcgacgcggaacgtgtggtgcgcctgggcgactaggtgcgggtcaatctgcgggggatcgaacggggcgacctgctggccgtcgaacatcaattttccctttttaaagaccttttccacctggaaatcctggaaattatccacgacgaccaggtctgccaggtagccgggggcgatggcgccccggttattgagcaggaagtagcgggccgcgtgatggcaggcagctttgacggcgatgatcgggtcgacgccgtagcggttgatggcctggcggatgatatcgtcgatatggcccttggaaaggagatcattggggtgccggtcgtcgcagcagaacatgcagcgctcatggtatttccagttgagcagcggcgccagcgcctcgagattccgggcggcagtgccctcgcggatcatgataaactggccccgctggagcttccgcagcgcgtcgtccaggtcggcgcactcgtggtcggagtagacaccggcggcgatataggtatccagctccttgccggtcaggcccggggcatggccgtcgatctttttatgatgtgcctgggcggcgacgatctttttgatgacctcctcatcgcctcggatgacgccgatgtaattcatcatctccgccaggccctggacgcggggatagtcatagaacatgtcgatggtccggtagtccagcgtggctccggcttcgtccatcggcgtggccgggacgcaggagggcagcatgaaccgcacatccaccggtaggccctctgttgcctggagcatatactcgataccgtctgtccccatgacgttggtgatctcatggggatctgtgacgacggtcgtcgtcccgtggggcaggacggctttgacaaattctgtcggggaaaccatgctgctctccaggtggatatgggcatccagaaacccggggcagacgatcttaccagtgaggtccaactcctgctccccggcatagtcgccgatgccgacgatcagcccattggcgcaggcgatatttgccgtgcatagttcgttggagaatacgttgacatacgtcgcgtttttcaggaccagatccgctttttcccgcccggaggctgcctcgataatccggcgcttgtttgcaagctttcgattgatcttgccgacgtagctttcctgctgtgccataaaaatgccgccctttcctttgtagtttgatggctcgattttaccatagcttcgtgaatttgtccaatcgaaaacgggaattttcttgttttgacgtaaaaataaccgagaaaggggttgacaatatagttagtatatgcagtacactgcagatagaagccaagcaaaacggaaaacggcgaatcagagcggcgcataaatgggaggcgctgccgaggctgccgtaccggtggggcagcaccccctggttccgctttggcctacaaaggcacggagactttggcggcgggtgagagcgcatgtcagacgcgcggatcatgtttgttcttcctggacatcgcactttttacgcaatgcgattggcagcttatgacaggcttgcttcctgtgttctcccaacctcctttggcggcgatgccgcctgcggcccggtttcccgctcacaccgggctgccgcaccggtccactggatgcccgaataggggcgggcgaccggtcaggctggtgcttctccgcatctgggcgcgttgcagactcgctgcagcgcgccctttttctattatgccatcaaggcaaaaagcgcccggcccagggcctgcgcgtgcagaacggcagggcttgggccggggcagcctgtgcggtcaagcgtctagaatggggatctgaatttccgtgatataattctcctgcgccgtttcaataaattggtcgacgatattgaaatgcagcgcatcgtcggacagtggcagctcgggatgggcgaggcggagctggcagccaaagtcgatggcatcgggatacgtgccctggaagtgggcgcagagcatctgcatggcgggcagcgtctcgacctgttccagatagcgcaccgggacggactgggatggctccagataagcgccgaaggaaatccggggttggcctgacggcgcatcctggacaaaggcaatggtcgggtaaaaatagaagatctcgttttggtatagcgttgcctcctcccccagggggatgtattttcgctccggcagcgtctggatcgaagcctgacccaacgtcatctgctcgagctgctgttcgacatattggagcttgcgctgcagaacctcatccatggccagcattttctggcattgctgctgtaggagcgccgactgctttttcagctcctggattgcactgctgcggttgtgcagatcgagatacttcttgacctgggcgatggaaaagcccagttttcgcagatagcagatgagagccagaccgtagacctggtcgaagcggtacatgcggtagttgttctccgggttgcgataggccggggagaaaattttctcccggtcgtagtattgcagcgtctgcttgttgagatggaacagcgcgctcatctgcccgacattcaggtattcccgcatggctcagtccccggctttctgaaaaactgggcactgggagcgcagggcactttcgtgagctctgtctgcctcaacagccagacggcgctcatcaatgccggtgagtttgacaccgtcaaagacgattttgccaccgatcatcgtcatggcgacattgccggtcaggccgacgcggccgatgagatttttggggtcgtgggtcgcgccgacaagctccagcgttgtcccgtcgatcataaacaggtctgcggctttgccgggggccagggagcccaagtcgctgcggcccagggtttttgcgccgcctgcggtggcaatttttagaatatcatacgcggtgactgcgccgccccgctccttgccgaagtagcactgcatataataggcggtgcggatggagtcgaggaggttggacgagtcgttggtggctgagccatcgcagcccaagctgaggcagaccccgtcacgcagcatctgcttcatgggcaggatcgggaagccgctaaggatggccggtgcggggcagtgggagacgcccgcaccataatcgccaattattttgtattcctccggcgtcagttcccagcagtgggcaaaccagacattttcacccaaaaagcccagacggcggcaccattccagggtgcgcatcccatagcgggcctgcataaattcgttttcgccctcccccaggtgggtgtgcaggcggcagccggtctccttggccagggcaacggaggcggtgaagcagtctgcggcgcagttcatgggctggcagggggcaatgacgatctgccgcatggagaaggggcttgcgtcatggtatttttcgatgagcgcgcgggtgtgggagataaaggtctcggtgtcctcacggatatcgtcaggaatggggctgccgtcggacatgggacgggtgttcgttgcgcgtccggcatgatagcggatgccgatctgctgcgccgcctccatctgccggtcgatcgacgccttgccggtgcgggcattgaagcagtattggtgatcaaaggcggtggtgcagccgtgcttgaccaggtctgccatggcggtcagggcggaatagtacatgacatcactgtcgacatagcggacagcctggaaaaagacgtccagccattccaggacggtcatattcgggtagtcgatggtggtcaggttgcggataaaggtctggaaaaagtggtggtgcgtattgacaaggcccgggtagatcagcttaccggcggcgtcgatgacctgggcactttcgcaggagatatgcggggcgatctcaaggacctcttggccttcgatcagaagatcgcagtgttcatagacccggtcgcgttcgtcgcagctaacaatggcccgggcgtttcggagcagtgtctttcccatcattcttcctcgctttctgcaaagtgatagtataataatattataaaccatatatatactatactgtcaagtgcgggcgcgaaagaaggcagtatttttccagctgcgctgccggctctgggacggatttgatttgtttagacacgcgaaaagcgcacaccgggcataccggtgcgcgctttggttaggggtaaaatctatgtgcagttttgccgggaatttcccatcattgcttgacaagagcgtggtttctctctatgatatgggcaaacgggagcggcggcacgggggcgttacagggcccgcagggcgtcgaccagcgcagtcttcccggcggttttctcgtcctttgttttgatcttccgggcggggacgcctgccattaccgcgcccggctcgacatcgtttaccacgacggccccggcggcgatgacagcgcccttgccgacatggaccccttcgatcacgacggcgttggcaccgatgagcacatcgtcctcaatgatgaccggcgtcgcgctggccggttcgacgacgcctgccaggacagcgcccgcgccgacatggcagtttttgccgacggtcgcgcgcccgcccaggacagcgcccatgtcgatcatggtgcctgcgccgatgatcgcgccgatgttgatgatcgcgcccatcataatgacggcgttatcgccgatctcgacattttcccggatgatcgcgcccggctcgatgcgggcgttgatgggtttgaggtccagcatggggatggcggaattacggcagtcgttctcaatgaccagttgggcgatatcgcccgcgtgggcttccagcactgggccgatgtccttccagtcgccgaagacgatcttcgtcccagacccggcagcaaacacctgggcgttcgggaattcgactggcttggtctcctgtaaaaatgcccggacgggggtcttcttctcggatgtgcggatgtattcaatgatttcctgtgcattcataagccattgcccctttgtgaagtttagaagtcgattttgatacggagcccgggtcaaagcgcatcctgcgtttgattcagctctcgtatctttatcatagcacggcccggcgggaatttccactattattcctccgcccgcgccggaaatggaggaactatgctgcaaataatcgaagaccgccgggcgctgcaccagatcccggaattggaccggcagctgccggagacgctggcctatctgactgctgccctggccccgctgcgttgccgcctgctgcggccaatggcgggggcactgtgcgcgtattttgacttcggcgcggcgcacaccattgcgttccgctccgatgccgacgcgctgccggtccaggagcagacggggctgccctttgcctcgcaccacccggggaaaatgcatgcctgcggccacgatgcccatatggcaatgctgctggagttggcccgccgcctggaccggatggcggcgctgccgcagaatatcctgctggtcttccagcctgcggaggagacgaccggcggcgcacgggacctgtgccagacggggatcttccaggaatacggtgtagaggcgatcttcgggatgcacctgtggccggatctgccgtcgggggtcatcgccagccgcaggaatgagatgatgagccgctcctgcgaggtgacggtggagatcaccgggcgctccgctcatattgccaaagcggcggagggcatcgatgccctggctgccggggtggatttttaccagcaggtcatggcggcggtggacgcgctgccgccgcaggtgttccgcctgtgtaaattcggccgtatggagagcgggacggtgcgcaatgccgtcagtgcccatactgtcctggaagggagcctgcgggcgttccaggatgagatttttactggcctgcaggcgcgcatccgcgccattggccgcgatgttgcgcagaagatgggctgccaggtcgaggtcacgatgaacgacggctatccggcggtgatgaaccccggcgcgctgtttgaccgggtgcttgccagcgggctggagtttgtgcagctggatgcgccggtgatgatcacggaggatttttcctggtatcagcgccagctgctggggatgttcttcttcctgggcgtcggcccggcgccggcgctgcacgcggcggacttccagtttgacgaggcggcgctgcagcggggcgcggatttctgggagcagctggcccggctgtaccggccgtgaagcgcgttttacggaaatagacaaaagaaaagcctggatgcaatgtatttttttcactgtttttgaaaaaatacattgcaattggggaaaaaagatggtaatatattggctaatgatagaggcgcatcgcgtgatgagtaaacgagctggaaggggctgtatcccgttggcttgcggaaaggggcgcgttgccgaaggcagcttcggatacagcggagctgtgctgggccggtaaactaatagctgccggactgtcgcatcactgcggagtgctatcgtttcaatttggatcgccggatcgtgcccatttggccgcctggcggtgcaacaaggaatgcagagcagctgatccgcgaggatgtgagctgctttttcttatattttctcaccagaaggaggacaaaattatgacagattcgattttcagaggcatcgctaccgcgttgattaccccatttcgcaacggtgaggtggactacgatacctttggccgcctgatcgactggcagatcgaaaacgggatcgacgccctagtcatctgcggtaccaccggcgagggctcgaccctttccgacaaggagcacaaggcgtgcatccgctttgccgtggagcgagctgcgggccggacggtcatcatcgccgggacaggcagcaacgatacgaactacgccatcaacctgacgaagtattcctgcgacgtaggcgcggacgcaatgctcgtcgtcacgccgtactataacaaggccacccagcggggtctcgtcgagagcttctacgccattgccgatgccagcacgaagccgatgatcgtttacaacgtcccctcccgcacgggctgcaatatccagccgcagacctatctgaagctggcggagcatgagaatatccggggcattaaggaagccaacggcgatatctccagcgttgtcgagacccagtcgctgctgcggggcaagctggacctctactccggcaatgacgatcagctcgtgccaatcctggccatgggcggcgcagggtgcatttcggtcctctcgaacctgatgccccgccagacccgggagatctgtgatcgcttctgggacggggacatcgccggggcagctaagctgcaatgcgactatctgccgctcatcaacgcgctgttcagcgaggtcaacccgatcccggtcaaggcagcgatggctgccatgggctttggtgaaaattcgctgcggctgccgttgacctgcatggagcaggcccatgcggaagttttgctgcggctgatgcgggaacaggggttgattcaatgagaattatcgtaaatggcgcctgcgggcgcatggggcagacgctgctgcggcttatcgcccagcagccggaacgttacacactggccgccgccgtggacccgcggggcgatggcgagaccgtcctgcagggctttgatgcagcgcctcaggcggatattatcatcgacttttcccaccacagcgcggtgacggagttgctggcgtatgcccaggccgtcaatacgccggtaatcgtcgcgacgacagggcatacgcctgaggagcgggcgctgattgaagcggcggggaaaaagatcccggtgttttacagtggcaatatgtccctgggcatcgcgctgctgtgcagtctggcaaagaagacggcggcggtgttccccgacgcggatattgagatcgtcgagacccaccaccggcacaagctggacgcccccagcgggacggctctgatgctggccgacgccatccgggagagccgcccggcggcgcagaatcactgcgggcgcagcggtatgtgcccccgggaggagggcgagatcggcattcacgccatccggcggggtgagattgtcggcatccacgaggtgcagatctcgacggggacccagaccatcatcctcaagcacgaagcccacgaccgggcgctgtttgccgacggtgcgctggatgcggcggcctttttgcagggtaagcccgcggggctttacaatatggacgatttggtgcgttgatcttatcgcgtggatcgcacaggaagcggcgctgcggcgcaggggccttcgggtgtctggtcgcggcgctgttttttctgcctttttgggttgtagtaatcatatatttcctgcaattttccagttgtcgccaggtcggaagcgtggtataataaattgttgaaatgctgcttattttgcggtaaaacaacttacgacccaggaggtattcctgtatgctagataaaatttccatccgcggcgccagagcgaacaacctgaaaaatgtcgatttggacctgccgcgggataagctgatcgtgttcaccggcttgtccggctcgggaaaatccagcttggcgtttgatacgatctttgccgaggggcagcggcgctacgtggagtccctctcctcctatgcccggcagtttttggggcagatggacaagccggatgtggattccattgatggcctctcccctgccatttccatcgaccagaagacgacttcaaaaaaccctcgctccaccgtagggacggtcacagagatctacgattacctgcgcttgctctgggcccgggtcggcacgccccattgcccgcgctgcggtaaggagatccgccgccagaccatcgaccagatcgtcgataaggtcgggctgctgccggagggaacgaaatttcaggtcctggctccggtcatccgggggaaaaagggcgagcacagcaaggtcctggaggatgcgcggcgcagcggctttgtccgcgtccgggtggacggcagcttatacgatctttccgaagagatcacgctggataagaataaaaagcatcacatcgagctggtcgtggaccggctggtcatgcggggcgatatccgccgccggctggccgactccatcgagacggccacggcccgcagcggcggcctggtcatcatccaggagccgggcagcagcgcggagacgctgtattcccagaattacgcctgcgacgactgcggcgtgagcctgcaggagctctcgccccggatgttctccttcaacaatccctatggcgcctgcccggcgtgtaccggcctgggctttttgcaaaaggctgacccggagctggtcatcccggacccgagccgttcgatctgggatggcggcattgaggccagcggctggaacagcgtcaaatcagattccattgcgcggatgtattttgaagccctggcggaaaaataccacttctccctgcaggacccgatcaacaagctgcccaaagcgggactgcaggcgattttatacggcactggcaaggaaaagctgcagctgcactactcccgcggcaatggccgggggacactggagcagccctttgagggcgttctgccaaatctggagcgccgcttgcgggagacccagtctgacgcgatgcgaaaggagctggagtcctatatggcggcccagccttgtccggaatgccatggtgaccgcctttcggagatctcacgggcggtgacggtcggcgggatgcgcattgccgatttctgccgcctgccggtgacacaggcactggcgtttgtgaacgacctgcacctgaccggcgcccaggcgatgatcgccgaccagatcctgcgggagctgcggtcgcggctgggctttttgaaggacgtgggcctggagtacctgaccctggcccgggccgccgggaccctttccggcggcgagagccagcgcatccggctggcgacgcagatcggctcgtcactgatgggcgtcttgtatatcctcgatgagccgtccatcggcctgcaccagcgggataatgaccgcctgctggcgacgttaaagcgtctgcgggacctgggcaataccctgatcgtcgtcgagcacgatgaggataccatgcgggcggcagattttatcgtggacgtcggccccggtgcgggtgtccatggcggcagtattgtcgcggcagggccgttggagaagatcattgccacaccggaaagcatcacggggcagtatctgtccggcgtgcggaggatccctgtcccggcgcagcggcgcagcggcaacggtcattggctcaaggccttcggctgccgggagaacaatctgcaaaatatcgacgtcgccatccccttgggaacgtttacctgcgtaaccggcgtttccggatctggtaaatccagcctggtcaatgagatcctctataaaaagctggcagcaaagctgaaccgggcccggctgcgggccggacggcacgaccattttgaaggcatcgagcatctggacaaggtcatcgccatcgaccagagccccattggccggacgccccggtcaaatccggcgacgtatactggcctgttcaatgacatccgcgacctgtttgccgcgacggcggaggcgaaggcccggggctacggcccggggcgcttctccttcaatgtcaagggaggccgctgcgaggcctgcagcggcgatgggctggtacgcatcgagatgcatttcctgccggatatttatgtcccctgtgaggtctgcggtggccgccggtataaccgggagacgctggaggtgctctataaggggaaaagtattgcggatattctggaaatgaccgccgatgaggcactggaattttttgaaaacctgcccaagatccgccgcaaggtggcgacgctggtagaagtcggcctgggctatatcaagctgggccaaagctccacgaccctctccggcggcgaagcccagcgggtcaagctggcgacggagctctcccgctgtgccacgggctcgacgatctatattctcgacgaaccgacgacggggctgcacacctacgatgtgcataagctgacggaggtcctgcagcgcctagtggagttgggcaataccgtcctggtcatcgagcataacctggatgtcatcaagacggcggattatatcattgatctgggccctgagggcggcaccggcggcgggactatcgtcgcggcgggtacgccggaggaaatcgcgcagcatccggccagctataccgggaaatacctgcggggcgtgctgtaaaggagagagcatggaaaaggaaggcaatgttcatgcgggacaccgtcagcggctgaagcggcaatttttggaggcagggctggacagcctctcggacgtcaactgcctggaattgctgctgttctatgcgattgcccggcgtgatacgaacccgctggcccatgcgctgctggaacaattcggttctctttcggcggttttcaacgcgtcgccggagcagctgcagcaggtgccggggatctcggaacatgcggcggtcctgctgcatgctatcccggcgctaggcagaagatattttatcgaccagacacgccaggagaagatcctgaactcgaccgagcgctgcggcgcgtatctgatcccgtatttcttcggtgcccgggaagagcaggtatatctgctgagcctggatgccaagtgcaaggtgctggactgcaggatgctctcccgcggcagcgtcaacgcggcggagatctccgtgcggcgcatcgtggagacggcgcttgcggtcaatgcaacgtccgtcgtcctggcccataaccataccagcggcattgcgctgccctcccgggaggacgaggcgacaacccgccgtttagagactgcgctggacgctgtgggtatccagctggtggaccatatcatcgtggcagataacgattttgtctctatggccgacagtggcttttttcagaaccgctgagcgggaaatacagaagaaagaaacacaggcaagttaagcacttgcctgtgttttttactatgtctaatctgaaactctattattgcggcgcagggtgggcatccggcgtgctttccagatgggtctgggtgatgtagcggctcttgagcatggctcggtcgattttgccgttggcattaaagggcatctgctccaggtggatgaaccggttgggctgcatgtaattgggcacggtgtgccgcagccggaagagaatgcgggattcgtcaatgggcccgtcgtagatgcatatgatctggtccgtatcgtcctgatacaggcagacggcgtttttgacctcagacaggctgcacaggacagcttcgatctcgcccaactcgatgcggtagcccatatgcttgatctgcccgtccttccgggagcagaagcgcatgacgccccgtttgtccataatgcccaggtcgccggtccggtaaataaggtccggataggcggaggcggggttttgaataaaagcggcggctgtcttgtccgggtcgttataatagcccttggccaagccgataccacggacgcagatctcaccgatctggccgcgcttgacgaagttgagatcgtcatccagcagcatgacctgcttgttcaggcatggacggccgatggggatcatctcatcgtcggcaaattccttgttaacgatataataggtgcagtcgacagtgacttccgtcgggccgtagagattgacatactgcacgtccggcaaggcggctctccagatattcagctcccgggcccgcatcggctcaccgccgacgatgacgcgcttgagccagcggggtgcggccttggccagcgcgccggagtttgccagctggttaaacgagctggtgctccagataaaggaggtgatgccgtagtcgtcggcaaaggcaagcagccgctccggcagcaggacgtattcctgcgggaagatatggacagtgcagccgcagcgcagaccctggtaaatatccttgacagagaggtcaaagtagaagggcgcctggttgccgagaatgtcttcatcggtgaagcggaacgtatcggacatccactcggtgaaatcaatgacggcccggtgggagatcacgattcccttgggcgcgccggtggagccggaggtatagataacataggccgggtcgatatccaggaccatctgacggcgggccgtcaggaacatcgttaccgggttggcccgctgggcttcctccagggtgaagaccgggcacatggcggcaaaatggtccatatcctcctccgcgtcccgggggcccagcagggcggcggggcgcagctgccgcaggatcatctccaagcggcggggcggcatatcccggtcaatggggacgtaatagttgccgctggccaaaatccccataaacccggccaggctcagggaggagcgctcgaccagaatggcgatgggccgattcaaggcgttggtccgggtcatgataaacgtgccgatggcttcggcagcgtgcagcaatgaccggaaggtgtaggcatttttcgggtcggcaaaggcgactttgtcgccatattgcgcagctgagtgttcgagatactcaaacaaattcttttgcagcgccaaggagatacgccacctttctctctaggatgcgccggacttgccggcggtcagaagggtaaaatcggggcggagccgtcgtcctccgcctgcgtgatggcgcggatgagaacggcgtagtgatactgagggctgacctggacctcgactctgtcgccgacgcagcggccgaggacggccttgcccaggggggattccttgctgatcaggccttggtccgggtcggtccggattgtggtgacgacctggatggtctgctccatctcgtcctcttcaaagtagaggaccaccttgtcaaacagcccgacgacgctgctctgtttgggggcttcgtcgatcaaatgggcggttttaatcatattttgcaggtagcggatgcggctttcgttgcgg

SEQ ID NO: 3814 - DNA, 18693 bp, Unknown
  16S sequences of unknown bacteria
aattccctcaatctcatccggagcgcggctgtgcgtctccccaagaatgggctcccgcccattcttccggggtggtgagcactccggcacgcaattccctcaatctcatccggaacgcggctgtgcgtctccccaagaatggggcgcggcgttggaaaaggagaagcaaacttgacggttcgttttctgcaaatactggaaaaaccgccgcaagtatcgtgcttgcagcggcctttccattttctccgcaacttcccgtccgggacgcggcagagcataaccgacagatatacggcctggcgggcaccgtgacgggaggcccgctctcttatttcatcagcgtgaccatgaccgccttctgcgcgtggagacggttttccgcctcatcgaaaatctcctgtgcgtgcgcctcgaacacctcggcggtgatctcctctccccggtgggctggcaggcagtgctgtaccatacagcccggattcgcggcagctaacagcgcgccgttgacctgatagcccttgaaagcggcgcggcgcttctccgcctccccttcctggcccatggaggcccacacgtcggtgaagatcacgtccgcgcccgcggcggcctccaggcaatcgccggtcagggtgaaggcgtcgccgaaatcggcggtaaaatccagcacctctttggcgggacggtatccgtcgggacaggcggccgccacccgcatgccggtcttgagcccgccgacgatcaaagaattcgccatgttgttgccgtccccgatataggccatcttgagcccttccaggatccctttgtgctcccgcaccgtcatcaggtcggccaggacctggcagggatggcagaaatccgtcagtccgttgatgaccgggatgctccccacccgggcgagggtttccacttcctcctggtcgaaggtacggatcatgatcccgtccagataccgggacagcacccgggcggtgtcctccaccggttccccccgcccgatctgcaggtcgtgggaggagaggaacaggccataccctcccagttgatagatgccggtttcaaaagagacccgcgtgcgggtagaggctttctggaaaatcatgcccagcgtcttgcccgccagcaggggatggcggatcccatgccccagctcatatttgagctgatcggccagattgaggattcccaggatctcctctttcgagagatccagcagcttgagaagatgattcatggaaaaggctcctttctattgctgacagaggatgcggaataccgcagggttcccttttgggtacatccaggtctttccgggtccgcagcatccgatggcgaggaggcatggccgcatcgggctgtgaccagctaaagccttagggcccccggccctatgccatattgttgattgaggcggccaagctcctgccggttttttctaaaattacacaagccacggggctcggacggtcataaacccatgaaattatgagcacccagactcccgggggcctcgggccccctaatgtatatcgtcggttttttaattctgccggggaggttctcctaaaaagagaaccgacaggatcccttggggtccgggggtaccccggcggcgtttttgcatccttttgtctccggggacaaaaggatgtggccgcgcattcgatgttctttttagaagggctgcgttctttatgcgcggacaaaccgccatacccgtctttttcaggtctggcctgccggccaccttctttcttcacacgaagaaagaaggcaaagacgtgtcagggggcatcgccccctggacccccagtggtttgccggctttctttagagaaaagccggcggtggcacggctgcctgaatcaacgataaaaaaggctgccgccccaagggcttgggtggtcataatttcatgcatttcatataaatactcccgtttaaagggctgccagcacggctgccagccggctgaggccgcggtccatttcatcccgcgtgatgttcagcggcggcagaagccggagcttggccttggcggtgaggatgagcagcccgttctgaacgcagcgggcggcgacctctttcgcgtcggcgccgtccagctccacgccgagcatcatcccgaggccctgcaccccggtcacatgaggcatcccttccagcctctcccgcaggacccggcctttttcctccacctcccgcagcagcgcgggatcggtcaggcgggaaagcatataccgtccggcggcacaggccacagggttcccgccgaaagtggagccatgggtcccggacgacatcacgctgccgagcatctccgtgcacaggcaggccccgatgggcaggccgccgcccagacccttcgccatggtcacgacgtcgggccggatccccgcgtgttcacaggcgaggaaccggcctgtcctcccggcgccggtctgtacctcgtcgatgatgagcaggatatcccgggccgagcaaagctcgcgtaccctccgcagatacgcgatatccaggggcaggacaccaccctccccttgtacacattcgagcatcacggcgcagaccgtgccgtctatcgcctgttccatcgaggcggaatcgttcgcgggcaggtagcggaacccctcggtgaagggaaagaagtattgatggaagccgtcctgcccagtggcggctagggtggtgaccgtccggccgtggaaagaattttgcagggtcaaaacggtgctgcgtccctccccatatttatcaaagctgtatttgcgggccagcttgatcgcgcactcgttggcctccgcccccgaattgcagagaaagacccgcgccatccctgcggcggcgcagagctctctggcaaaggcggtctggaccggattgtcgtacaggttggagacatgctggagccgggcggcctgctccgagaccgcttttacccatcccggctcacaatagcccaaggcgttgaccccgatgccgctgccgaaatcgatgtattccctgccttgcgtgtccacggccacggcaccggcaccgtgatccagatcgacgggaaaccggccgtaggtcggcatcaggccgccttctccggcagaaacgatgggattcatctgtgtcacaactcctttatattgtccgacgtccgggcatcacaggaacatggtaccgatgccctcgtcggtcagcatttcaatgaggatggaatggggaatccgtccgtcgatgatgtgggtacggcgcaccccccggcggactgcctcgacacaactgtcgattttggggatcatgccgccggagatgatgccgaggtgcttgagatgaggcacctcgctgacctgtaccaccgagatcagggaatcctcatcgtccctgtcccgcagcaggccccgcacatcggtcatcagcaccagcttctccgccccgagggcggcggcgatctgagcggcagcgatgtcggcgttgatattgtaagtctcgccgtcctccccggcggcgatggtggccaccaccggaatggtatcgctgtccaggctggtgcggatcagggtgacgttgacgtgggtaacgtcgccgacaaacccgagatcctccccctgatggcggaccgccttgatcatcccgccatccaggccgcacaggccgatcgcccgtccgccgtgggcctcgagctgctgaacgagggttttattgaccttgccggcgagaaccatttcgacaacctccatggtctccctgtcggtataccgcagaccgcccacaaaccgggattctttcccgatttttttgagcatggcgctgatttcggggccgccgccgtgaacgagcaccacccggatgcccacggtggaaagcaggacgacatcctgcatgacggcagccttaagctcttcgctgatcatggcgttgccgccgtatttgatgacgacggtttttcctgcgaactgcttgatatagggcagggcctgggtgagaacctgcgccctgtcggcggtggaaatcttcataacgtaaaccctcatttgcatcagaaatatggagcgcggggcgagagcgcctttgccccggggcctcgggtcttttgggaacgggcgttcccggcgaaggcccccgcttcctagctgcggtaatccccgttgatcttcacatagtcgtaggtcaggtcacagccccacgcggtggccgcggcctcgccgtcccgcaggcggatatccaccgtcacctcgggctgggtcagcacggttttggcggtatcctcgtcaaaggggatgccagccccgtttttgcagacctcgatctgtccggctttcgagacgaatgcgacatccacgccggacacgtccacctgcgccccggaatacccgatggcgcagagtacccggccccagttggcgtcggccccgaagatcgccgccttgagcagggaggatcccgctaccgcccgggcggccatgcgagcgtcatgccgggacgcaccaccccgtaaccggacttccagcagccgggtcgcgccctcgccgtcggcggccagggcccggacgatcgcggcacacagcatccgcagcgcgccgcaaaaggcgtcgtaatcctcccctttggaggagatcagcggattctccgccgcgccgttggccaacagggcaaccgtgtcgttcgtcgaggtgtccccgtcgacggtcagcatgttgaaggtatcccccaccgcatcgagcagcgcttcatgcagcagggtgggagtgacggcggcgtcggtggtgaggaagcagagcatggttgccatgttgggcgctatcatgccgctgcccttggcgatgccgcccagggcgcaggttttgccccccgcccggaaggtcagggcaaactcctttttcacggtatcggtcgtcatgatcgcttcagcggcttcggagctgccggtttcggacagtgcggcggccagagcgggcatggctgccgcgatgggggcgagcggaagggagggaccgattacgccggtggaggcgggcaggacgtccatgacgtcgatccccagggcctccgccgccaggcggcacatcccttccgcggtctcgatcccgtcggcggcgcaggtgttggcgatcccgctgttgcacacgatggcgcgggcggtgccgttttccagatgccgtttcgtcacggtcaggggcgcacccttgaccaagttccgggtatacaccgccgccgctgccgctggccggtcggagaaaatcagggccaggtcctttttgctccggtttttccggatgccgcagtggatccccgcggcggaaaaacccctggcggcggtaacgccgccctcaatgaaggttgacatgggtatcagctcctgtgtttccctggcgggcggctgcgggggctgccgcatctccgccgggtaatcgtttttataggataggcccctccaccgggagaaatccgcgacggatcagggtttcgtgtcttctgccgcccaaacggccggggtagaagagccggatgccggcccagaggccctgcgtcttcgaaaaagggtataaagccagaacgcagcgaccgggatccccgccccgagagccagatcccaaagggtgtagaggttcatccggctttgccacatcacccatccgattccggcgagaagccgcagcagaaccagcagatggaacaccgcccattcccgtccccgaaggaaccagagcagcagcttggagaggaccaggtacagagccaccggtatgaggtaaagcagtaaagcattgagcaggtaacgcccaatcccggtcagagatccgttaaggagaagccacggcagaagctccaccaagacattcagcagcagatgcagtcccacagccagcagacagggccgcagcccggaccggatcacgatgagcaggaacaatgcgaaagcaaccgccccgaagaccacggaaaaacggaaccagggataaaagggcatccgcacatcaataaagaccgacatgcccttgagcagggtggctcccgcccaaattccgagcagcagccagtattccttggtaaaagaccggttcataacgtttcctcctttttcggctcaccagcagcgcatggttgcgtgagatgggcaaaatcggagcggagcaggcggtccaacgcgaaccacccggccgccgccagggcggccgtcaacaccgccggcagcaggatggtcagcagtatatcgaggagaccgaggcgcgagagtatgagatagttcggcaccgaccggagggaacagaggctgagaaacggataaagggcggccagaaccaccgccgcgatctgatcccgtcccttgaaaaggcggatgaggagaaggccgagcccatatgcagccattccaaacactagctgcaggacaatatcagcgggcagaacccgaacgccgtttatcagctccagcgccacgctggctccggttaagagaaccagcatcacggcaaagggcagaagacggaaacggagcaggatcatgagcatcgcggccgccgaggccccggacgccagaagcgccagggaaccaaccacagccgtcagcccggacgaggctgggaagagggtaagggccgacaaaaggcatccgaagccgcacaagcccgccaacatccaatagggccggacaaagcccggccggtcccggtaaacgcgcgtcatggtggaacctccttgccgcaataggatgttcgtttttaaaaagagagaggggccatgccgaggccggtatcctccggcaggccgaagagcaggttggcgttttggatggcctgtcccgccgcacccttaaccatgttatcgatcaccgaggtgacgatcagcaggccggtatgggggtcggcatagagctggatgtcgcagtagttggagcagcggacgctgcggatattgaccccttccccctccggcagcaggcggacgaaccgttccccggcgtaggcggcggcgtaggcctcccgcacctgcccgagggtgacgccgggtttcatccgggcgtagatggtggaaaggatcccccggttaaccggcaggagatgcgggacgaaggtcacgctcaccggctgtccggcggttttggagagggtctgttcgatttcgggggtatggcgatggctcgccaccttataggccgagaaggcctcgttgcagtcggggaaatgggtggtctgggagaggccgcgcccggcgccggtggtgccggatttggaatcgatcacgatcccggcggtctcgacgaacccaccccgcagggccggggccagtccgagagcgacgctggtcggataacagccggggttgccgatgatccgggttttccggatttcatcccggaaaagctcgggcaggccgtagaccgccttttgatgcagcgcgggatagagcgcgtcgcagccgtaccaggttttgtaggtatccggatcgtccagccggaaatccgccccgaggtcgatgaacgccttgccctccgcgtcgcaggcggcggcggtctcctgggacagcccgtggggcagggcggcgaagaccagatcgctccgggccagcacggtctttgccgaatcgcaggggaggtcgcagagctcccgcagggcgggatagaccgacgagagaggtttcccttcaaaagaaaccgaccccactgccgcgacctcgatcccgggatgggcgaggagaaggcgtacgagctcgacgccggcataaccggtcgcgccgaggataccggcttggatcatcacgcaacagtcctttctgtataggagcctgggccaggggcgatcttcgacccgcgtggagctgccctggccggtcagaaccgagatcatggtacagagggggtcggaccggtcctgaattttttatccatgtgaggcaattcgggatttgcccgaactgcaaaaccgggctggcagcgttcctaccataattacgtagaggcccggcctggatatccccagaaggtcaggcaattcgagcgtttgctcgaattgcaaaaccgggccggtaacgttcctatcataatcacgatggggcccggtttagatctcgcacccgcgcgatctgggcgaggacgttttcgggcgcgggcccgccgtacacccggcgggacgccgcacagcgctcaagggaaatgaaagcaaacacgtcctcgtcaaacagggggcagatctcccgatacgcagcaaggggcagggtctcgagtgtcagcccttcggcgatgcagcgggccaccagggtgccagtcgccttataggcgtcccggaagggcaaccctttccccaccagataatccgcgcagtcggtggcgttgatgaacccggcggccgcggccttccgcatattctcgggcagcacccgcatggtgtcgatcatggggatgaacggggtcaggcagccggccacagtgtcgagcgcgtcgaaaatggcctccttatcctcctgcatatccttgttgtaggcgagaggcaggcctttaagcatggtcagcagccccatcagatccccgaacacccgcccggatttcccccttaccagctcggcgatatccgggtttttcttctggggcatgatggaggatccggtggaaaacgcgtcgtccagctcgatgaatttgaattcccaggaacaccagaggatgatttcctccgaaaaccgggagagatggaccatgatgagggacagggcggccgccagctcgacacagaaatcccggtcggacaccccgtccagggaattgtgggtgatcccggccatgccgagggtatccgccacggcctgccggtcgaggggataggtggtggcggccagggcgccgctgccgaggggagaaacatccagccggcgcagggcatcggagagtctatcgagatcccgcaggaacatctcggcatacgccattagatgatgcccgaaggtgatgggctgtgcccgctggaggtgggtgtagcccggcatgatggaggcggcgtgggcctccgcctgattgcagagcacccggatcagctcccgaagctggttttgcaggccgggtaccgcgtttttgagggtcaggcgcagatcgagggcaacctgatcgttccggctccggccggtgtggaggcgcttacccgcgtccccgatccgcgcggtcagttccccttccacaaaggtgtggatatcctcggcgttcgggtcgatggcgagacggcccgcggcgagatcggccgcgatcccggccaggccctcccggatcttctccccatcctcaggggagaggatcccctgtttttggagcatggcggcgtgggccaggctccccgcgatatcctcccgggccatgcggcagtcgaaggagatggaggaattgaaatcgttggttttttggtcgatgtccttttggaaccggccggcccacagcttcatggcgggacctcctttttcgggtacggcgccggatcggcggccggaacgggcctaccgcgcccggaccctgaagggcccggacgcggcagccgtcaatcgtgcagttgtttagccctgcttttgctttttcatcgcctgcaccttaatcggcaggccgaagaggttgatgaagccctggctgtcggtctggtcgtagacatggtcctcgtcgaaggtggcgatctcctcgtcatacagggaatagggagaggtcagggaggcgaggatcatgttgcctttgtagagcttgagcttcacatcgccggtcacatgctcctgggtggaatccacgaacgcggacagggcttcccgcaggggggtgaaccactggccgtaatagaccagctcggagaacttgcccgcgaccatctgctgcttgtagtgctgggtatcccggtcgaggcagagggtctcgagggcctcgtgtgccttgtagaggatgctgccgccgggggtttcatacacgccccggctcttcattccgaccagccggttttccaccatgtccacgatgccgatgccgttctcgccgccgagccggttcagcttctcgacgagggcaaccccgtccattttctcaccgtctatcgcggtggggattcccttttcaaaggaaatggtcacataggtgggcttgtcgggagccttttccggagacacacccatttcgaggatggcgtcgtaatccggctcgttggcgggatcctcgagatcgagcccttcgtgggagagatgccagaggttcttatccttggaatagtttgtctccctggtaatgttcaggggaatgccgtgggcctcggcgtagtcgatctcctcttcccgggatttgagatcccagatccgccagggggcgatgatcttcatctgtggcgcgaaggccttgatcgccagctcgaaccgcacctggtcgttgcccttgccggtgcagccgtggcagatggcatcggcaccctcggccagcgcgatctcgacgatccttttcgcgatgatcggccgggcaaaggaggtgccgagcaggtactggttctcatacaccgcgcccgccttgacggtggggaatatgtagtcctcgacgaagaccttccgcagatcctcgatgtagagcttggaggcgccggtcttcttggccttttcctccagaccggaaagttccttgccctggccgacgtcggcggcgaccgcgatgacctcgcagttgtcgtagttttccttcagccacggaataatgatggaggtgtcgaggccgccggaataggccagcaccacttttttaatttggttgctcattgtccgaacaccctttctctgtatccggacaggcgggtcgccatgtccgtttttcattatggccttattatacgcaccccgcttccattttgcaagaggatgcatcgcatatttattcgaatcgagaaaattttgttatcctgaccaaagagagaagagttaaacgtgaatactggttgatccgcacaaatggcatacacgcatatatgaataaatattcattatctttgtatccatccgaatgagcttttcgaaaatgttatagagttgtcaaacgaattgacaccgccccaaaaccgctttatactggactatatccacataaggcttgcgccgggaatgcgggaaccaggccggcgccggacggatgtgttgggaggggtgctcaatgaacagacggcagatcatccgtttgtcgtttcttccgttcctgctgccggttgccggcggcgccgcggcaccacaggagagtcaggggaaggggagcgcggtctgtcgggccgcatccgatggcggcgggacggcacgtcgtcccggcaccggcttttacgtcagcttggctgtgatgctgtccggactggttgcactgggggtcctcgtctatttcgcgtttttccgtttccctcccatccccaggaccgacgcgatggcgtcggcatcggttacctgccggcatatcggcgggatcacagacgataggaaggggatcacatttgaggtaagttccacggaaggcctgtccgctgtcggccggctggagagcctggcgcaggaaaacaacggggggccggaatgctattgcgtgccgtgggagcttgagatttcctatcagctcaaaaacgggaaaacctccacccgcacctacagcggccacgcggcggatgaggatatccgggcggtgctcgaggccatccccgatgccgccgatgccattgccgcggctgccgatacgcggccgtgaccgcctgccctctccagagagcgccgcatcgtgcaaggcgggtgcctgtccatttgtcatggacaggcaccttaagcatacgggatctgacatccaatcgtgacgcagctatacgggaaaccggccacagcggcctatatccggaagggcttttacgggatccgggaatacaggcgctgtccgcgatcggccggcgccaacaatagaagcgcgtatggccctccggccacacgcgcttctgctatacgggagcttatgccttgagcagggcggccgccgcttcccggagccgctcggccatcgcctcggctgcgtccggatcggcgccggtggcggtaacataggccttgaccttgggctcggtgccggaagggcggatgacgaggcccgcgcccccctccaggccgaaggcgaggacattggacttgggcaggtcgatgggggacctggccccggaaacgacgtcctcctgaaccgactcctgataatccgcgaccttgaccacccgaagcccggcaagctcagacggccggccctgccgcagggaggccatcagccgatccatcgcagccatgccttccgccccctcgaactgggcgctgacctgaaaatgccggtagcagccgtgttccttgtaaagggcggccagtacgtcgaggagggtctggcccttttccttgtaatacgcagccatttcacagatgagcatagaggagaccaccgcgtctttatcccggacataggtgcctgccagatagccgtagctctcttcgaatccgaagacgtagcggtcttcctctccggctttttccaaaaggccgatctgctcgccgatatatttgaagccggtgagcacctcgaccatacggcagccgtacttctccgcgatacgggcggcgagatcggaggtgacgatggttttgaccactaccggatcgtgcggcagggttccggctgcagaacggcaggcaaggatgtaatcgagcaacaggcagccgacctcgttgccggtcatcagggtgtaatcctccccgtcccgtacggcaatgcccacccggtcgcaatcgggatcggtggcgagcagcaggtcaggaccgacggtcttggccagctccagcgcacattcgaaggcctggcggatttccggattgggatatggtgcggtcgggaaattcccgtcgggcagctcctgctcgggtacgacggccaccagcggcacgccgatgcgccgcagcacttcccggacgggcttgttgccggtgccgttgaggggggtatacaccacgctgagccgggcccggccgcacacgcccgcattcacctggcgagagaggacacagtccatataagattcgagcagggcgtccgcgatcgtgacgatacggccatcggccagcgcctcgtcgaagggaacggttttcactccccggaataggtctaccttgcggatgtaggccgtcacctcgctcgcgtcgtggtcggtcatctgacagccgtctggaccgtagcatttgtagccattgtatttggcagggttgtggctggccgtgaccatgatgccggcctggcagcggttttgccgcaccgcgtaggagaggaccggcgtcggttccagctcggggaacaggcggacggtgatgccgttcgcggcaagcacccgcgccgcttccctggcaaaaagatcggatttgatgcgagagtcgaaggagacggagaccgccgccgtctcataccggccattcagataatccgccaggccctgagtcgccttgcggacggtgtaaatattcatgcggttctccccggccccgatgacacctcgcaggccgcccgtgccgaactccagctcccggtagaagcggtcctcgatcgcgtcctcctgcccttcgatgtcccgaagctcccggacgaggtcgggatcctccacagcgttttgcagccagagctcatatttttgacgaatttcagcgttcatggttaatcgttcctttccacaggccgccgcacccacagacggcataaaatacacctttatcatacacagttttaccaaaaaatgcaagccgcactcgtccgggacctccaaaaccgtccgacgcgtttcgacagccagcgccccctcaggtcctgccggcgcaggagtgtctccttccttgtgtcggcggcctgacacattttaagacaagcggtgattttcaccattttctttcattttgcccggccgccgcacactgctcctgagccctcccttacagcgccgcttcttgctcatgccgcccactcctatttctttatctgaaagaagcgagaggctgttacctccagcggcatccgcagcaattcgcggctatgtctgagccaaatgagaagggaatacggattgaccgtccgtttcccccctgccaaaaccgcttgctgcgttgaacgactgccagaaagcgatcaaaataacacagcaatggcccctgcaaaaccgcagacgggtatggcattctaatgaagtgaggtgaagaggacggacgagaaagcactggtcgaatccataaatcaattgatggatcgcaagccagagcctattggcgcacgccttcacgggatcgatcaacagctgggcagcatggatcgtcgtctggaacacctggagtataaatccgacgttctcaccacagaggtgcggttggcgaattccaaacggtcccgggtggccgcggttcagaattacaccctcgaacagctttggcttctcgatgagatcaagatggacaaggatcccatgagaaaaagggcataaatcaagccgccaccctcccgggatggcggctttttattttttcggaaacaggccgtcatatcagggggatgctcttctcgcgcagagtgtgaggaatccccctaatgatatcttgagtttttgcaggcggtatggatattcggccggatcctccggtcgttttttatctctcgggcactgcagaaggggcttcattccctccaaccgaagagcctttgcggaaggtggaaggggccaccccataatgtccacggaaggcattcgaaaaatggctgatattgcagaacccacaggctatggccgccccaccgacgctttcctgccgttccagaaggcggcgtgcttgctcgagccggaggatcgtgatataccgcatggcgctgataccggcaacctctttgaagcggcggcagaagtacgccttattgtatccaaaccggcagctcaatgcgtccagggtcagcggttcggtataatgggcttcgatatactcgaagacctcccggaaacgtgcgtccgccaaacgggagggcgactcgttgagcaaacagcggtcatacagcacgccgagcagctcatacaccctgccgaccgcatacagcgccgttccccggccctcactgcggcacaggctgaccaagccgtccagcacacccagcacccggctgtcgccagtacacggggcaaacaccgcggtcgaatcacatatggcggtcaaatagcgcctggacgcaccactggcgttgtaaaagtcggcggggtcaaacatgacggtatgataacgtgcgccctcccgtcccgccgccgccccatgcggacggcagggacaggctatggccagctcccccgtcttcactataaaacgtgtatcgtcaacgtgacattcgagacttccctccaccacccggatcagctccatgcgttcgtgccagtgcagcggaaaggcctttgcccctggttccacccgggcgtcgtataacaccttgaccccgttttcggggtatcgtaccggttcatattctttgtacgccctcgtattcatcctctcaccttttcaaaaagtcaatatgatgcaaataatagtcaaagcggctctttcacggccttcacgggtatgataccataaaaccgtcagcaccacaatgttttgaccatgaaatgatgggggatacgtatgaggatcggaacctgcatccagttcgacgatgccgaacatattgcaaagaaatttgaaacgctccggaacagcggctttgactgctgccagctggtatcctggaagccggcgttgtggaccaccgaaaacgccgcggagatccgccgccatgcggaggagaacggggtgacgctctcggccttctggtgcggctgggaaggagcgtgtacctggaatttttacgaagggccgcagaccattgggctcgttcccccggccttccgcgccctgcgggtccggaatctatgcgacggctcggactttgccgcggcgctcggcgtttcggacgtcgtcacccatatggggtttattccggagaatccttgcgacccggaatatgagggcttctgcgacgctgtgcgcactgtcgcgctgcactgccggaaaaacggacagcatctgctttttgagacagggcaggaaacacccgtgactctcctgcgctgttttgagacggtggactgtgacaatctcggcgtcaatctcgacaccgcgaatctcatcctttacggcaaagccaatcctgtagacgcactcgatgttttcgggccctatgtccgcaatctccacgccaaggatggcatgtatccgaccaacggccacgatttgggtgaagagacccgccttggagacggcagggtggatttcggcgcactctttgaaaagctgcatacgctcggatacgactcctatgtaacaatcgaacgcgaaatcgacggcgagcagcagctggcggatatccagcacgccaaaacgtatctggaacagatcatccagagggtttatggaggtggaaaggtatgctgacggtcggactgatcggcgtcgggggcatcagcggcgcacatatacccgcgtgggacggtatggaagatgccaaactcgtggcgctctgcgatatccggcccgagcagatggaaaaataccccgataagcaccattacgagcgcttcgacgacatgctggaccaggaatctctggatattctggatatctgcctgcccacctatctgcatgccgaatacgccgaaaaggcgatgcagcggggcatacacgtgctgtgtgaaaagccggtatccctgaacaccgtggacatcccccgtctgactgaaacagcggcgaaacatcaggtcaagttcatggtcgcgcaggtgctgcggttctggccggagtatgagcggatcaaggacctgtacgagaaccggcagtacgggagactgctgtcgggaagcatgtcccggctgggctgttatcccgcctggagctgggacggctggatgatggacgaacggcgcagcgggctcgttcccttcgacctgcatatccacgacctggatttcctggtgtacgccttcggcacacctaaaaacgcaacccgtttccgcgcaaaggaaaaaacgcaggactatgtgagcgtggtatatgaattcgacggcttctttgtcacggccgacgcctcctggtacgcttcccctgtccctttccgcatggggttccgttttcagttcgaggaagcggtggctgtttacgaggataaccgcctgacgatatacgagcgaaacgggcggattctgtcggctggggaggatgccggagaaagcgacaccctccagctccccaaaagcgacgcctatgccaacgagatccggtactttgccgacgcggtgcgcaacaataccccgatcgaccgggtgacaccggagagcctgaccaccgttctcagtttgttgaacgccttgtaagaggccggtttctatatataaactattaaagaaaaaagggccgagcgccgtcacctctgtgtgtgacatcgcgctcggctccttttgtgatgtatgattaccatggaaagtgattttccgtcctttgctgccgccagacactccgattcatgaccccggttccttcatgtccccccgcgcacagactcggccgaagcggccatacgggactggaaaggcagagcccttgacaaacagagaaagaggggatatagtaagagacggcttcggccaggtcagttcgaaaccatcctgaccctgcggtgccgcatggtgccgcggaaatcaaaactatggaggcatttggtatgcagcacacacacacccgcgcggccctgatccggctcgtgcaggcggcgctgatcgccgcactgtacacggtctacaccgtcctcatccaacccgccggttttggtgccgtccagttccgggtctcggaagcgttcaccatcctgccggtgttcacccccgccgctatcccgggactcgccatcggctgcctggtttccaatctgtttggcctgatgggcggcgccaatccggcgggggcctgggatctgctttttggaactctcgccaccctggttgccgcctgcctgacgtatgctcttcgccgcccgcgtatacggggcctgcccgtctgggcgaccctgcccccggtactgatcaacgcggtggtggtggggatcgagctgaccctcgtatatgggggcctgccctggtatttcaacatgctgggggtcgcggccggccagcttgccgcctgtacggtctgcgggcttctgctcttcgccatgctcgagcggtcgggggcggccagagtgctgttcggtgcccagaccggccgtgccgctttgtaacgttatacaaatgggataatatgtatgattttatagccacccaagccccggggccgcagcccttttttgtatataggcgggttcgggcgtccgctctcccgccggctttcctaaagagaactccggaccggcccctgaagggctctctacaccggcaaactttggggccggccaaccgccattgtggagtcccacaatggccctaaaaatcaaagcatcaggggtgccaaggggctcccccttggcacgtctttgccttctttcttcgtgtgaagaaagaaggtggccggcaggccagacttttgttgcggtatgtccgcgcataaagaacgcaatcctaccca

SEQ ID NO: 3815 - DNA, 9392 bp, Unknown
  16S sequences of unknown bacteria
tgtcctttgcctgacgcaccacatcctccatatcctttttacctgccaccgtagcattgatctgggtaaactctgccttcgttgtatgagcgatcacctttgcaatggtggtctttccggttccaggcgggccataaaagatcacagatccaagcttatctgcccggatcgcacgataaagcagcttgtcctttcctataatatgctgctgtcccacgatctcttccagtgtctccggccgcatacgcgatgccagcggcgcttcggatttcatggtattagttctcatatagtcaaataaatccatggtatctttcctttctgagttcccttttccctgtagatatggtacaatccctgtatacgatcaaccataagaaaaaaggagtataacatctatgcaatatcaggcaattgtttttgacatggacggcgttatcttcgatacagaacgtctggccatcgaattctggaaagaagtagctaaaaaacacaatatcccaaatatagaacacacttgcattcaatgtcttggtaccaatcgtgtacgtactcgggaaatatttctggaaaattacggtgcagattttccctttgatccgtattgtgcagaagtgactgagctttttaatactcactataagggtgtaccgcttcctaccaaacccggcgttcgtgaactgttaagctatcttcaggaacaggacatcaaagtcggtcttgcctcctccacagcccagcatctggtgcgtgatgagatcggcactgcaggacttcttccctattttcagacactggtctgcggagatatggtggaacacagtaaaccagctcctgatatttttctgaaggcctgcgaaattcttaacgcagaccccacaaagtccattgccattgaggattcttttaacggcatccgttctgctcactgcgcaggcatgactccgatcatggttcctgaccaggtacagccgacagatgagatccgcacacttgccttccatgtcatgccaagtcttctcgatgtattaaactggctgaaaactctcgcataagtgtattatactgattttcagaaatggatacaagcattactccagattcagtttgttggtcaacacatactccgtgatcacatggtatacagctaactgtattccatttatcaccagcatgatcagcatatacagggtgatgatcaatcctgcattacccgccgtaatattcaccagattatccggtaatatgttcgtgacgatcatggtgccgatattagtgatggtactcacagccatatttaagccaatataagccagaaatgatcctgctacccgatgatcctccatcaactgacccagagacatagatgcatagagcatataggttccgcagatgcttgtgacaatcaggaacaggattccaagcacgatcagaacacctgtgtaagcaccaagctctcctgtcattgatctccatattacactgaacgtatatcccatactgtaaaagatctccttggagatgccaagaaacaggatcaggcaggaaagtgccgcaatcagaccactgatcagatttacaatggccgccacgatcaccttggatacgatgagctgccatacttccaccggaagggtaaatgccagatacccttcttctttcagaagaccgttccagaatctgcggatcaccaggatcagtgtcatgatcatcatgccgacgatcactgccacaaaaaggactgcaaggattccaagcaggatcggacctatatattcagaaaatacattcataagcggtccgtctgctaccgaaagcagatgaatggttgcgctcagcattactgcgatgaccggtgccacgatccagaccggaataaacacacggatcagagatttgatatcatatttcaccagcttacttaacattccactcacctccctcaaatggtactgcccggaattcctgtcggaacagttcatctacggacatgccttctttttcgcggatatcatccacctgttcctggcgaacgatctgtccgtcctttaaaaatacgacttcatccagcacccgctccacatctgcgatcagatgggtagagatcagtactgtgccgtccggattgtaattattcaaaatggttgacagaataaaatctctggctgccgggtccacaccggcgatgggctcgtcgagaagatacagttttgcctgtctgctcataaccagtacaagctgtaccttctctttgtttccttttgacagagtcttcatcttcaacttcgtatcaattccaagttcctgacacatcttttccgcccgtgcccggtcaaaatcctcataaaaatcttcaaacagctccagcagatctgtaatcttcatccagtctgcaaaataaggcttgtccggaagataactgatcactgatttggtatgtatgcccggctcctccccgtcaatggtcaccattccctgatccggcttcaaaagtccgttcaggatcttgatcaaggttgtcttaccggatccattgggtcctaacagacccacaatctttccactttccagtctcagattcacaccgcaaagagcttcttttctgccgtatctcttgtgcagatcctgacactgtatcaatatctcactcattctttcatgctcctttccaaaagctgtactgcctgttctttgctgtaaccgagctctgcagttgcctcaaagaactgatcgataatatttcctgcaagtctggatcgcatggcttccagcacgccttcatcttccgtcacggttctcccaatcgtccggttcggtatacttaagccttccccgtccaacgtggccaatgcccgctgcatggtatttggattcacacctgcttctgcagccaggtcacgcactgttggaagtttttctccggctttataccatccagacaggatccgcctggtcagctgctcttccaactgcatccagattggtctgctgtcatccaatttccattccatatgctgtactcctttctctattgtattatttatttaatgcaataataattccatacaaacgatttgtcaacagattttcgaaaaatccatgacagcccggagtgtgtgaataaaagcttcttactctacgatagcccggagcagcccgcaaagtcagcaataaactgcgctgctatgacttggagcgaacaaactggttcggtgtattgtcggaagcgtacacgtttcgtgtacgaatccagacaatatagcgggccagttttgtccgatacacgtcatacgagcttttatgctgacttcgcgggctgttgtatatacgatcttttattctatcatccggggctgttacaatttttgtaaacttctccaggctgttgtagatttccccgaaaaattcactctgctgcctgcaccggtgtaatggtaatattggcagcttcgatcccggtttttcgtttcacgatatcctcgatctgtgcccgtttggcatcactgacctgggtactgctgaccactacatctgcgccggaatcactgatactgacgaccacatcttcaaatccctgtgccgacaacaaggtctctgccgccagttccttctctgcggcatctgtcatggataccatctcatcaatggcatcctgcttctcagaatcactgatattcgtgctgttgatgacctccataagaatctctttattgcgggagcgggtctgctctctggtcactttggcttctgccactaccgtgcttcctcctgtactgctggccatgacagtctccccgacactgtcatctgcagatgccgtctcctcataatcttcatccaggctggcaatatccgtctcctcttcttccccggtctgtgcatagatgtcctctgcagaaatatcggctgtcatatcagaatcatcactttcagacaccgaatcacttccggctgtcagcatactgctatcaaaggatgtgcctgcataattcagatatcctgccacagcaatcataactgccagtgctgtaacaatgatctgatttttcttaaaaacaggttttttaatttttttcaacaatgttacctccttctcccattttcattattttaatcttatgaggctcaattccaaataatgcctgcacggcctctaatatctctgctttcacttttgtattgcccccaccttcagcgatcaccagtactcctgtcaccttcggattggtccaggataccacataaggatattttccactgtcattttcctgataaatggtctcttcctccacactgtccgcattgctgatccgatctttttccacctgccgctcactgcttccttcccaggtcagcataaccctcacctgacctgcaccatctaccgtggacagaagttcttccagcttctgctccgtctgagcttcatatttttccagatccgacagtggctcatcttctccatcagacatgccgctctccagattatcatccacagatgaattcccactcccagaagaatttcccatcatgccactgttcatctccctctctctggatatttcatcagcagtccccttcttctcaaccggaatcgcaatgactgtcagcagaagtcccaccagtaccaggatcaacagctggtctttccctggcggccagtatttttcttttatctttcctgccagtcctctgacagtttccattctgtcttccatatctccgcctgctcctcccattcatacgcactggtaaatacccggctgtccaattgtccggtcaggtgaaatatctgcagcaccggctgaagcaataagatcagcagcaacagtcccaggtaaaattttacatatctttcatagatgcctgagggaagaagattcaggatcacctgttccagtaagcagaatacagccagcgtcttcgccatatccacaaatatctgcatattgcctctcccttccatcccgactgattcttttgcaaaatgtcacttcccccatcttatgtatcacctccctgttatagccgtggtcaatgccacagtcagcaggaacagcaccagcaccatacatatggtctgaaataatagcttcatgccacagccaactcctgcaaggcagcctgtgattcgttcatctgatatgggctgcagcactgctgccagcagataataggccgccatcatgattcccagctttgccagtgggatcaggcatagaaggagcagcaccaccagtgccgccgcaccgatcccatttttaatcaacatagctgatccaagcaccatatctgtgacggaacttcccgcatccccaatccccgggatcatctcgattcctttgctgacggtcagcttccgaaatgcatccgccgccggagtcaacagtccctggatcatatgaaacgccatgactgcagccaccactcctttcagactccagcccaccaccatttccaacaattctgtcagacggcttaaccgttcctcccctgacagatgatccaccataaccagcagcacatagatctcaatacacggcagcacaaacaattccaggacccgctgaaggcctgacaccagcaacagaataaattcgtaatacacccctgccgaagccacataagaggtcatcgtcattgcaagaaaatacgccggcgccagtaccgtcataaaatttcgcatggcaagcagcacatctcttgcgatctccatactgttctggaaggacaccatcagaatcagcagaaggatcatgtagatcatggcaaaactgatctgtgatacgctccggttcttgaacacttctgcaaaatggagaagcaccgcagatgctaccgccagcaataagacatgtacccacagcctcttctgcatgaccagttcctgcagaaaaattgtcccaaaatcatgaaggatcccaccccaggaaaggatactttgcccggatgttccctgttctaccagctgccgaaagtccaccgtgcctcctagaatatcatccagaagttcctggatctcagacagatcgatctgttccatatgtatcctcccatgtatacttcttatgccgccctgtccgtcttgcgaagcaccgacagtctcagggcacattttccatcagctcaggaatccccggatggtctccagaagtgctgtcagcaccggaattcctgccgccagcactgacagcttgccaaacatctggatctgcccggcgatagtggcatacccggcatctttacacagatccgaagcaaattccgcaatatacgtgattccgataattttcaacagaattttaaaatatccggcctgcaggggcagactttcctgtacggtctgaagtccggcaagaatcattcccagcagatctgtcatctgtaaaaataccagcagactcaccgccagacagagatagattccatattccggctttaacgccttcacctgtaatgccagcagcacgcctgcaatcccgatcatagcgattcgaagcattcttatctccctcctcagagcgtaaataatttctgcatgatctgaaacagctcgtatacatagggaatgatccagaacagcacaagcagaagccctgccagactggtcagaaatgcctgttcttccctcccgctgtgtttgagtacctgtgacagtaccgataccagaattcctactgccgcaattttaaataaaaacgcttcgttcatccctatatccaccttgttcaaaatagtcatgtatccaatcctacatgatcacaagcaccaatgctgctccacccagcgctcccagatagcggtacagcttctgtcggctgtcggctgctgcttttgcctctgcaagacttaacattattttctcctgataaaactgaatggcgctcaactgcatgggcatatccatccgtcccagcagttgtccaaattcttccagatcctgctgttccttttttgtgagaaacaaaagcttttgaatttctttcagattccggctccagatctctcctgccgtctgtcctgtccgctttccaagatcttcagataccttccaaaaaaactgttgaaatggagcttttgcatcctttgccaggagctcacagaccgctggcagtgtaagcctcacacaacggatctccccctgaaggatcaataacagccgctgcaattcttccagctgtgcaactctctttcccagttctctggctgctgcatccccgaatcctaagcctcccaccaaaatcagactccatcccatgatcttcagcaaagtctctttccctcctcgttgacgataacttccacctgtccgggaagttctccattcttcagaaaaatgtagcgggaaaacaacctttctctgaccagatccttcagaaccggcttttccagaagttcccggaatgaggaaccatgaacggtcgcaaacagtacgcagccacagcgcatggcataggtaaaagcttccagatcttcctggcttccgatctcatcagctgccaccacctccggcgccatagaacggatcagcatcatcagcccctttgcttttggacaggcatccagcacatccgtacggattcccacatcatttcctggaattccaccactgcaccctgcaatctctgaccgctcatccaccagtcctacggtcatgcccggatggatcagtgttccattggaaatctgtcggatacaatcccgaagcatggttgtcttcccttttcccggcggtgatacgatcagtgtagactgtaaggctccatcctgccacaggaatggaatcacttcatctgcacatcctaagatctgatgagcgaaacgaagattcagagaagatatcgccgtgatcgtacggatatttccatcatccaccaccactcttcctgcaattccaacccggtgcccacccggaagggacagatatcctcttcgaatctcttcttcataggcatacagcgaataattaccaagataagccaatgtttcttccagctgccggcgatggatcaccgtctgtgacacatactcttttccatgactgaggatcactgccggctgttctgcccgcagacggatctcctgcaagcctgctacatccaggttcatcttttgcagcacctcccgaagaccagagggaagcagttttatcatctcttcactccgcatgttgtcccactcctaaacacatgacaattcagagccatattcgcaaaatcgcctctacgaggctgtctccgtttcactacggtcctcgctaagcagatgtcccccggacatctagcgacttttgctcatttcatggctttgaattgttacaatatatgtaaaaagggcagtgtctatgactttgtcataaacactgcccttttatgggtaactgcttcacatgcagttcaatatttcattagttctccttgcagtccttgatagagaagctgattcttcccatcttgtccttgccaaggcagacaactttgactacatcgcccagagtcagaacgtcctctacgcggttgatacgctcttttgcgatcttggaaatgtgaaccattccctctttgcccggtgcaaactcaaggaatgcgccgaactctttgatgctgacaactttaccggtaaatacctgaccctcttcaaaatcagttacgatgatattgatcagctctttcgctttctccatcttctctttgtcagtaccacagatggatacagctccgtcatcattgatatcgatcttcacaccggtctgctcaatgatcgcattgatggtcttacctctctgaccaaccacatcaccgatcttctgcggatcgatattcatctgaatgatcttcggtgcataagtaccaacttcttttctcggctcagcgattgccggcttcatacaagtatccatgatgaacagtcttgcctcacggcatcttgcgatagcaccctcaacgatcggtctggtcagtccgtggatcttgatatccatctggattgcagtaataccgtcagtcgtaccggttaccttaaagtccatatctccgaagaagtcctcaagaccctggatatcggtcagaagaacaaaatcgtcatcggtctcgccggttaccagaccacaggaaatacctgctaccatcttcttgatcggtacgcctgctgccatcagggacatacaggatgcacaggtagaagccatggaagtagatccgttggactcaaaggtctcggatacacagcggatggtatacgggaactcttcctcactcggcagtaccgggatcagagctctctcagccagtgcaccatgtccgatctcacgacgtcccggtcctctggacggcttggtctcgcctacagagtagctcgggaagttgtaatgatgcatatatctcttgcttact

SEQ ID NO: 3816 - DNA, 14228 bp, Unknown
  16S sequences of unknown bacteria
gcaataagcagtgggttgggacttgcttgtatcaggagtggtgcaagccactcctaataagctacaaagcagcattcggttgtgacatatcataaggaagggcccgcttgcggggagattccttgtgatcctgcaagtagcgaagcggattgcgaatatccgcttaacaaaatgaaaaagctttattaaaaagatttaggaggatataaagatgaacgtattagttgtcaactgcggaagctcatccctgaaattccagctgatcaactctgacacagaggcagtagctgcaaaaggactttgcgagcgtatcggactggatggaagactggtatatcagccggctggcggggaaaaggagatcaccgaggctccgatgccgacacataccgaggcaattcggatggtattggatgcactggtaaatccgaagacaggtgtattgaagagcctggatgaggtagaggcgattggtcaccgcgtactgcacggtggttctaagatcacacagtccgttgtcatcgacgatgaggttatttccgttatcgacgagtgctgcgaccttggaccgctgcacaatccggcgaacctgatgggtatccgtgcatgtatggagctgatgccgggcaagccgaacgtagcagtatttgataccgcattccatcagacaatgccggcaaaggcatatcgttatgcgatcccgaccaaattctatgagaagtatgcagtacggaagtatggtttccacggcacttctcacagctttgtttccaaggagacgatcaagttccttggcctggacaaggacaattccaaagttatcgtctgccaccttggcaacggcgcatccatcagtgcagtagagaatggaaagtgtgtagatacatctatgggtctgactccgttggagggccttgtgatgggtacccgttccggtgatctggatccggctgttgtagagtttgtctgcaagaaggagaacatcgacgtatccgagatgcttcgcatcctgaacaaagagtccggcgtaatggcactgtccaacggtctgtccagtgacttccgtgatcttgaggaagcaatggagcagggcaatgaagatgcagctctggcaattgatgcattctgctatcgtgttgcaaagtacgtaggttcttacgttgcggcaatgaacggcgtagatgcgatcacatttaccggtggtatcggcgagaatgccggtctggttcgtggaaaggtactttcctaccttggatatctcggcatcaagatggatgagaagatgaatgagaagcgcggtgagaattttgtgctgtctacagctgattctgcggtaaaggtagcggtgatcccgaccaacgaggagctggcaatctgccgcgagactgtagaactggtaaaataaaaatacttgacaaaacctgtaagggcgggtataatctataaagtgcgttaaggaggaatacattttgctggatcttaccgaagtaatcttgaacgatggaaaggtcattcaccgtgagctgacgctggagctgacttcgctgaagtatcgttttggtgattttcagattcagaaggcgacaccggtagagcttacgattgagaatatcggagagcggaagctttctgtgaacgggaaggtacatcttactgtatgcattccgtgtgcgcgctgtctggagccgacggcttccggactggacattcaattcgaaaacgagctggatgtaaatgatgaagattatattgagggctatagcctgaatgtggatcagctagttcatgatgaggcactgcttgtctggccggaaagagtactttgccggaaggactgtaaaggtctgtgcagcacctgtggacagaatctgaatcatggatcctgcagttgcagaccgacagaccttgaccccagaatggcaaagatccttgatatattcagtcaggcaggaaatggcaaagatccttgatatattcagtcaggcaggaaatggcaaaggctgatttctgccggggagcgcagtatatctgcagcttctgaatgaattatgataaattacggctttaaggaggtgttatcatgtctatctgtccgaagaataaaacttccaaagcaagaagagacaagagaagagcaaactggaaaatgactgctccgaatcttgtaaagtgcagcaagtgtggagcactgatgcttccgcacagagtctgcaaggcttgcggaacttacaacaagaaagagatcattccggtagaggattaattccgacaaggtatttcgttttctacggaaggcatgaggtctgtcgcagaaggaactgttcttctgtgacagaccttttttcgtataattttctgttgctttttagaatgatgtttagtatattaagtaatagaaaaacaggaggagacactatgagcgaaatagtccgcgttgtggtagacgcaatgggcggtgataatgcgcctggggaaattgtaaaaggagcggttgcagctgcgaacaagcatgaggatattcatttgatccttaccggattgaaggatgcggtagaaaatgaactaaaaaagtatacctatcccgccgaccggatcgaggtggtgccgacgactcaggtgattgagacggcagagccaccggttgctgcgattcgcacaaagaaggattcttcgatcgtagttggactgaccatggtacgccatggacaggcggatgcatttgtctcggccggaagcaccggtgcagtactggtcggtggacaggcgatcgtaggaagaatcaaagggattgagcgcccggcgctggctccgttgattccgactgcggacggtgtggcactgctgattgactgtggagctaatgtggatgcccgttcctctcatctggtacagtttgcaaagatgggttccatttatatggagcatgtcgtaggtgtgaaacgtcccagagtcggtattgtgaatatcggtgcagaagaagagaagggaaatgcgcttgtaaaagagaccttccctctgctgaaacagtgtgacgacattcattttacaggcagtattgaagccagggagatcccggcaggtgcctgtgatgtcgttgtctgcgaggcatttgttggcaatgtgatcctgaagctgtatgaaggtgtaggcagtgtcatgatcaggaagatcaagggcggcctgatgacagaccttcggacgaagcttggtgcactgctcatcaagccggcattgaaaaaaactctgaagtcatttgatgccagcgagtatggcggagcgccgcttcttggactgaaagggctggttgtcaagacgcacggcagtgcaaaggccattgaggtcgagcattctattgatcagtgtgtacagttcaagcagcagcacatcagcgagaagattgagaaagcaatacacaaaaatgatgagatgtaataaggagagatgtaacgatggaatttgaaaaattgcagggaattattgcagaggtattaaacgtggatgcagatgagattacgccggatactacatttgtagacgatctcggagcagattcactggatattttccagatcattatgggaattgaggaagagtttgatattgagattccgcaggagaaggcagagaagattgtttctgtcggcgatgcggcagaggcaatcaaggctgcaatcggttgaacattatcgtaaagaagagcttaaggaggggctgctgcaagagcccctctttcatctgtaaagggacctgtaaattacgtcagaaacggagaaacaatatgacagagagaaaaataaaggaactggaaaaacgaatcggatatgagttccatgacatgaagatgctgatgacagcgatgtgccacagctcttatgcaaatgagcaccgtcagagacagatccatgacaatgaacgactggaatttctcggtgatgctgtgctggaggtatcgagcagtgattttctctttcaccagtatccggatatgccggagggaaagctgacaaagctgcgtgcgagcattgtctgtgagccgacgcttgcactgtgcgcgcgggagattcatctggagcagtacctgctgctcggaaaaggagaggagcatacaggcggacggtatcgggattccattatttccgatgcgatggaggctttgatcggagctatttatcttgacggtggttttgctaatgcaaaagagtttgtggaaaaatttatcctgacggatattgagcacaagaagctcttttatgatagcaagactattctgcaggaaatcgtacagcgtgattttaaggaagaagagatccagtatgtgatcatcggcgaagaggggccggatcatgcaaagcgctttgttgtagaggtgcggatcggagagaagaaagccgggacaggaaagggaagcaccaaaaaggcagcggagcaggaggcggcttaccgcgctatcatagcactgaaagggaatcattaatttatgtatctgaaaagcatcgaagtacatggctttaaatcgtttgcaaataagatcctgtttcagttccataatggaatcacggcgatcgtcggaccaaacgggagcggaaagagcaacgttgcggatgcagtgcgctgggtactcggtgagcaaagtgcgaagcagctgcgtggcgcaagcatgcaggatgtcattttttctggaacagagctgcgtaagccgcttggctatgccgcggtgtcgatcacactggacaattcagaccacaagctggcgatcgcctatgatgaggtgacggtcacgagaagggtctatcgttccggggagagtgagtatctgattaacggtacgcaggttcgcttaaaggatatcaacgagctgttttatgatacgggtgtcggaaaagagggatactcaattatcggacagggccaggtcgagaaaatcatcagcggaaagccggaagagcgccgggagctgtttgatgaggcggccggcatcgtaaaatttaagcgccgaaaatatgcagcacagaaaaagctcgaggatgagaagcagaatcttgtgcgtgtcaacgatattctttcagagctcacaaggcagcttggaccgatggaacgccaggcagagacagcgcgcatttatttaaagaaaaaagaagagctgaagacgctggatgtcaatctgtttttgctggattatgagcggatcgcaaaggaattaaaagagaccggagaaaagcaggcacaggcgcaggaagaattagaggagacgaaggagcgctacgaaaaggcaaagacggaatatgagcagctcgaagcagagctggaggcgctcacgcagacgcttcaggagaagcgagacagtgtgacgagcggccagctgaagaagcagcagtttgagagtcaggtgcagcttctgcaagagcagatcaatacggccagagcaagtgatacacacctgaaagcccggatcgaaggaattgataaggagctggcggagaaaaccgtacaaaaggattgtgcacaatcagaacgcagtgaccggaagcaggagctggatgaggcgaatgcgaaagaacaggcagctgcagaggctctgaatgcgatgcaggagcagatcgccgggctggatcaggcggtggcacagggaaagagtcgaatcatagagatcctgaatgaccgtgcaacgatcaaaacacggatgcagcggtttgcgacgatgctggagcaggcgcagattaataaagcccgtgtgtctcaggaggcattgcgtctgcgcagtgaggagtctgagcaggcagagacaatcaaaaaagtaaaagaagaatatgaagcgatcaccggtcgaattcatacactgactgagcagagcgagaagacaaatgaacagctcagtgaaaaacaacagcttctgaccggctataatcagtcgatcgagaaggagcagacggaatatcatcgcagtgcatcccgcctggaatccttgcggaatattacggaacgctatgatggctatggcaacagcattcggcgtgtcatggagcagaaggaacgggtgccgggcatttacggtgtcgtagcggatattatcaaggtcgagaaggcatatgagatcgcgatcgagacggcgcttggcggcagcattcagaatatcgttaccgatacagaggagacggcgaagctgctgattgaatttttgaaaaagaataaatacgggagggcgaccttcctgccgctttccggaatttccggaagaggcggaatctccagtcctcaggcattgcaggagcggggagtcattggtctggcttcgacacttgtacatgcagatacaagatatcaggagctgattgcttatctgctcggaaagacggtggttgtcgataagatcgacaatgcaattgctctggcacggaaatatcgccactctttgcggattgtgacgacggatggagagctcttaagcccgggcggttcgatgagcggaggtgcgttccgcaactcaagtaatctgctcggacgtcgccgggagattgaagatctggagcggcaggtacagaagcacaaggatgcccttcagacactgcagatgcagatcgatgcgtgtcggttgcagagaaatgcactgcgagaggagatcgtgcggcaaaaggatgaactgcagaaggaatatctgaagcagaataccgcgaaaatgcgtttaaaggagcagcaggcgaagtccggggatacggcacaaggctacgagaggatccgtgcggaggcaaatgagctggacttccagatcgaggagatcagggagggacaggaaaaagaaaagctgttgcttgcacagtcagagacggaagagaaggagacggaggagcagatcgtgctccgacaggaagagctggagcaggcgcgtgaagaagaaaaagatcgtttagctgcaaatgaagagatgcatctgaagctggctggactgcggcagcaggagcagttcatccgggagacgctcaaccgtctgtcggcagagtccggacggctgttgatggaaaaggagcagtacgagcagggcatcgccgagacagcagaggatattgcggcaaagcaggcgcagattgcagagattgagcagtcaattgcggattctgcagggcacgagacagctctgcgcggcgaaattgagacgctcacacaggaaaaggagcagaaggataaggttcataagcagttctttacgacacgtgaggatctgtcagaacggatgtcgctactggatcgggagaatttccgattgaatgcacagattgagaagttaaatgagcagcaggatggccaggtcacttatatgtgggaagagtacagtctcacattcggcaccgcgaaggagctgaaaaaggaagggctggagcatgcaccgactctgaaaaaggacatcatgacgttgaaaagcgagataaaaggtcttggtaatgtcaatgtcaatgcgattgaggactataaggagctgagcgagcggcatacattccttgcggcgcagcatgaggatcttttaaaggcagaggaagcgctgattaaaatcattgaagagcttgatgagggtatgcggacacagtttaaggcacagtttgcgcggattcagaccgaattcgataaggcttttaaggagctgttcgggggtggacgcggaacactggagcttgtagaggatgaggatattctggaggccggcgtgcgtatcatcgcgcagccgccgggcaagaagctgcagaatatgatgcagctttccggaggtgagaagtcactgacagcgattgcactgctgtttgcgatccagaatctgaagccgtccccgttctgcctgctcgatgaaatcgaggcagccttagatgagagtaacgttgaccgctatgcgaactatttgcataagctgacggagaacacgcagtttattatcattacgcaccgtcgtggtacgatgacagctgcggatcgtctgtacggtatcacgatgcaggaaaagggtgtatctgcgcttgtatcggtaaatctgatcgaggatgatctggataattaggctgattcgaaggcttagctgccgggtgaatgagaatcacaagcaatcgtaagatacttgtaattataagaaacgggtggtatagtaaccatattgatttaaccgaataagcggcgaagcggctattcagttataacatatcataaggagagacccgcttgcgggaggattccttgtgatcctacaagcagcgaagcggagcgcgaatatccgctttgattgaaaccggagggaaacatcaaatggaagagaaaaaagggttttttaaacgtctggtggagggacttaccaagaccagagataacgttgtttccaaaatcgacgagattttcagtggattttccagtatcgatgatgatttttatgatgagatagaagaaattctcgtaatgggtgatattggaatcaatgcgacgacctccattattgaggatctgaagcaaaaggtaaaggatcagaatatcaaagatccggcggcctgcaagcagcttctgattgacagtatcaagcaggagatgaatgtcggcgagacggcgtatgaatttgagacacgtaaatcagttgtgctcgtgatcggcgtcaacggtgtcggaaagacgacgagtgtcggaaagctggcaggtaagctcaaggatcagggcaagaaggtcgtattggcggcggcggatacattccgtgcagcggcaggcgagcagctgacggagtgggcaaagcgcgctgatgtggatatcatcggcggccaggagggctcggatccggcctcggttgtatacgatgcgatcgcggcatcccgtgcaagagatgcagatgtgttgctcatcgatacagcagggcgccttcataataagaagaatctgatgaatgagcttggcaagatcaaccggattctcgaccgggaatatccggaggcgtttcgggagactttagtcgtactggacggaacgaccggacagaatgcactggctcaggcccgggagttcaaggaggtagcggacataaccggtatcatcctgacgaagcttgacgggacggcaaagggaggaatcgcagtggcgatccactcggagcttggcattccggtaaaatacatcggagtaggtgagacaatcgatgatctgcagaaattcaatgcagatgagtttgtcaatgcactgtttgatgtaaagacaagtgaggaaagaaactaaaagaaatgtgctttcatcagcgatatgcggatcggcacgaggagactatgaaaaaagaaagcgggagaaagaccaatggagatgttgacattagatgcatttgaagaagcagcagagtgtgtaaagcgtgtcacacgggagacaaaactgatttacagtgattacttcagtgcacagaccggcaataaagtatatctcaaggcggaaaatatgcaggtaacaggtgcctataagatccgcggtgcttatttcaagacgagcaccctgacggaggaggagcgcgcaaagggactgatcaccgcttcggccggtaaccatgcgcagggcgtagcttatgcggcaaaggcatacggatgcaaggctgttatcgttatgccggagacgacgccgctgatgaaggtgaaccgcacgaagagctacggcgcggaagttgtattgcacggtgatgtatacgatgaagcgtgtgaatatgcatatcagctggccgaggagcatggctatacatttattcatccgtttgacgatccggcagtagcgaccggacagggaacgatcgcaatggagattgtaaaggagcttccgcttgttgattacatcctcgtaccgatcggaggaggcggactggcgaccggcgtttccacccttgcaaagctgttgaatccgaaaatccgtgtgattggtgtggagccggagggcgcagcctgcatgaaggcatccctggagcgcggtgaggtgacaacgcttccgaccgtcaacacgattgccgatggtactgcggtaaagacaccgggaacaaacatcttcccatacatccagaagaatattgatgagatcattactgtgagtgacgatgagctggtcgtagctttcctcgatatggttgagaatcataagatggttgtagagaattccggcctgctgactgtggcggcgctcaagcatctgaatgtagagggaaagaagatcgtttctgttctctccggtggcaatatggatgtcatcacaatggcatccgtcgtacagcatggactgattcagagagacaggatctttaccatatcggtactgcttccggatcgtccgggcgagctcgtgcgtgtggcatctgtcatcgctgaggagcagggcaatgtcattaagcttgaacacaatcagtttgtcagcacaaatcgcaatgcggcagtagaactgacgatcacgcttgaagcatttggtaccgatcacaagatgcgcatcatcaaggcactcaaggagcacggatataatccggtacagaaggtggcaagcctgtaaagatagtaatatatttgaccggagtataaacagaacgtttaagtgaagtatattttgggtaaaattagaatgaaaagagagtccgaagaccatataaacactatgattttagtgattatgaggttttcggacttcttttttagtattttatctggtttttgggaggcttattttaatatcctgccttgcggtctacctggtgttttagtggctgtccggcttcatatgcacgcagatttccggctgtgatctgcaggatcagctcgaatgtctctttcatatgataaccgccggagatgtgcggggtgatcagagtgttcggagcatcccagagcggatgatctgccgggagcggctccggagcagtgacatcgagtgctgcaccgccgatcttatggtcgaggagcagctgcgcgagggcattgtggtcaagcagcgcgccgcgaccgacattgatcagcacggcagaggattttaaaagtgccagacggcgggcgtttaagacctgtgcagtggcatcggtacccggcaggcagagcgctacgacatcggcctttggaagctcctgttcgagggaatccatcgtatactgctcggcatagcagtccggcttgtcgcgcaaggtgcggcggatgccgacgatttcgctgtcgagggcgtgcatgcgctttgcaaattcggtaccgatattgcccatgccgattacgagtgtgcgactgttccagatactgcggacggcgccttcatcgtgccaggtatgagtctgctggttgcaatagtagcggtcgagtttcttttgcagcatcagtatcataccgatcatatgctcggagattgcaagcccataggcgccggatgcatttgtcagcaccgtctccggacgaagaatgcccggatcacagtagccgtttgctccggcgctgtttagctgcagccattccaggtttgatgcgacttttaaaaacggcagcggaagatttccgaggattacgtttgcatttgctacatcattttccgatacctctgcctccgggacataaaagaactgcgcagacggcgcgcagccctccagaagctgcttttgcgccggtgtcagatcccagaggacgaggatatgttttcttttcatatatagagatcctttcctgatatttcttttatcatagtcgctttcagaagaggtgtcaaagcaaaatagcggtattgactttctgaataacgcttgttacactgaaaaaaatgaaaaaggtgattggaaggggactgaggttatgtataaaatgccaaccgctccgggtgcacatccggacaatgtagtaaaaggggaaaaataccggatcacagtgctgacagatggattgttccggctggagtatgatgagaccggtgtctttgaggatcgcgcgacgcaggtcgtgttcaaccgtgactttgctccaacggagtttaccgtaaaggagaccgaggaggagctgcagattttcacaaggcgcgtacagatgaattataataagaagaaattcacttctaacggactgagcctgaaggtgcgcggcaatatcagcaactaccatagcgtctggcactatggagaggaaacagaggacttgggtggaacggcccgcaccctggacggtgtcaacggtgcctgcccgcttgagcatggactgatgtccagatgtggattttcggtgctggatgacagcaaatctctgattttaaaagaggatggatgggtcgagccaagaagaaagggtatcatagatatttattttttgggctatggacatgattatcttgcgtgtctggatgcgttttatcatttatgtggaaagacgccgatggtaccgcggtatgcgctcggcaactggtggagccgctactatgagtattcggagcagagctacatggaactgatgaatcgcttcgaggaggagcgggtaccgtttacggtagcggttatcgatatggactggcacatcgtgcatgtagatgagaagtatggcagcggctggactggctatacttggaataaggaactgtttccggacccggagcgtttcctttcctggctgcatgcgcgtgggatgaagacaacgttgaacgtgcatccggcggacggcgtgcagggctatgaggatgcttatccggagatggcaaagcgcatgggcgtcgacgccaagcacgaggagccggtaaactttgatatctccagtccggagtttttggatgcatactttgatgtgctgcatcatccgctggaaaagcagggagtggatttctggtggattgactggcagcagggcaaaaacagcaagatcgacggactggatccgctctggatgctgaatcactatcattatctggataatggacgggacggaaaacgtccgatgacattctcacgctatgcgggaccgggatcacatcgctatccgctcggattttccggcgataccgttacgacgtggcaatcattggattttcagccatactttaccaacagcgcatcaaacatcggttatggctggtggagccatgacattggaggacatatgcacggctaccgcaacgatgagctgatggtacgctggctgcagtatggtgtattttctccgatcaaccgtctgcacagcacgaagaatccgttctggaataaggagccgtgggagtatgatgcggtaaaacgtcaggtcatggatcatttcctgcgtctgcgtcatcagatgatcccgtatctttatacgatgaactaccgtgcttacaaagagaaccgtccgattgtgcttccgatgtactattttgcaccggaggaagaacaggcatatgcgaagaagaatcaatactggttcggtacagagctgattgtggcgccgatcacggagccgaagaagggtggcatcaatgcgggcgcagtggatgtatggctgccaaagggcacgcacatagacttctttaccggtatgatttaccgtggcggcaggacactgacgatgtaccgtgacatcagcacgattccggtgcttgcaaaggcgggcgcgatccttccgctgacagatgagatcttcggacaggatgcgacgaagaatccggcgtctctggatatcagactgtttgcgggagcagacggggcatttaccctatatgaggatgaaaatgatacagaatcctaccgagagggccgctgcgtgacgacggacatcgagctgcactgggagaaggagaaagcgattgtgctgcatgcagcgaaaggggacacttctttgattccaccaaagcgcatgtatcgtctggaactggtcggcgggacggaagcatccgttgccgtatttaagaatgaggtacagatcgaggcagagatcagctacgatgcggcaatgcatacgtatacgatcacgctttcggatgtgacaccgaccgatacgttccgcgttgcctttggcacggagcttcagcttgcatcgaatgatgtaaagagaaggatttttgatcttctgaaatgcgcggagatcgagatggatctgaaaatgactttgaacgacctgattaaccgtaccgatgatgtcacgctggttgcaggcgagatcgcggcgatggcgattgacgaggatctgaagaaagcgctgtttgagattctgctggcgtaggtaatatcataagatgatgatgccagggtcaaaaggtcaaaaagccgttcatgcttgcatgat

SEQ ID NO: 3817 - DNA, 20296 bp, Unknown
  16S sequences of unknown bacteria
cttttagatacagcacaaatttatccgtaactttggctaaaattttagcaaatcttcccattaccatttttgctctggctgagatttgcgatttttcattgacggaggtgcggatcgtgcggtattgttagaacagaaaaccaaaacacagactggagtgagattgtgtataaaatcctgattgtggaggatgacccggtcattgcctcctcactggcccgccagctgacccgctggaactacgaggcaacctatgtgcaggagtttgaccatgtcatgcaggaatttgagaaggcacagccggatctggtgctgatggacatcaccctcccctatttcagcggctattactggtgcgccgagatccggaagatcagccgggtgcccattgtattcctctcctccgccgccgacgagatgaaccaggtgatggcgctgagcatgggcgctgatgatttcatcgccaagcccttcggcatggaacttgccaccgccaagatcggggctgtgctgcggcgggcatacgatctgccggcaacttccagccagctccacgccggcggtgcggtgctggatctgcaggaggctgcgctgctgtatggcggtgaaaaactgtccctgtccaagaatgagttcctgatcctgcggattctgtttgaacacaaaaactcccctgtatcccgggaagagctgatccgggccctgtggaatgatgagagcttcatcgatgacaacactctgacggtcaacattgcccgtatccgcaaaaagctcgaggaagcagggctgcgggactttatccggacccggaaaggcctggggtatctgattgaggagaaggaacatgactgactggctgaaactgacgctgcaatatctgtaccgggtcagagggagcatctttctgcatctggcaagctgcttttccattgcgctcattgcctccctctatcatatccccatccaggccatcgggtatatgatcctgttcatctcctccatggctctgctgtttctgggtatcggctgccatcagttccggcggcggatgcagtatcttagggtggtctggaacggcgcggatgtccagctggggaccctcccgccggcccatgacgccatggagcagctctaccatgatattctccggcggacggcagaacgcagcacccgggctgaaaccgaatcggaatctgccctgcgccgctctgacacctattatacacgctggtcccatcaggtaaaaacgccgctggctgccctgcgtctgctgatccaggaagagcccatcgaccgtaccgcctgtgaaaacgagctgctgaaaaccgaacagtatgtggagatggcactccagtaccagcggctgaagtccaccgaaaatgacctgctgctcacctcctgtccgctggaccaggtggtccgcaatacagtcaaatccctggctccgctcttcatcgcccggaacctgtcgctggagatcgagaatatcagcgtttcggtgctcaccgatgaaaaatggctgcagtttgctctggaacagatcctgagcaacgccgccaaatacacccggcagggcggtgtgacgatccggctttcagacccctcccgtccggaactggtgatccaggacagcggcatcggaattcagccggaggatcttccccgggtgaccgactggggatacaccggacagaacggtcattccggcacccgctccaccggcatcggactggctctctgccgggaaaccctggagatgctggggcaccggatgcgcatcgagtccactcccggagtcggaaccagcgtatatctggacttctcccggaatgaactggagattttctgaccaacctttcaaaagtgtaagataccaggcggggattgtaagccgattcgatggcatgcgatccccgtttggtttatgatggaacatgaaaggagggttcggtcatgaaacgaaccattcggtttatgttgcgctatgtcctgctgccgctgatgattctggcggcgattcccaccgtgatgctgatccaggatgggtatgaactctatgcccaggctctggaggagtgtccggtgcaggagatggcagagcggatcaagtccaaaccggactacaccccggtggatgaactgccccagatctatctggatgcggtgatcagtgtggaagatcaccggttctattcccatccgggcgtggatctgcttgccatcggacgggctgcgttcaatgacctgcggaccctctcctttgcggaaggcggaagcaccattacccagcagctggcgaaaaatgagtactttacccaggaaaagaccctgacccgcaagattgcggaggtattcatggcgctgaagattgaacgggagctggacaaggacaccatcctgtcgctctatgtcaactccatcaacttcggaagcggctatgaaacagttgccgctgccagctggggctattttggaaaggagcccggtcagatgaatgactgggaagcaaccattctggctgggattcccaatgcaccctctgtctattcgctggatgcctctccggagctggctgcccaacggcagaagcaggtattggagcgcatgctgcgctgtgataagatcaccgaagagaaagtcgattccattctggcacacaaccgggtgccggttcaggagaaaatctatctgaatgctgtcatcattaaggagaactgactatgtcgctgcttgaagtgaaccacctcaaaaaaatctacacagcccggtacggcggcaattccgtacaggccctggcggatgtgaatttcaccatcgaaaatggcgaatacacagccatcatgggcgaatcaggcagcggaaaaaccaccctgctcaacatcattgccacactggaccgccccaccagcggcaccgtgcgtctggagggccaggaactctccaccattccggaacggcggttagcagagttccgccggaaaaatctgggctttgtattccaggatttcaacctcctggacaccttctctatccgggacaatatcctgcttccgctggtgctggaccggacggatctgcgggagatggaccgccgtctgaagatgctgtccgaacagctgggattgggagagctgctggaccactacccctatgaagtttccggcggacagaagcagcgtgcggcagtggcacgggccctgatcaccaatccacggctgattctggcagatgaaccctccggcgccctggattccaaatccaccgaaaccctgctgcgcatctttgaggggatcaaccgccagggtcagaccattctgatggtgacccattccacccgggctgccagccatgccggacgggtactgttcatcaaggacggtattgtctaccatcagctgtaccgtggaaacctgaccgtggatcagttctatcagaagatcgtggacaccctgaccctcatcaccacaggaggccggaccaatgcgtagttttctcttctatccgcggctggcagtttcggggatgcgccgcaacaagatcctctatgtcccctatctgctggctgcttccctgatggtgatgctcttctatattctctcctccatgacctggattgtcggcaattcgggcatcaagggcggtggttccatgtccgtcctgctgatgctctcctcggtggtctgcggcctgctcacagtgctgattctcttttatctcaacggctatgtgatcaagcagcgctcccgggaattcggactctattcggtactggggctgggcaaagggaacctctgtctgctgctgttctgggagattctcttctcctgcatcggcagcctcatctgcggaatccttgccggcgctgtgttcagccagctgatgtacctgctgctgctcaatatcacccgcctgccggtggacctggaaatctgggtgcccatgggcgctgtcaatatcacggtctacctcttcctggcggcctggggcatcgttctgctgcgcaatgtgatccgcatcttccgcagcgaccccatcgagatcctccggcgcacctcccagggtgagcaggagccccggtcccgctggctcattgcgctgaccggcgcctgtaccctcaccgccggctatgctctggctctgactgtacaggacccctccatggtgctggcaattttcctgccggctacgattctggttatcatcgccacctactgcatcttctcggccctcagcattgtggtgctcaaagccatgcggaaaaaccgccggttttactatcgtccggataacttcatcaatgtgtccggcatgctctaccgtatgaagcagaatgctgtgggtctggcaaacatctgcattctggcctcggctgtgctggtgaccatctcctcctgtgtctgcctctacattggcgaggaggatatgctcgattccctctatccccgggaggtcgcggtgacagtctaccgcaacaagtatgcggaaaagcccgagccggatcttctggcggcaacccaggagatagcccagtcctatgatatggagctgcttgaccccatcacagtaaccaaatgcgttgtttatgcgcatcagaatggcagtgtcatcaccagcacccatgaaacaagccagatcaaccggactctggagtaccgcctgctggatgagctcaatacagagctgggcagcagctataccctctccgaccaggaagtgctggtctgccataccaaggatttcactgagggcatgacccttcagatcgacggcagtaattttaccgttgtcacccttccggaatcggacgccctgaatacctatctgacccagaccggcgcctcttccaacccgattttctttttccgggacaaggataccctgatgcgggcccgccagatggacgaatccgccaccctgagctatgtgctctggtttgactacgacattgaggcggtcaatgccgggctgttccagcagaatctgtatgaccacctgaaccgctccgagggcaatttcggaacccgcttcaagagcgaagcccgcaccgacttttacagtatgtatggcagcctgctctttgtgggactgttcttcgtggccctcttcctcatcaccaccgtgctgatcatctactataagcagatcaccgaggggtatgaggaccgccagcgtttccggatcatgcggcaggtgggactcagtgacgcagaagtgcgcacctccatccgccggcaggtacagatggtcttcttcctgcccatcattgtggcgctggtacacattgcctttgccttccctgccctgcagaagatcatgaccctgtttgaaatgcacaacacgccgctctttatcggctgtgtggcagtttccgccctggtgttcctgggcttctataccggagtctatctcatcaccgcccggacctactaccacatcgtaacctctgccccccaatcctaattatcccaatacagcacaaagcccgcaggccgaaaggatttcctttcaaaacctgcgggctttgtgtatttcagaaacgccggatcagaacttttccggcgaaagtgccttcttaccgatgtcgtgacggtagtgcatatctgtaaagctgatattctttacagccttgtaagcggcttccagagccagttccagagtatcacctgtgcaggtgacgcccagaacccgtccgccggcagtcagatactttccatccaactgcttggtaccggcatggtataccacagcaccttcacactgaccatctgcatccaggccatggatctcatagccagtctggtacttgaccggatagccgccgctggcaaggatcacgcaggcagcgctcttatccgaccagcggatctccatgtcagccagggtctcatggtaggttgccagcatgatctccagcagatcactctccagcaggggcagtactacctgggtttcgggatcgccgaaccggcagttgtactcgatcacatagggaccattcttggtgagcatcaggccgaagtacaggcagcccttgaagggtctcccctcctgttccatagcacggatggtgggcaggaagatcttctccatgcactccgcagcgatggcgtcggtatagtgcgggttaggggcgatggttcccataccgccggtgttgagaccttcatcgttgtcgtttgcacgcttgtggtccatggaagagatcatcggcttgactgtcttggaatcagtgaaggccagaaccgaaacctctacgccctccaggaactgttccacaacaatgtggttgccgctggcgccgaatgccttgtcctccatgatagactttactgcgtcctgggcttcggcaaagttctgggcgatgatgacacccttgcccagggccagaccgtccgccttgatgacaacggggtattcgttcatcttctcgatgtaggcaactgccgcatgggcatcgtcaaaggtctcatagcgggcagtgggaatgccgtacttcttcatcaggttcttggaaaagaccttgctgccctcgaggattgccgcattggcacgggggccgaaggtggcaatgccagcctcgttgagcgcatccaccatgcccagcaccaacgggttatccggcgcaactacgacaaagtcgatgccgttatccttggagaagctcacaacacggtcgatatcggtggcactgccctccacacagatggcatctgccgcaataccgccgttgcccggcagagcatagatcgtttccgccttggggctcttcttgagcgcccggatgatggcatgttcccgtccgccggaaccaactaccagaattttcatcagacttgatcctcccctgactcagtgcttgaagtgacgggtgccggtgaacaccatggcaataccagcttcatcacaggccttgatgctgtcctcgtcccggatggaaccgcccggctgaatgatggcagtaatgccatgcttggcagccagctccacacagtcagagaacgggaagaatgcatccgaagccatgaccgaaccctcggccttgccgccggcataacggatggccagatccagcgcggttacacggttggtctgtccaggaccgacacccacagtggcgctgtcctttgccagaacaatggcgttggacttggtctgctttaccaccttccaggcgaacagcagctgctccatctcctcttccgagggagcacgcttggtgacaaccttgagctcatcacccagcagcttggtatccagctcctgaaccagcaggccgccgactaccttcttcatatccagagtaccgggctcgttgggcttggcgcagtccggcagctccatcagacggatgttcttcttcttggcaaggcgctcataggcatcctcgtcaaagccgggagcaatgatgatctccaggaagatctttgccagctcctctgcggtttccatgtccaccttgcggttcagggctacgataccgccgtagatggaaacggggtcgctgttgtaggcgttgagataggcctcgtggatggtctcgccgatgcctacgccgcagggattggtatgcttgacagctacagcgcagggcttttcagtaccgaactccttgaggatatccagtgcgccgttggcatcgttgatgttgttgtaggagagctcctttccgtggagctgcttggcggcagccagggtgttggttgccttgccgatctcccggtagaaggcgccgttctgatgcgggttctcgccgtaacgcatctgctgtaccttttcaaaggtcagggtcagctcctccgggaagggatcagcacccatctgctttctcagatagttcgagatcagggcgtcataggcagcggtgtgctcaaataccttggctgccagacggaacttggtctcacggctcagttcaccggccttgagtccctcaatgacgctgtcataatcagcggggtcaacgatcacggctacatcctgccagttcttggcggcagcacggatcatggtcgggccgccgatgtcgatgttctcgatggcctcctccagagtgacgccgtccttgaggatggtctgcttgaagggatagaggttgatggcaaccacatcaatgggggtaatgcccagcttttccagctgagccatgtgctccggattggagcgcatcgccagaataccggcatgaacagccggatgcagggtcttgacacggccatccaggcactcggggaatccggtcacatccgaaataccggtgacagcgatgccattctcctgaagagtgcgggcagtaccgccggtggaaactacttcatatcccagctcttccagctgacgggcaaactctacgatgccagtcttgtccgaaacactgagcaatgctctctttttcatattgatcgacctttcttccagtattttattgggttacttgatctctccgctgcagatcatcgccacggtacggggcaggatctcccattcggcctgctccattacccggcgctgcagcgtttcaggggtatcatccggaaggacttccacggctttctgcatgatgatctgcccgccgtcggtcacttcatttacaaaatgtacggtggcgccggtcaccttgacaccataggccagagctgcctcatgcacgtgcagtccatagaagccatctccgcagaaggatgggatcagcgacggatgcacattgacgatcttccggtcataggctctggtgaaggtgctgcccagaatgcacatgaagccggcgagaacgatcaggtcgatctcatgctcccgcatcagggcaagcagtgcctgatcatagtcctcggtggtggcatattttctccggggcaggactgcggtttcaatgccgtgctgacgggcccgctccagcgcataggccttgctgttggaggaaaccaccagcacaattctgccgttggggttcttccctgcttcctgggcatcgatcagcgcctgcaggttggtgccgccgccggataccagtaccgcgatcttcagcatatctcgatctcgctttctccacggggaaccacttcaccgatcacagtgacctgttcaccctggctgcgcaggatctccatggcacgatccgcatcctcaggagctacgatcacgcacatgccaacgcccatattgaaggtgttgaacatatcatgctcactgatgccgccggttttctgcagcagacggaagatgggcagtaccggtaccgatgccttgtcgatccgggcagtgacacggtcattgagcgcccgcgggatattctcatagaagccgccgccggtgatatgggataccgacttgaccggtacctgacgcatcagttccagcatgggcttgacatagatcttggtgggagccagcaggcattcgcccagtgtgctgcccagctcgggatagaagcgctccactgcctctttggaggtgaggtcaaagaccttgcgcaccagcgagaagccattggaatgaacgcccgaagaggacagacccaggatcacatcgccgggctgaacccgctcccggtcgatgatccgggacttgtccacaacgcccacagtgaagccagccaggtcatactcgtcctcgggatagaagccgggcatctcagcggtctcgccgccggacaggctgcagccagcctggacacagccctctgccacacccgaaacgatctctgccaccttttccggaacattcttgcccagggcaatatagtccaggaataccagcggcttggcaccgcagcagatgacatcattcacacacatggcaacacagtcgatgcccactgtgtcatgcttatccatcagaaacgcgatcttgagtttggtgccgacaccgtcggtaccggataccagcaccggcttttcgatgccggtgagatccagttcaaacataccgccgaatccgccaatggtgtccagtacaccggaagtgacggtccgggccacatgcttcttcatcagttccacagcccggtaaccagctgtaacatccacaccggctgctttatagctgtcgctgtaactgctcatattcgatctccgttctgccgttttacggctgttattttataaagtcagacttcttcgctgattttgtagcaaaacttgtccaccggcatcttctccggcacttcgatgggatacacgccagtaaagcagccagtacagaaatcacagtgggcgccttcagcaatccgcttgatgccgtctacgctcaggtagcccagcgaatccacgccgatctgcttgccgatctcctcaatggacatcttgcaggcaatgagcttgtccttgtcatcaatatcggtgccgaagtagcagggattgatgaacggcggcgaggaaacccgcatatggacttcggtggcgccggcctcccggagcatccggacgatattggcactggtggtaccacggacaatggagtcgtccaccatgatgacacgcttgcccttgacggtatctgccagaacattcagcttgatgtggacagcttccacacgctccgcctgagtgggcaggataaaggtacggcctacatagcggttcttgataaagccgatgccgtaaggaatgccgctctcccgggcataaccgagggctgcatccaggccggaatccggtacgccgatgaccacatctgcctccaccggatgctcctgagccaggatcgcaccggccttcagacgggcagcatgaacgctgacaccatcgatcaccgagtcgggacgggcagtgtaaacatattcaaagacgcacagtccggtctttccgccgcagtgggtgcggttgctgcgcaggccgttttcgtccaggatcacgatctcacccggctccacatcccgcaggaacttggcgccgatgctgtccagagcgcaggtctcggaggctactacatagccgccgtcaatggtgcccagacagagcggacggaagccctgggggtcacgggccgcaatgatcttcttgggggacatgatgaccagagagtatgcacccttgagcttggtcatggcaatttccagagcctcttcgatggacttggaagccagtcttgcccgggtgatcatataggcaatgatctccgcatcacaggtggtgtggaagatggcaccggtcatctccagctcttccttgagctcatgaccattgatcagcgcgccgttgtgagccacagccagcggccccttgatatggcgcaccatcagcggctgggcattcaggcggttggcaacgccgtcgcccgaataacggacatggccgattgccatcttgcccttccccagcgagagcagccggtcctggtcaaaaacttcatgggccagacccacatccttataagaagtaagtatgccatcatcgttgactgtaatgccgcagctctcctgaccacgatgctgcagcgcatacagtccataatatgtgctcagtgccacattggctgaagcagagccgtcatagatgccgaacagaccgcattcttcatgaattcccattgtatcctcctgcctttccgtaaaaaacgcctgatttgttatgccagtttctctgccagagcagcatccttagccagtaccttttcctccatgctgcgcttcatggcatccagcttttcagccagagccggttcgctcagcgagagcatctgtactgccaggatagcagcattttccgctccatcaatggcaacggtggcaaccggaatgccggaaggcatctgaacagtagccagaagggcatccagaccatccagagtagaggacttgatggggattccgatgaccggaagggtagtgtgtgcagccagtacgcctgccagatgggcagccttgccagctgcggcaatgataacgccaaagccgttttcccgggcgttcttggagaaggcagctgcctgctccggagtgcgatgggccgacatgacatgtgcctcaacttccacaccgaactcccgcagtttgctgattgcgccctgaacaaccggcagatcgctgtcactgcccatgatcactgcaacttttttcatcatgttgtttctccttttgtttttgttacctgttttccctgtttttccattgctgcaatcgaccggatttacctgtttccggtacaaataacaaaggccatggcgcactacgccacggcctgttatcattacagcagattggacagcattcccgggaaggctgcactccggccctgaccgaatccacaattgtacattccgattccgatcattgccgaaattcgctcccttctcagaaactctattcttattttacatgatttttgcacacatttcaatctcagggtcagcaaacaccaaagaattgtagaggtccgcaatactcaataaaaatttctgtcaggattcgtcagtttttaccaatagacaatttatgccttcggctttgcatctgtatccacaacttccttcagcgaagctgccagacctgcaatggactggatattgctggggataatcagcttggttgcccgaccatccgcagcctttgcaaaggcttccaggctcttgagagtcagcacctgctcggtgggagcggcttcattcatgaccttgatactctcagccagtgcctgctgtaccatcttgatcgcctcagcttcaccctgggcctcacggatcttctgctcacgcacggcgtcagcacgcaggattgcggcttccttctcagcttctgccttcaggatctccgactccttgttaccttccgctaccaggatctggctctgcttctcaccttccgcacgcaggatcgactcacgcttttcacgctcagccttcatctggcgctccatggcatcctggatctcactgggcggaataatgttcttgagctcaacccggttgaccttgatgccccacttgtcagtggcaacatccagagtggatgtgatcttgctgttgatgacatcacgggaggtcagggtgtggtccagttccatctcaccgatgatgttacgcagggtggtggcagtcagattctcgattgccgaaatgggacgctctacgccataggtatagagcttgggatcggtgatctggaagaacacaacggtatcgatctgcatggtgacattatcacgggtgataacagcctggggctggaagtccactacctgctccttgaggctgacacgcttggcaacccgctcgatgaacgggagcttgaagtgcaggccattttcccaggtggtgctgtaagagcccagacgctccaccacatactcggctgcctgcggcacaatgactacattgcgtgccactacaacagcgatcaggacaagaatgatcagaaacataatcaattgcggcataaataaaatccctccatattctttattgactgtccggcaggaacaatcaatagatcttctccacaatcagtttgacgccctggatctctttgatcaggacttcttctccgacatcgatcggttcgccgttctcgctgcgggcgctccaatccatatcttccaccataacccgtccctgggactgaagattatcgatcggctggatcaccttggcaacctttccgatcagcgccctggaattggtttcggttttctggaccgtgagcttcttcttgacaaacggacgggtaattgccagcaccagaatggacaccacagtaaacaccgcaaactgcgctgtaaagtccatgccgatgatcgcgggcaccattgcagccagagcgcctaccgcaaaccagatggacaccagctgcaccgtgttcgcctctacgattgccagaatgatcgccgccgccagccacagaaaagccgacatcatttctccaaagttcattcaatcacctctttgacggctttacagaattctgtcgaaaaatgcatttcgacatttacagcatactacatccggcctgaacttgcaattcctttctgtatcaaatctgtatccaatccatgaaaaatcaggaaatccccctgaaaattgtaaacaggcaatctgtccagcatccgggggtggttcccagggccgttccggtggaaaatctggcagcgttcttccagttcatagaaatttcatgaattatctcctgctttatagtacaatttattgcagaactgagttaaaatatctgtctgaaacgatcaattttctgtgagggctgcttttgtttggatatatccgtgtctacaaaccggacatgaaaatcagtgagtatgaaacatacaaggccatctactgcgggctttgccgggaactgggccgggaatacggtccggctgcccggatgaccctgagctttgattttaccttccttgccgcactgatgatggctctggcggaggacaagccggtttacacccggcgcaaatgtgccgccaatcccctgaaaagctgcatcatggcagatctcggagaaatccagagccgctgctgtgactatgctgtgctgatgctctggtacaagctggaggatgatctcaaggatcacgggactgccagccggctccgggcggtggcactctacccggcggcacgcctggcctatcagaaggcagccggacgccaaccggagctggatcagctcatcggggacaacatgcgcctgcaggctgaaactgaagccgtcggcaccgcctccgcggaccttgccagcgaacccaccgcacgggtcctgagcggactgctctctaccctgtcggacgacccgatgcagaagcgggtgctggagcggctggggtacctgatggggcggtatgtctatctctgcgacgccctggacgatctggaggacgaccgggaaaagggcaactacaatcccttcctggctgaccagtccgccggcccggagcagatcgaaaatgccatcggtaccctgtatctgaccattgccgaagcagcaaaaacctttgagctgctggaactcaaacgctttgaaccgatccttgccaatattctctatcagggaatgaaggaaacggttgattccatagtatccaagaaggagaaaacaatatgactgatccctacaaagttctgggagtatcccccaatgccagtgatgatgagatcaaggcggcataccggcagctggcgaaaaaatatcacccggataactatgccaacaaccctctggctgacctggcagaggaaaaaatgcgggagatcaatgaagcctacgacatgatccagtcgatgcgggtatcccggggcaatggaggcggcaattcctcctctgccggctacaacagctataacaacagctacaatgccggggaattcggtgacatccgccggctcatcaacctcaacaagatcattgaggccgacgagctgctggaaggcattccccagagcggacgcaatgcggagtggcattatctcaagggtgtgatccattacaagcgcggctggctggaggaggccatgaagcatttccagactgccaaccgcatggaccccaacaatatggagtataccgctgcgctcaatcagatgatgtggcagcgccagaatgcccgtccggccggcgggtaccgcacctacacctatggcggaaatcccggctgcagctcctgtgacctctgcacctccctgatctgcgctgactgctgctgtgaatgcatgggcggcgacctcatccgctgctgctgacaggaggcgctgtcgatgtccaaaagcaaacagattgccgcaggcggaattgcctcttccctctgcctgctgctgatgtttctcaccggagtgttcccctttgccacctatgccctgcctgccatggcggggacactgctggtggtggtcgtactggaactgaaccgggccacagcggtcatggtctatgtgagtgtatcgctgctcagcctgtttatcgctccggacaaggaagcggcgctggtttttatcttcttcttcggatactatcctatcctcaaggggctgatcgagcagatccgtctgcgcccggtggaactggctgtgaagtatatcctgttcaacggcatgatggtgctggtatacttcctgatgattcagttcctgggcatgcagtatgtagctgatgaaatgatggaatacggaccgtatgggctttacttcctgctgggtgcggggaacttcatgttcttttattatgacaaagccctgaccgggctcatcagtgcctatatctatcagttccggccccggtatatcggaaaatggaagcatgaaaaaagcctttagccactcagaagctaaaggcttttttgcccggccccggatctgacgggcagacggttcccggaacaaaagcgaaatgcaccatatgccgcccagtgcgaccagtgcatagacaacacggctgatcatggcgtcggagccgccgaacaggtaggccaccagatccaactggaacaaggctacgctgccccagttcagggcgccgatgataacaagcagcagggaaattctgtcgatcatcatattcttcctcctctctgtctggcttcctttttagcatggacggttttctttcctgtatacagcggaagatatttccgttcccggcacagggaaattttcatcggcaggtttctttacctttctcgggaaatatgatataatatatactacataagtatctcatttcataaacagttgttttcagttaccaaccaggccccaggtttttatgtatattcagaacattcaagatacaggaggaattcaatatggcagtgaaaaatgaaaagagtgaatataccatgtatcgcggcagacctctggtccgcagtggtcgcaccatctattatggtgatcccggtcaggattatgtggtactgatgaatatcgtatccactgtaaaggacggcgatgaggaactggctaacaagatcgttgtccagtgcatggcaactgaccccaccatcaaccccaaggaccgcattgtaaagcgtgcggaacgggaaggcctctaccctgccctgcagatcgcatccatctggctggaccgcaacaactgatcccatcgtatatgagaaaatccctctggaagatttccagagggatttttttgcgtcaggaatgtctggggccgccgcgcagtccgaaactcaccgaaagggcctgatcgatccggctcattgccgtatcatccaggctgcccatcttttcccgcagacgctgtttatctatggtacggatctgctccagcagcaccaccgaatcccgggaaaggccgcagcctccggacggaagatcgatatgggtgggcagtttggctttatcctgccggctggtgatggcagcagcgatcacagtgggactgtaacggttgcccacatcgttctgcacaatcagtaccggacggacaccgccctgctccgatcccaccaccgggctgagatccgcatagtatatttcacctcgttttacagtcacgctccatcacgctccgaattttttcatttccgccgctgataccggcttacagctatagcattccccgggacctggcagtctaatcatctgctttggccccggacggagaaaaccggtcatcaccggcaggatcgtgtggattggtaccgcagtgcggtacactgtcatcttatgcgtctgtttccggctcagtgcgtccgcctgtcccgcctcagtcagcttttcatgctgaaaatcatcaccgtccgtgccaggctcccggattctgcaccctttcccgataaaaataaatatcccctgcaaacacaggggatatccgggatctgatttagttaaaacggttccggtgcagggcggcgcagacggatctcccacaccggggtaccctccaccagcctgctggcgccatccggacagaaaccctggctgtgatagaaacccagggcggccccgttgggctccagacaccagagcaccaccggctgattccgggttttcctcagcacttcgcccatcagacggctgccgatcccctcccactggaagcagggatctatgtaaagctcatatacttcacagcagtccaggcagtcctgatcccgtgccggaccgaaggtgaggactcctttgaggatgccatccccctcccacaccagcgccgcagacgggtcaacttcctgtgcggtgtcatggacattgagcagatggaaggagtaaaaatcgtcctgaaaaatcggacggtaagccatgcgtttggcaaagaccaggatctccgcaatgcgccaccgatccgcttccacagccgggcgtaccactgtacttcctcacatccggctggtcagggctgtgacaaggcggatgaaatcaaccttgacccggtctgcggtctccttgacctcttcgtgggagagcagtccctcgcccatacccgcagccaggttggtaatgcaggagataccgcagacccgcagaccgcagtgccgtgccaccagcacttccggcacagtggacatacccaccgcatcggcgccgatggtgcgcagatagcggatctcagccggagtctcatagttgggaccggtgagccaggcatagacgcccttctgcagcggaatatccagctccgcagccagattttcagccagagtgcggtattcccggtcataggcctcggtcatatcaaagaagcgctcaccgaacgcctccagattttcgccgatcagcgggttttctccggtgaggttgaggtggtcctcaatgagcatcagattgcccggacggaatccggtgttgatgccgccggcagcattggtgacgatcagggttccaatccccagcagcttcatcacacgcaccggcagggtcacctgcttgaggtcatagccctcataatagtggaagcgtccctgcatgcagagaacttcccgtccttccagctttcccactacaaactgtcccttgtgtccggcgacagtggataccgggaagtgcgggatgtccccatagggaatctgtatcgcatcggtcagctgttcggcaaggtctcccaggcccgaacccagtgtaatggcaatctcaggcttgcgcccgttcagcttctccttgatataggcagccgcctcctgtacctgacgggtatattccgcagcagaaaagttcatagtatccaactccttttgttttctggttaccatgatataataccgcggctgatcccgtcaagcgtttccggcaaaatccgcattactgttcccatgcttcccgcagcgattccacccactccaccagagccagcttgggcttgtagaccgaagtctgccccagctccaggatctcctgttccaccaccgcggcctgtccctccacagcggcatcaatgcacatgggcgggtaggccacacaccaccagttatgcccttccccgctccccagggtgatccgcaatgcctggtatcgcccggcaggcatgctgaaggtactgccatcccgctcatactcccgggtggtgaaatacatctcggtcagctccgctttggcctgatagggcatgcccgcttctgccagaacttcgttggctgtttcctcaatgtggtccatctccccttccagacaggcgatggtcccctccagagtcccgtcgccgctgaaatcctgattgatcgcctccagcacggcatcccgcacctgcagcttgacagcctggtcggcctcctgatccgaatctgccagaatatgaatgcgcagcacctcctgccggatctcggtacagtcccgcataaagcctgtcaccgaggaaacccccagcgtgataaccaacccgatcagagctgccagctccagccggccgatatggattttcacaacgaaaaactcccttcaaaaagaaaaatcagtgcatccattccggtaatgaataccagaagtatgcactgatcaatggaaattattcagtgatggtggcgccatattccaccggactgcaccggcgggtataatagcccagctttttcagagtgcgggaggcgttttccagctgttcgctgcgggggaagatcccgaataccgcagacccggaaccggtcatccggcttccggctgcgcccgattccagcatgatctgccggatctcctgcacctccgggaggtcagcggcctcctccagggcgttatagagcagcttgcacactgccgacaggtcatcggcgttgatcgccttcttgatcagcggcgtaccgggaatcccgtacggcttgccagaggcatcatagcgggcaaaacactccgctgtgggcactcctttcgccggcttggcaatcagaatacggcagtcgtccaggggctccagtgcctc

SEQ ID NO: 3818 - DNA, 30789 bp, Unknown
  16S sequences of unknown bacteria
gcctgctgacaaactgcggattatccggagcctgaaacgtaccggtgaagtggcggcgatgaccggggacggcgtaaacgattcgccggccttaaaggcggcggatatcggcgtagcgatggggattaacggaaccgatgtggcgaaggacgcttctgatatgattcttctggacgatagttttactacgatcgcttacgcgattaaggaaggacgccgcgtttaccgaaatattcaaaaagtaatccagtttttgctggtaggaaatatcgcggagatcctgacgctatttactgctacgctgtttaactgggacgccccgctgctggcagtccatattttatgggtgaatcttgctaccgcgacgctgcctgcactggcgctgggggtcgatcccgccagtaagaatattatgaagcaccagccggtaaagtccggaactctgttcgaaaaagacctggtgcaccgcgtgattacccagggggtctttgtggcggcgatgacgatctgcgcttactggatcggtgcggagatgagcggtcatacggcaggtcagacaatggcgttctgcgtgctggcgctctcacagatgctgcgcgctttcaatcagcgttcgaatacggagccgatctgggtcagagaagaaggcgtcaatccttggctgattctctctttcgccgcatctgcgctgctgatgggctgcatcttatttattccggctctgcagagcgcatttcgtcttaccctgctgaacacggcgcagtggtcagtcgtaatcggactgtccctcctgtccatcgttcaggtggaagtcgtgaaactcgtgaaaaaaatcggtcaaaaggccggcaggccggccgaacgatgagaaaaaattccatataactgcaggatagtttctgtgattttacagaaaattacagaaaaatcgtcgggaagaaacggcgggcagaatgcttgccgtttctttcttttttgggaatttttattacataaggtatttttgtttcttagttttttattaaaatttttttaacagttcctatttatttcttaagaattcttcaattctgttatgaagtcggtttttgtcaaaaaagcgtgttacaatcaatcggtaatatcttctttgcaggctgatgatataggatgcagggataaagatcagtaaggagggatagcgatgcgtctgcagcaaaagattctcatcgtcgatgatgatgcggatatcagagaggttcttaatattcagctgacgaacgagggttatacggtatttgagtcagcgaacggaatggaggcggtcgaagcggtagcgcataattcggatatcgatctggtgattctcgatgtgatgatgccgggaatgtccggtgtggagacgtgcacggaaatccggaagctttcctgtgttcctgttctgtttctcaccgcaaaatcaaaggagagcgataaagcagaggcttacgataacggaggagacgactatctggtaaagcccttctccaaggcggaactgatgatgaaagtgaaatcgctgctgcgccgttatgtcgtatatcggggaaagcaggatggaagcgcttcggagcagcaggagatgatacagatccaggatatcctcgtaagccgggaccggcgcgttctggtcagagacgggcggccgcttaatatcaccggtacggagtatcagatttttatgtatctgctggatcacagaggcagagcctgcagcgcgcaggaaatttacgagagtgtctggaaggagaagtttcttccctcttcggcgggaacgatcatggtgcatattttaaatctgagaaagaagctggagttggatccgaataatcctgtcatcatccgaacgatctggggaaagggctatcagatcgatgaagcataaagagaaaaaacgcattctgcgtctgcggtacaaactgttctttacactggtgctgggagtgcttctggcgataactctctttcttctggtacagtcctcgggcaccggtctgatcgagaagtactatatggatccgacttctgtcgaggaacggctgatgtattatgagaattccctggacgcttacgtcacggcaaacgagatttcttcccaggacactgcgatgctgtcgcagtgggtcaaggctcagggcactgtttatctgattctctatgacgacgatacgatcatctacgaatccggctggtgggatgaaaaggaagtcatgaagaatgaagagacggaggaaagcgagacagacgacaatctgttcggtgtgtcggccgtcctgtcagaagacgatatcggcgcggatccggacgagccggaagaagggactcccggcggagcacaggaagaagtctcttctgtaaacggcgaggtttctcgggggacacaggaggcctcggggcctgccggcgaagaacaggaggatgcggccgacggacagatcggtttggcggcgagtcaggagctggaatccacgggagaaacctccgcggacagttcttacagtatggctgtctcatatgatatcgcttttgcggacggggtctacggagccagtatcatcgagttttctgagatgcagtggtatgatctggtggatattctttcttggtgtgtatttattctgacgcttttcatcgtgctgcttctttacaacaggtatatcacgaagcggattatccggctttcaaaagaggtttccgtcataaccgacggaaactgggaggcagcgattcatcacaggggaaacgatgaaatctctcagctgtcagaaggcgtggacgatctgcggaacgctatggcgcagcattttgaaagagaaaaagaggcgtggaatgtgaacagcgaactgatcacatcgatgtctcacgatatccgcacgcctctcacttcgctgatcggctatctggatattctggatggcgaggtgtatccgtcggaggatgactgccggcgctatgtaaagagctgccgccagaaggcgctgcagctcaaggatctttcggataagatgtttcagtattttctcgtattcggaaatgattccatcgagatgagcgtcgaaccgtatgatgcggatattctccttcagcagatttttgcggagcagatttttcagctgaacagcgcgggattttccgtaaaaacggattttacgaagcgcgtcggaagaatccgggcggatgtccagtacatcaaccggctgtttgacaatctgttttccaatgtgcgcaaatatgcggctccaaagagcgaggtcgttctgcgtaccaggatggcaggctctgaaatattgatcagcatcggaaatgaaatccgcacggacggagctctggtggaaagcacaaatatcggattgaagacctgtcagaaaatcgtggaacagatgaaggggcgttttcggatcaatcggtcggaaacttatttcgaggttcgcatcgtttttccgatcgagccggaggaagaaaaaataaccaaaaatttacaaatggggggggtatgaagacatgaagaatgtgttggaatatctggaaaattcggctgcgctatgcgcagagaagacggcggtccgtgatccggaggaaagctatagttaccgggaactgacggatcgtgccagaagaatcggcagcgcgctgtcggaggttttttccggcgccgcaggaaaaaataacaggggcctgccaggaaaaccggcggtagtctatatggagaagtcggtcagggctctgacttcttttatgggaatcgtatatgcgggccgcttttatacttatatcagtcccgaacagccggctgcgcggattcgtcagattctggaggttctgcagcccgactgcgtgattgcggacagcgagtcggcagacgacggaaagcttgaggaagcgggattttccggcagagtcctcgattatgacgaattatgccgggcggagatctcagcggaagtgctggcggaggtgagggagcgaagctgcgataccgatccgctgtattgcaatttcacttcaggatctacaggagtacccaagggggttcttgtctctcaccgttccgtcatcgattttatcggtgtttttccgaatttgttcggaatcaccggagaggatgtcatcggaaatcaggcgccttttgatttcgacgtttccgttaaggacatctattcgtcttttcgcatgggcgctacgctggtgatcataccgaagcggtatttctccattccggttcagcttatcgattatctgtgcgagcagggtgtcacgactctgatctgggcggtttccgccctgtgcatggtgacacagctgaaaggatttacttaccgggtacccgataagataaataaagtcctgttcagcggggaggctatgccggtgaaacatctgaacctgtggagaaagcatcttccgcgggcgcagtatgtcaatctgtacggtcctacggaaatcacctgcaactgcacgtattaccggattatgcgggaattcggaccggaagagaagattccggcgggccggccttttccgaacgaaaaagtgtttctgctcagtatcggatgggacggcgaagtgccggatgccgaagtcctcacggaagaagccggttttgggggtgcggaaacagagatcacaaaaccgggagacatcggtgagatctgtgtagcgggtacggcgctggctctgggatattaccggaatccggaacagacggcaaaggtattcgtgcagaatcctctgaaccgggattatccggaacggatctaccgcaccggagacctggggttctatgattcggacggaaatctgtgttttgcgggccggagggattttcagatcaaacatatgggacaccgcatcgagctggaggaaatcgagctgattctcaatggatatgaagagatcagccgggcggtctgtctcttcctcgaggagaaggacaggctgatcgcctgttattccggagacatcgacggcaagacgattcgctccagaatgcagaagacgatgccgatgcacatgattcctcaggtattccgtcagtttccgcagcttccgatgacggccaacggaaagatcgaccgcagagaattgaaagcgcggtatctgaaataaaggcggaaaagatgatgaaaatcagaaacagaatcgctgacaaatctgccggacagcaggcagaataaatcgagggggcagagatgaacgaagaagtgaaaaagcaggaattctggaattaccagacgccattttatatatttgatacggatgttcttgcggagcgtatccggaaaatacgttctgtcataggttcgagagcggaagtctgttacgctatgaaagcgaatccttttctgacgggggctctcactcagctgacggattcttttgaagtgtgttcgccgggagaattccgcatctgtgagagggcgggtgttccgatggaaaaaatcataatgtccggcgtatacaagaatcctgaggatatcttccgtgcggtgaagacttatgaaggaaagggggcctatacggcggaatcgccggtgcagtgggagctcctcaaacgatgttccgaagaatgcggcgtcgtgctccgcgttcttctgcgcctcagtgcggggagccagttcggcatggacgaagaggccatccggaagatcgtctcggagcggatgagtgcaccgaatctggagatcgaaggactgcagctcttttcggggacacagaaaaagtcttctaaaaagtacggcagagagctttcgaggctgaacggattccgtatagaattggagaaggaatacggatggaaggcctcgcggctggagtacggaccgggcctgcctgtggcgtattttgaggaggaagaagactcaggggaagagctgctgactctgctggcatcggaactcgatgccgtggattttgacggcagagtcgtcctggagatggggcggtttatcgccgcttcctgcggaagctacgtcaccagcgttgcggatctgaagatcagtgaagggcagggttactgcatcgtggacggcggaatccatcacgtgaattattacggtcagataatggcgatgaagaagccgccgatccggtatctgagacagatggcggcggagacagcgatctccggtgatgttgcagcaaaaaagccggagtgtcaggcggaaaattcgtggaccgtctgcggttccctctgcacgatgaacgacgtcctggtaaaacagtatcctttaagcggcccggctataggggacaggcttgtctttgagaggaccggcgcttattcggtgaccgaaggaatttctctttttctgagccgtccgctgccgcaggttctgctgtattccgaaaaagagggtttccgggttcttcgaaaaagtctgccgacggacgtgctgaattacgattcggcggcgccggaaaaacaggccgcagactgatctgaagagacggcggaagcaccgcgccggggaagatcccggcgtatttgaatcgactgtttattttgaaagtgtttagagaaaagtgaggaaatgcaagatggaaaaactgattgaaatgttagaagacttaaatccggatgtggatttttcaacagaggagaaactgatcgacggaggtctgctggattctatggcgattctttcgctggtatcggatctggaggaggaatttgacgtggaaatcacgccggtggaactggtaccggccaatttcaattctgcagccgctatgtggaatatgatccagcgccttcaggagaattaatttatcggggatgaaagattgattgacagacaggggaagttagaccatgagttacagttccattctttatatttgtatgtttcttcctgccgtaactctgctgtatggaatcatgccgcagcgccatcggtggaaagttctgctcgccgttagctacattttcttttatctgctcagcggaaaactggtgatctatctgattgcatccacgttttccatccatcagcttggcctgtggctggatcacagcaggaggatttatgatctcagccgcaaagacgcgcaggcggacgagaaggctgtgctgaaggccgcttataccaaaaagaagcggggaattctgctgtttgccgttcttctgcatatcggtatgctgctgtttctgaagtatttcgacttcttcggacagaatgcaaatcagctgctgtcgctgctgaatctgccggaggtcatcccgacgctgaaattagcggtgccgctgggaatttccttctatacgatgcaggcggtctcttatataaccgatgtatatcacggaaagatcgaagcggacgacaatctgggaagactggcgctctatatgtccttttttccgattatcatggaggggccgatctgccggtattccgagactgccgtcagcctttatgaaggccgtccgctgctgtataaaaatgcggcttacggttatcagcggattatctgggggcttttcaagaagatggtcatcgccgaccgtctgaatccgctggtggctaaaatctttgataattacggggattatggcggcgcaatcgtcgttgtgggtgcggtgctgtacacatttcagctgtacgcggatttttccggctgtatcgatatcactatcggtgcgggagagattttcggcgtaaaaattccggaaaatttccgacagccgtttttctccaggacggcttccgaattctggcgccgctggcatatcacgctgggcgcctggtttaaggattacgttttttatccgatttctctgacgaaattcgtcaaaaatctcagcaagaagggcaaaaatcgtttcggcaaacacgccggtcagctgatcacttcggctttcgctctgtttggtgtctggttttgcaacggactgtggcacggaaccggctggaattatattttcttcggattatattatttcgttctgatcttcgctgcgagcgctttcgaacctctgatcgaaagagggacagcccgactgggaatccgccgcgacggcgtctgttatcagatttttcagcgtacaaagctactgatcatcgtctttatcggcgagatgtttttccgtgcggcgacacttaccgcaggaatggagatgttcggaaaaattttcacagatttccgcggatcccagctgatcgacggtactctcttgaaactgggaatttccgaggcggattacggagcggtatttttcggatttctagtagttctggcggtaggcgtgattcacgaaaagggaatttcgatccgtgacaaagtggcgggatttcgtctggcgccgcgttggagtatctactacggagcgattcttctggtgattatcctcggcgcttacggaccgggatatcggccggtagatctgatttatgcgggattttaagaagataacagaattttaaggggggaaaaagatgtcgacgtatctgaaaaaagggattcgcccggcggtatttattattgttctgcttcttcttctgcaggggctttcctatttttttatcaccagaggaaacggcaataaaaatgcgctgtctgtcatgaaacagccggaaaattccatcgattatctcgtcatcggcgacagcgaaagctattccagcatctctccgatggagatatggatcaaacacggatttgcgggatataactgcggtgtggtggggcagcaggcgcagtatacatattatcttctggaagaggtgcttcagaaacaggatccccaggtagtgatcctggagaccaacgaactcttccgcagagcgggaggcgctacggagctggaatctgcggcggaaaatctggcggcgaaatattttcctctgctccagtatcacaacggctggaaacggatcagtttccgcgagattcaggcatttaagccgtttgaaaagactactgcctcttccgatgtgatgaaaggatttcattaccgtcctcaggtaaaaccttacaccgggggcgagtatatgaaaaagacgaaggaagtaaaggaaatagaaggcatcgccatgcactatctgaaaaagatgacaaaactgtgcagggagaacggcgcggagctgattttgatcagcgtgccgtcaccggataactggagttatcagaagcacaatgcggtagagaattatgccagagagaatgatgtgacttatctggatctgaatttgtcggtagaagaactggggatcgactggacagcagatactacagaccggggcgatcatctcagttttaccggcgccagaaaggttaccgattatctgggcgactatctgtctgagaatttccagctcaaggaccggcgttccgaaccggagtacgccgtatggaatcattcggtgaaaaattatctcaagcgtacgaagcagacggagcggcaggaggaggccgagaagatgattcaaagcggtggaaccgcacagtcctctgtgcgctgagggatcgctcgtaagtcagagtaaaaaacgatatgtgattgagacaaaatagaaaaggggacttcagagaagaccgcgcaaaatgcgtctttttctgaagtcccttttttatggccttatcgtttttcgttttctttgccgtttttcattttatcatctgcagcggcgggggccgcttccatatccttcggaaggatcagatttaagaggattgagaccaggaataccacggcgacacagttttctgcgaagactgtctgcacgatctgcggaaagactgcgaagatctcaggaacctgagtaaaaccgataccgatacttaaagagagcgcggcgatagtgatgttgcgctgactgaaaccgcatcggctgaccatctgaagaccgctgacgacgatggtgccgaacatcatgatcgtacagccgcccagtacagcctccggcagggttgccagcactgtgccgaagatcggaaagaagccggcgagaatcataatcgctgcgccggtagcgatggtaaagcggtttacgacttttgtcatcgctaccagtcccacgttttggctgaaagaggtgatcggcatacatccgaagacggaagacagcgcgctgatgaatccatcgcaggcgatagatccggaaatctctttctgttcggcatttctccccagagcggtagccgccagcgcggaggtgtcgccgatagtttctgtggcggataccagaaaaatcaatgtgacagagacgatcgcgttgagattgaattccggcgtaaatggcataagggacggaaacgctatgacagaagtttccttcagcgcggaaaagtcaatcatccccataaaaatagccaaaatataaccgacgatcagtccgaaaaggacggagagctgcttccagtaagacttcgcaaagatgttgaacaggatgcagcacagcaatgtcacggttccgaggatcaggttctgaggggagccgaatgtcgcgctgccgctgccgccgccgaaggataccgcgcccacggagagcagggagaagccgatggcggtgacgacgctggccgcgacaataggagcgatgatctttgtccagtatttggcgaaaagtcccagaaaaccttcgattaagccgccgacgatgactgcgcccatgatcgcgctgtagccgtaagcaggcccgatatagcagcagaccgagacaaaggtaaagctgatgcccatgacgatcggcagtccggagccgatgcgccacagagggaacagctggaccagtgtaccgatgcctgcgataatcatcgcgctttggattagcttcccgctctggtcgctgctcaggccgctgactccggctacgatgagtatcggagcgatatttgccacaaacatggccaggatgtgctgaagaccgaaagggatcgcctttgccgcgggaacccggccgtccagacggtaaatattgctgatatctgcgctctttgttttcatgcggacaggtcctctcatttctgttctctgaatgtgatcgtttgtgtttccgcattcatctcgtcaatgatggccagagattctaactgatatccgagattgcggatgatctgaccgccgggctggaaacctttttccacggcgatgccgatgccttccagcgccgcgccggcctggccgacaatggagatcagcccctgcagcgcgcagccgttggccagaaaatcgtcgatgatgagaacgtggtccgacggggtgagaagacgcttggatacgatgatattattttttgttttatgagtaaaggattccacctcagcggtgagtacgtcaccgtcgatatttacgctcctggatttttttgcgaaaacaaccgggacgtcaaaatgcacagccgccagacaggcgataccgattcccgacgcttcgatggtgagaattttgctgacgggcctgtccgcaaagcggcgtttaaattcagcgcccatctgatcaaagagatgaatatccatctgatggttcagaaaagtatccactttcaacacatttccttctttgatgacgccgtccttttgaattcgttcctctaaaaagttcatgatcattcctccgactatattgctgcggctatggcgtaaaatataaatatggcgccggtgaatctgactttatcgggagagcgggattcatttccggatttttgttaagagaatgctgctctctccgaaaacccggaggagcagatattctccggcgctgttctgaaatcgtccgcacactctgatcaggtgaattcgccagagtctaacttcgattcggatgaaattagattatcaaatttcggagattcttacaacaatagatacgagatttctttgcctgaaaaaccacctgtttgtctctgtaaatacattgaaagcaaatatttatcgtgacaatataattctttacatactattcgcgcgcacgttataatgatgtcgaagattgactttgcggcactgacgcagtaaagaccccgctgcgccgaatcctctcccgtaccggagatatgggaaaaacaaagaacgcgccgccgtgaaatcgaagctgcggatgcagccgaagcctgtaaaaaaacgccgtgtctcagcgggcagggcagaaaaggagagagatatgaaggaaaaaagaagttcggggatggtaaaatcgctgtcaaaatggaatttgctgtctatcggtatcggagcggtaatcggctggtcctgggtgatttacgccgggtactggagcgttacgccgggtacgctgggcggaattctcgcctttgtcgtagctgcgctgctctgcagtctggtggggctcgtctatgcggaattgacctcggcatttccgaagatcggggtggatgtcagcatcacttttctggggctgggtcagataccttcgattatcgtcagctggtgtgttctgtatctgtggatgagctttatcctcgtagaggcgattatgtttccgattattctcggaaatctgggaattcaggtgccggtgttcggggaaatgttttcggtgctgggcacgccggtgatgctgtccaatgttctggtagccgttctttttaatgcgttcttcgctctgatcaattaccggggcgtaaaattgtccggctgggtgcagacagcggcggtggctgttctgactttggccgcgctgtttttctgcggatcggggatcgctatgggcgacagctccaacgcacagcctctctttaccgacgccgcgggtctgacgacgattatgctgatggtgccgggatttttaagcggttttaacgcgattccccaggcggtggaggagacaaatgtttcgcccaagaccgtgggaagaatggttctgtataccgtgtggggctccgcactgttttatattctcatcatcgtaggtctggctttcgctatgccggaatccgaccgggcgggagacggccttgtggtggttcaggcggtgagtcagctcttcggcggttcgaaaattgcggcgggcttcgtgacatttgcctctttgctgggaatgctcactacatggaatgcggcatatatcgccggcagccgttttatgtacggcctggccagagcgaaatttctgccggagggtctggcggtacttcatccgaagtacggtacgccgaagaatgcgatcattctcatgtttatcatcggaacgctggcgccatttgcaggtacgaaagatacgatctacgtggggctgatgaatatcgcttctttcggacttgtcattacgtggctgttcgtatctctgacctttatcaagctgagaaaaactatgccggatatcagaagaccgtatacggttccgtgcggaaaagctgtcggatgggtatccgtggtattttgtatcgcatatctctacctttatacaccatgggggccgtcgggtcttctgccgatcgaatgggcaggggtagcggtaatcgcagtgattgcggtgatcgtttactttgcgtataacattcggggaggcaggatggattatgaggagcggaagcgcattttaaccggtgcggatgaagagacagcgtaattctgcggcgcgggagcgcagccaccccataagaaaagcggaggaaaagaaaatatggaatttgtcacaaaggaaataagaaatcatatcgcttatatcaccatcgaccgcccgccggtgaatgcgctcaaccggcaggcatattctgaattgacggaagcgtttaattctgtctatgacgatctggacgacgtctttgtggtgattctcaccggcagaggcaagcagtttatcgcgggaaatgatctgaatgagttcaccggcacggcaaaatcggatatgaatacgcagtcgggctattttgcttcctgccttacgaatatctacacctgtccggtgcctgtcatcggagcgattaacggcgccgccgtgggcgcaggcttctgtattgcgtcggtctgtgacgtgctggtggcggcagaaggagcccgtttcggcctgactgagatgaaggtgggcgttttgggaggtctggcttttttgccggggatggtcccgcagaaactgggaaaatatatgacgctgacaggaaatctcattccggcggaaaagctggaaaattacggatcggtgcattccgtcgtgccgaaagatcggctgatggctgaagcagagcgcgtagcggaggaaattatgcagtgtcctccgctggctcttcaggcctggaaaaagtcctatcagtacatcgaccgcctggattttctcaatatcgaacatattaccgatttattcattctggatcttcaggaaacggaggattccagggaggcggtcagagcgtttctggagaagagaaagccggtataccggggaaagtaacggaggaaacgggccgcgcgaaaagccggcgtgcggacggaaacgtttgcggcgggaggcggtgtgggccgagccagagagaactgtcagaagagaaaggagcggcggaatgaaggattatacgcaggagtatgcagataaaaaagtcggcgtagagcaggtgctggaacggatcgaatcgggaatgaatatctatgtcggcgtggatgtagcggagcctgtgacgattctgaaggaactggacacgatcgcagaccgggtaaaagatgtaacgatctgcaccgtgctggggccggaggattatcctcacctgcacgatctcagagggaatatccgaacggagccgtttttttacggaccgtttaccagaagagcacacggtacgggaaacgtatctctcgtacccagcagcatcagcacactgtaccgggacagagctgcgtaccgcagacccgatgtttttatcggagtggcttctcccatggataaacacgggtttatgaatatgggtctgtgtatttcccacgaacaggatgctctggaagatgcggatatcgtcgtattagaagtaaatcccaatgttcccgtggtgtacggcgatgcttcggttcatatcagtgacgtggattttatcgtggaatcccgccgggagattccgatggatcctgtctatgaatctacggaaatacaaaaagtcatcggccagaatatcgcggatctcatcgaagacggatccacgattcagctggggatcggagggattcctgacgcggcggcgaagcagctgattcacaagagagatctgggcgtacattcggaaatgtttacgccgagcatggcgatgctgtatgaggcgggcgtcattacaggagccagaaaaaatatcgacaaaaaacagatggtctgcactcttctgacctcccgtccggaagtctttgaattcgtcgatcacaatcccgcggtaaagattctgagaggcagctatgtcaacgatccttatgtgattatgaaaaatgacaggatggtggccatcaatgcagcgatagaagtagacctgaccgggcagattttttcggagaccatcggagcccgccagtacagcggaacgggaggcgccaatgatttcgccaccggggcgcatcgttccaacggaggaaagtctatcatcgccctgccgtccacgaagaagaaggggacggtttctgcgattcagccgtggattgcaggaggcggcgtagtaacgattcagcgccagaatgtggattacgtggtgacggaatacggagccgcgccgctgtcgggcagaagcatacgggacagagtgcagaatctcatcgccgttgcgcatccggatttccggcagcagctgaaggaggaagcgcagcggctggaattgtggtgagacagcccgtttttttatagcttcgcgtacgcattttttcgtagagggggaagaagcgaagcctgccgcctgtatcggcggggaagaggtaaacgctgtgctgtaattatcccggatttgtaggaggaattggaatatggagctgcgagttctgaactatttcctgatggtggccagggaagaaaatatcacaaaagccgcgcggcttttgcacattacgcagcctacgctttcccggcagctgatgcagctggaggaagaactgggcgtcaaactgttccacagaagcaatcacagcatcgttctgacggatgcggggattttgctgaaacgaagggcgcaggaactgatttctctggcggaaaagacaaagagagagtttcggatggaaagtgtgctgagcggtgaaatttccatcggcagcggagaatacaggtgtacgaagctgctgactgagatgatcgagctgtttcgccggaaatatcctctcattcagtttgatatttacagcggaaattcagataatatcaaagatcagatcgaaaggggaagcctggatatcgggctgcttctggagcctgtggatatcgaaaaatatgattttatcaggtttccggtgaaggaagaatggggcgttctggtccgggaggagtcggatttggcgaagaaggaagcggtatgtgcggaggatctggcaggcgaaccgctgatattaacccgccgtgaacgcgttcaaaatgaactgaaaaactggttcgggaaatatgcggatcagcttgaaatcgcggctaccggaaatctcacctacaatatggcctctctggttcaaagcggtgccgggacttttatcaatctgaatctgaattgcaaatatgacggaacacgatttattcctctttttccgtctctcgtttccggcaccgttctcgtatggaagaagtcccagccttattcggctgcggttacggcatttttggaatatgcaaagaaatatctgtcggatatttctgaagatgcagtatagctgttgatgtgacagaagaacgggtctgcagtacggacgtctccagggggcatctgcttccggcggccgcagctgtatgagatagaaagcggaggagatcagaacggaatgccggaaaaacggatcacagtgagcgggatcgaaatcaccgtcctcagaaagaaaataaaaaatatgtatctgcgtgttcttccaccggacggccgggtacagataacggcgccgcttcaggcgggagacgggcagattcgtgatttcgcacagtcgcgtctcacctggattgcggcgcagaaaaaacgggcagtcgatcgtcgctccgggtggccggagcggtatgagacggggacggcgatgtggctttggggaacgccctgccggctggagtttcaaaacgggcgggcacaaagcagcggagcggaacagcaggacaggccgggaaaaaacggcggggcgggagaatttaaggagcgcagaatcgtgctgtacgccgacgaaaacagcacgcaggcgcagagggaaaaaatcctgaaagaatggtgtcgcggccaaatgagagaagcgattccgccggttctcgcagaatgcgaggcactcgtaggcgtccgggcaaaagaatggcgcatccgggatatgaggacgcgatggggaacatgcaataccgttcaatcccgcatttggctgaatctccggctggttcagatgcctccggaatgtctggaatatgtcatcatccacgaattgactcatctgttggaacccggccataatcagcgattttatcattttatggatcatttcctgccggaatggagagcggtgcgagcagcgatgagagagtggtaagccggagcggtccgcaccggtgaaatatggactgccgctcataaaagtacaggagaatcgttttctgtgaaaaacgaatggaggcggagaaaagcgagctgccggggaattgcgcctttgtctctttcgtttgagcgagacgagaataagcagtacgcgggaggaatggaaagatggacactgcagatcgcatttttgcacataaagccgtcaattatcaaaaattagaaaactatggattttgtagagatgaaaagggcttctatacttatcatactgtgctgtccggcagcggttttgtcatgaatgtaactgtttcagaagagggagcggtagccgcggagatcgtagatcccgcttttgacgaaccttacacgcttcatctgaccggaggtgcgggaggaagttttgtgggcggcgtcaaagaagaatacgagagaacgctccgggacatatcggaaaaatgctttcagcctgatatattcagggcggagcagacaagagaagccatcgcctatgtacgcagcgtattcggtgacgagccggagtatctgtggaagaagtttcccgacaacgcggtctggagaaggcgggacagccggaaatggtatggagttttgctgaaaatttccaagcggaaactgggaatcgaatcggatgacatcgttgaaattatcgatctgcgtcttccgccggaaaggatggaatccctgatcgacagaaaagtctattttcccggctggcatatgaataaaaaacactggtatacgatgatactggacggttcggtagagcgcagggaactttttcgaagaatcgatgaaagttatcggctggcggtgaaatagaccgtgcgcttttcgaaagggacagatcccgttcagaagaggccgcaggctgagattttctaataaatgtaagtatttctgtttgacatctataacatcttatgatactatagtcccgttctatgtatggaggcatagctcagctggttagagtacttgctcgacaagcaaggggtcgctggttcgagtccagctgtctccaccatgagcagagaataccgttcaacgttgaaatttcaatattgagcggtattttgctttttttgtataaaggcctgatgcgacctgattttccctcaaaaataggacacccatagggacacccggacacctgcatcttaagattgcctgatctctgacatcgtattttccacgttatctgaagaatggagtttattaattagttgtcgagcggaattgaatgatttttcggtcgaatgtgtataaatttttgaagtgatggaaatgtccgcgtgccccattaaatcctttgcgatattgatcggtacgccagcatcttgtaaatctgtacagtaagtatgcctgtagcaataaagaacaagatcgtcagcgacgcgatagggcggtacagcttttccgtctatagagtcacagcccattaaaatgttaaggtcatttttgaaactctgccatcggctgcgaattacattggcgctcattcgacctccggaattgttcctcagtatgtaatcgaatggatccgtaggccagccgcagcaagatctgtatttttttagatcctgtaaaaacagatcaggaatcggtacaacgcgaattcctgcggatgtttttggttctccaacgccgccgcagcgcttgatcgtagattccacgtgaaggactttttttgaaaagtcgatatgtcgccactgcagtgcgcatgtttcacctggacgcaatccgcagtagagagaaaattttaccaacataccggcgggatgagtttcggccaattgtagggtgtatcgacgttctgtatccgtaattgcccgtcttccggtttttgttcctttcggctttttaatccgctctgcgggattatcgatgacgagatcattggctttcgcagcatcaaacatactccaggtgagctgcgtcacacgatcgatcatctttttgctcatcccgctcaatcgattgaccattttctgtacatgaataggttttactgcgctgatgcgcatattcccgatttcagggatgatatgtttgcgaatcacgttggaataactctgaaatgtctctgcgctgactgaaggacgtttataattttccatccactcttcggtccagtctcgtacaagaatacttctggtaatttttcgtataccgttctctaactcttgacgtttcttatactctttgacggcaagttcttcttttgtatctgcccgaatcttgtaaacacggccatcgacagttatgtttttagtgtgtttgtactttttcaaagtagcacctccctggaaaagggcataaaaatacccggaattgatttttccaagctgagatgatacaatctgattgtgagtcgggttgtatcattacagcctatttatttgatccgccctcctgcgccaacaggagggcgaatttttattataagctatgccggattgcaaattttacaaggcttatagccggtactcagtgctgcagaaacactgctgagaggcactttattggatgcgctcattcgttttacagatgagcaagtggatttgtggaatatcttactgttcttattgccgatatagctggttgtgaccggagtttgtggctgtgggtttaccgtcgttccgccacccgaaggattagttggtgtgtttccacccggaggcgtaaccagggtacttccgccagtaccggctcccgcatcagctatagtcagatagttactcttattcaagttatagacttttccgtttgatgacagagaaacagtaccagacttgaaagtaccgagcgttttacatccgactgcagaaagtctgctgagtgtatcggcagaagggtgtccatatgtattatttgatcctgcagaaattacggcatactcaggatgaatgacacttaagaaagagctggaagtagatgttttggatccgtgatgagcgaccttcagcacatcgacatcctcaaacttatctaaattctgactttcaacatcagaatctatatctccggtaaataaaacttttacttttccgtagtttaattgagcaattacactgttgccgtttgtatcaccattattatctccagtttcgataatttcaagttctgcgcctccttcaagaggaagtaccatatcagaatcatccatgtactgggaattcggctcagactgtaccgctgcccaataatcgcggtaagttgaggtcgaggaagtatcgccggatccaataactgtatctacctgatacgcagcgagtacatcatctaagccaccaatgtgatcagcgtccgtgtgagtagcaattacataatcaagggctccgtcaacatacgggcggaggtaattaactacctgttggccgttggcgttgtttccgccgtcgatcagcacttctgtattaccaatatcgatgagcgcagcgtccgcttgtccgacatcgataaaatgtatcttcagtagtgggaatgtgttatcgacggaaacggattgagcagcctgattccagctgacgtaaccgccaaaagcctccagcacggctcggattggaagataagtgcgattatctttaattaccgcaacagtatcgttttcgacctggtatccattaatagaaatgttattggatccgatcggaaccttaaccgtttttccatctttctgaacgatagcagtacgtgtatttctatcccaatcaacgtcacaaccataggcttccattgtggctctgagcggaacttgtgtacgattggagctatccacaaatggagaacctgttgatgcattgaattgaacggcgctaccgttgattgttacaccgatctgggatgcgtacgattggatctgcggaataaataccgacgcagctacgagagccagcgacaagaatagcgataacttcttttttcttttcataatcaatttcctccttcactgatatttcaatccatgccttcctcgcggagagcgactgtatctatctgctcattaaagaaagcgaaagatttgcaggatatttgtcagcagaaatatcgtatttcgccgaagtaggagacccatttttctataatctcgcagcttcgtgactcgataattctcatgatgtttcgcaatacttttgaaggtatttgagacttattattgcacaacaagcattttccggatctcgtaatccaaatttttgttgtattctctgccggagaactttgtgaaacatgtacatgcacaggttctaagggacaactctcgttcgaccaaaaataaacattgtaagatccaagtttaaaaatttgaggcattttcaaatcctccttcttgagagaattcaataatgaggtgtgcagtggattcaattacctcttgaaagcggtcaatatcgttctgggtgaactgataaatatcttcccacgtataatctggaagatagcaagtagcgtgacggaatccgtatttttcgtctggacgctcaatatagacttttaccctgccatcaggcagcatatcggaatggacgatttcagtatcatcatccagtgtcataaatggatacatcatatcggtgatcctccttgcattttgtccgcctccttatgtaaatagagaggcggactacattaaacgaagataagttagattagttttttactgggatattgatttcaaccggatcaccgacggaatcaaatgaatcattgtgtggcgcattaatatggattgtcacgtttgccaggtcatcagcactactgttttttaaaataaaaattacattgcctgatttttttacttttccgatgaaatcaccgcctacactatcgctcagaaataggctggcgtttatctgttctttcgtattggttgtcattactgattgatctggatagaagctaatagtctcgtctgatgtattttcaacatcaaaatgagctacaacgacagcatattctttgtctttttcgagatctaaaagagaagcggcatcatcagttgtggctaccaattttgagatctgaatttctgatgttgaatattttataggtccagtttctcctcccaagttgatatctttgttcgtgtaaacaacttcttttctcattccgttttgttctgtaacttttccaacatctgaatcagtttgcttttcggcttctgaagacagtacagaagaatcatctgatgctgtacttccgcatgctgcaaagcttacacacataatagcggcaagacaaagcgttaaaattttctttttcatttttatcctccttgtactaataaaataattgataattagtaagattaatttataaatgtaaatgtttcaagtttaagcgatgatatgggtaaaaatagtggccatataattaatctcattatttgatacaatctccgaaattgtttttattatcgtttgtcattaaactttaattttaataattgttcgtttagtccctccgcacaggctatttgccggcagctgaatccttcatactgatagatcaaatcatctggaattaggagttctgctgcgaaacgattcgcttccatctcaatccggtctgagagaaacaatgtcttgtgccgtataaaatagcagttttcattacgatgcatgatagcgtggcccaattcatgtgccataaccaaacgtttttcgcgctcaggcagactctcgtttaagaagatacaacgatgcctttttagatacatatagcagccacaacgggatccaagtgccccaatgagaacttctatatttaaagcctttgcgatttcaaacgggtttcttgtttcatatttatggatgtaacgagaaacaattttttgtatgtcatttctcaacgcacacacctactttttatttttattcggattatataattccttattaatgagtttgagtcgctttaacataatctcaatctgtgcagcaaacatttctctgtcagcttcagggatatcctctccgtcaaaactggctggtccagcctcttcgttcgaaagcttttccattatattttttaagtcgttggcaatatcacgttcgtcgttggaggtcaagacgcggttcgagttttcgctatcagaaacgttattagaaaacgcgtgtaaaataccatcatcttcaatcaacgcacttttgctgagcccgaaatgatcagctattttttgaattgctcccatgcgtggttctcttgatcctgtttcccaagtgtgtacagctttcccagatactcctgctattttgcctaattcatcttgagtaagctcaaagcgagatcttaacaacttaatattttcagatactcccatacgaaaacttcctttctatgatgtagaaaattatatactgaaagtagaaaaaatacaacagaaataactaattaatctacaaaaagttcttgactatctactaaaagtagaataatattaaattaacgcaggaagggggtgaaagtttgattttgagtgtaaagcaagctcgtgtgcttgcaggtaagacgcagcaggaaatggctaaatcgatggggattcatagacatacctacgctaagattgaacaggatccggaaatggcgacaattcgtcaggctgaagagatagcgcggattacaggagttgatcttgaacaaatttttttcggatttaaatctacttttagtagaaaatgaactttatagaaagaaaaggatatagctgagtaggtggtaaaaaatgaacataactttttcaaatggagcatctacagacataagagacttaaaaggatacgaggaagaagtcttgaggttactgttaaaacttcttccggatgatttaagaaatgcagaaactatgagatatatcttggaacaaagtgcagaaaaactcgactctctacggataagatcagatgcgtcgttctgaacttaatggggcttaccgaggtcttttaacaaataggatagaaggagattggcgatgatggtatgcattacggtaagtgtagtaataagcgtgattgcaagtctgattctcggcgtattgatcacaggtacattggttcgcagggtgatggacttggcgtttgattcgacagaattttgtatgaaaactttaataactctgacggagagagttaatcaattagacaaacttctgcgaactggttgccgaaaggagtagatgcgcaatatccgggtataagagcgacttcgcgatcttctgtatcaggatatttttcaataagggtctttacataagagctgttttcaagttcgaaataaaaagattccgagtcatctttaaaactgctgtacgacgtaaatatcaaccccaaacgctctaaattggaaatagatgctgctacgatattatgcgagatatcaaaatttgtaaatattgtaaagtgtgtgaaaatcgtttcacccgttggagaaatatttggaacgcgagccctttttagtgatggaagatctatgagacggcaggagggatgcttttgttgataacgaattttaaccaattcaactccatcacgttcgaatacattttttaatatttgagcgtctaaaggagagagttgtttgattatttcaacaaaggcaggatgcgctttatccttcacagaaatattcatagacgtcgcaataaggtttgcaaacatatttcgcaattggtctgaatccatacagtaagaaatagcttggattgctggaactgcaatgtatggttcaggaggaataatattttcttccgggacgtcagtcattttcgtttctaacacgtgtttgagatcgatatagttggattctttcattgcaatccatttttcgaggggtaaaagagcggcatgtaatgcccttggaactaatgcgaaagtttcaccacaagccttcgcagatggatggatgagatcgttgtagattgactttgatagtttatctttactatcagacacaatgacaccttctttctataaaaaatgaacaatagttctattgtcttagtttaactgaagaaaggtaaaaaggtcaagatttgaacgcaagcgaatgtattttttctttcatcaatacaaagagagcagaacagggcatctcaaagaaagaattcacgaagatgatcggctgcactcagagagcatttcggtactgggaacttggagaacgcaggatatcgatagatacagcggataaggcgctgaaagtgctgggagtagcggctgtgattggagcagaggaggtgaaaacatgaacatgacaaagacggatgtcaaaagacagctggaatctgcaacgggcaaatcatttctttgcatctcagagatcgcccgctgtctcggaatgggtcgggatcacacacggtcgttattggcaggtttgaactacctgccatccgggcgcgagaaaaggtacttaatatccgatgtcgcagaacgaattgcagaaaaaagacgctgttagtcatctttgggataatattggatctcaaaatatgcatagagcaggaaaggagtcttgtgaatgaaaaagttaattgttggcactgcacttgcagtcggctatctcattctctgtcgcctgatgcgtggctactgggcattagacggagatctgatcgtgattgctatggcgatagcggcatatctgattttggacaaactaccggaacgggatcaggaaggaagaaataacgaacctacatatatcaaagtcgcaaggagtacccatggaattcgtaaacatatcggctgagagaaaaaggcacatgcctataaaaataggacacgcaccttcaacaaataaaaccataaacatcatatcacaaaacaaagagtgcagcaattcggaaaggagaaaatatatggacaacgcagtcgcaatttctgctcaccggtttgaatgcctggtacggcgggagtttctgtatgaatactttcggagtttgcttctggaaggggaggatattccgaaggatactgcatcaagattagttgaaattgcggatgaaatagaatcgtaagaaggtgaagtcagatgatctgtcgaaactgtaaaacaatatttgatgagccgaaaggttatgtagaacgacattccgcagaatatgcagaggagtttgcgtgctgtccgatatgcggaagtacggaaattacagattcctatgtctgcccggtatgtggagtggaatcggacaaacagggcgtctgtgtaccctgtagggaagcgatcggcaaagatgttgattcgaactttcagtctctgatggcagcgtatctgttggatgcgatgccgttgctggagattgtaatggagcatatggagggatatgatgaaaattttatccagcacatcggggcttagccgggaggaatggctggccttacgaaagcaaggcattggtggcagcgatgccggagcgatttgcggattgaatccgtggagatcgccgattgatgtctatgtcgataagacaaacgaaaagatcgaagcggaagtggagaccgaagcgatgcgtgtgggtactgatcttgaagattatgtggcccgacgattctgtgaagcgactggaaagaaagtacatcgcaaaaacgtcatgatgcaaagcgaggaatatccttttatgttggcaaatgtcgatcggattgtaactggagagaaggcactgcttgagtgtaagacagcaaacgcctatgcagcagagcagtggagtgatgggaagtgtccggaatcctatgaaatccagtgccaccattatatggcggtcacaggtatggagaaagtatatctggcctgcctgattatgggcatcgactttgtgatctgcgagatcgacagagacgaagaattgatacagaacctctgtcagatagaaaaagatttctgggagaatcacgtactggcaaaacggatgccgccgccggacggatcagaatctgccggcaatgccatcaaagagatgtacaccgcctcgaaagaggaaatactggaactgccgcagttaggtaaacaaatggaacgatacgacgagatcagtcagcagatgtccatcctgaaagatgaacaggagcaaatcaagcaggagatccagctggagatggaagaagcagataccgcatatatcggagatcgtaaaattacatggaaaacgacaaagccacgggtgacgttagattctaaaaaattgaaggcagaaatgccggagatcttcgaagaatacagcaaggaaggcaatccgacgagaactttccggatatggtagaggagggaaaaatgagcgaagtaaagaacaaattgcaaacaaaagctgcagccgcgcctgcagaaaagagagaaccgcggtcgattaaagactggattgtggtaatgaaaccgcagatcgaagcggctttaccgtccgtgattacagcagaacgtttttcaagaatggcgctgaccgcggtgagcagcaatccaaaacttgcggagtgttcgccccagagctttatgggggcattgatgtccgcagctcagttaggtctcgaacccaatacacctttgggacaggcttatctgattcctttcaagaacaaaggcagaatggaagcgcagtttcaattaggatacaaaggcatgattgaacttgcgcatcgctccggtgaatttaaaaatatcgaagcgcatgtcgtacatgagaatgatgaattctcctatgcctatgggctggaaccggaattgatacatagaccggctttaaaggatcgcggggaggtcatctgttactatgcagtttatacgctcgtaaacggtggtttcggattcgaggtaatgtcaaaagaggatgtgcaggaacatgcgaagaagtattctcaggcgtataacagcagttttagtccgtggaaaacgtcattcgacgagatggcgaagaagagtgtaattaaaagagtactgaaatatgcaccgattaaaacggaattcgctcgtgcagttgcagcggatgagaccattaagacggaactcagcagtgatatgacggatctaccgaacgagaatgtttttgaagatgcagaagaagcggatgtggtagaggaagctgcggaatctgcagaaagtggttctgaaacagaacagatcgctatgaaatagaggtgagatatgaacaaagtcctattgatcggtcggctgacggcagatccggaagtgagatattccgacagtcagacagccgtatgtaatttctctgtggctcttaacagaggaaaagataaaaatggggaagatcgcggagccgattttccccgatgtattgctttcggcaagacagccgagaatatgcagaaatatctggagaaaggcagtcagatcgggatagaaggaagactacagactggatcctatgtgaacaagaacggagataaagtttacacgacggatgtggtggtaagcaatttggaatttctgtcgaggaaaaacagcagtgaaaatacttctgacagtcataccgcttcgacgacaccagagggctttgatgaaatttctgacgatgatgttcctttctaaatgttatttacaaggaggcggaatcattgaaatcagtcgatcctacaagatgcattaaatgcgggcattcggcctatgtcatcagcactcctgttgtaaataaagcggacatacctggaaaggttcgcagaagaaggtgtccatggtgtggtgaagaatactatacggcagaaatacttttagatgatctgatacctattcagaaatggaccgaagcttaactgaaagggggagttgtatgtcgaatcgaagtgtacgcgaaagaggggaaaatacaacatacgcattctgtctgataaaagatgaaccttgcaatggatttgaaattaagggacttacattagaggaagcgttccatatagtaaaagtacttcagggcaaaaaaatcagttttgaactggccgaggaggaataaatgccgagaccacccaaaagagggttggattacttcggaaaagatgtggatttctatgaggattttaaaatcatagatttgctttcggaacatgggccggtgggagtcgtgatctacgacttcctgctgactcagatttataaaaacgggtactatctggaactgcctatcgataaggcagcactgcttgcagtacgggcagtcggttccagatggctgaaaaaagatcaggcgatcaacgtcatacactactgcggcgatataggtctctttcgggttgacctcttagatgcggggatattcacttcggcaggaatccagaaaagatacgctgaagtgacatctaagcgcgtgatcaataggaaagaatactgggttttggatgcagaaaatcaagaaatgaaagaaaaatgcgccgaacctgtattaaatgcacccttttttcgagtttcggaagaagaaacctcggtttccggagcagaaaccccagtttctgacacagaaatgcaacaaaagaaaaaggaaaaggaaaagcaagagaaaaaggaaaaggaaaaggatatacgcgcgcgagcgcgcttgccaagcactgttagcatggatgagcttaccgaacgatttggcgaggtacttgctcatgtagtgtatgattggctgacctacaaacaagagcgtagagagacatataagccgactgggctgaagtcattgctgacgcggatcgaaaaagagttggatgcttatggagagcaggccgttgcagacgtgatccagctgagcatgtccaacgggtggcgagggatcgtatgggaaaagctgcagcaaaaggacgaaaggaggaatgagcaaaatgcaggatgcagcagtaagcagggagaattcaatccgttcgaaggagaagaaattctgtagcgatttcgcagcgttgcgggcaaagcagattgaacggtataacaacaaagcaggagatctgacgggattcgattgcaaactttgtcacaacaaagggcatttccttcgcctgattgatggaagggaagtgtatgaggaatgcgggtgtatggagatacgcaaaagtcttcgccagatcaaacaaagcggcttagagcgggcaattcaggtaaagacattcgactcctttgtggaaaaagaagattggcagcggaaaatgaaacaggcggc

SEQ ID NO: 3819 - DNA, 4244 bp, Unknown
  16S sequences of unknown bacteria
aaaaatgcattcccgtcccggtcgctgtccgtcgaaggcccgaagggctgaagtggcgagcacacggagcgaagcgcagtgcgcaatcgaaggccgcgaagcggctggaggcgcgaggacacgcctaaaaggcgtccgcagcgccggaacaccgcgccgccgaaggcgagggcggtgcgcagccacagaacgccgcgcaagcgttagcgcagggcggtgcgtagacaagcggccgggtaatcctcgttgacaaacctttggtttgtcaacgatcagagcccgccgcccgcggaagggcggacggcgggcgctttgcttttttgcgtttctactaggcagcgccgttattcatacttggcggcagcctcttccgcagcggcgatctgatcctggatccaggtttgcacctgttccgcgcccagcgccaacgcgtcagatttcatctgctgccacagcgcttcgaactcttcctcgtccgccgcgtagaccatctgccagcccttctgctccacgaccgcgccaaccgcgtcgcggatcatctgcatatcgtcgtccagctggggcaggaagctcaccagcgacagcgggcgcagggcaatgcggtcttccgcccagagcttgtcaatggggaactcatattccccgccatagaactcagaccaagcctgctgcagcttattggtgttgccgtactcccgctcgtcgtcttcataaccggaatcgatgatgccgttttccgttatgaaagactctaacagggtgtagcggccgttccaatacttgtattcctcgccggattccagcgtgtaagcgccagtttccgcgtattcatagtacgcttcggtggcataggtgttgccttcctcgtcctcgtcccagaacaatcccttggggccgttgtacagctcgtacaggaattccggatccgcgttcgcgtcgaggaacgcgaggcaagcgtcgatgttctcggcgttcgcggagatgcacagcggccaggccgttccgatgggataatcgcccatggtggaggcgatgtactcatcgaagatgatgggggcaaagccaaccggcggatcggaattcttcttttccagcgtatcaaaggcgctctggtagccgccccaccacgcagccatgtactggccattggcaatcttggattgcgaggtggtatactgctgggtcagcgcgtcggggtccaccaaacccgcctggttgagttcaaacaggaagtggcaggcgcgcttgaaggcggaatcgtcatcaaagatggagttgatctcgcccgtgggaatgaagtaatcgatgaaatactgctggccgctctcccagtagcccaggttgcacagcaccgcgttggcaaacgcgaaccggccgttgtcccactcggcaaacatgttgatggcgtaggtctccagaccctcttcggtttgcggatagacttccttcatggccttgaacacgtcgatcatgtcttccagcgtgtgcgcctccggatagtccgccttggcgtaaatgtcccagcggacgttgaaagcgtagcagcccgcgtcgacgccaaaggtgttggggcccacgttatccggaatgccgtacagcttgcccgtgccggcagaatggtaatcgcgggtgtaatccagcgcggcctgggcgtactttacggtgttgggcagcttgtccaggtaatcgtccaggcacagcagatagccagcctccacggcggtctcatagtcttcccatctgctgaagcggatcacatccggaatgtcgccagaagccagcatgatttgcatctgctccacgctggtgccatcgccgatcgcttccaactggaagcccttttcggcccacaggtcgcccacccaaccggtgactgggccctgtgtgtcgccgccaatgttccagccgcgcaggtaatacaattcctgctcggcctcttcggccatcgcggcgctgcccgccaatagcataatggccaacaagaacgcaaggacttttttcatagactcttcccctttctattattgggcgctatcccctacgggcgcgcgccaattcttccccaagggcgcaagccgcggcccgccctatcccttcaccgcgccgatcataattcccttcacataatagcgctgcaagaacggatacacgcagagaatgggaaacaccaccacgatggtgaccgtaagctgcacggaagtgggcgacacaaccttggaagggtcgatctccgacacgccaatgttgccggaagcgatctgcgcggccaggttgcgcgcctcgttgatgtactgatacagcagatattgcagcgtgttcagccggtaatccgtgacgtacagcagcgtgtccataaaggaattccagtgccccaccgcgctgaacagggccaccgtggccagaatgggaatgcacagcggcaacacaatccgcgtgaagcgcaccatatatcccgcgccgtcgatggaggcgctctcctccagcgccggggaaatcgactccatataggtcttgatcaaaatcatgttgtacaccgggaagatgccggggatcacatacacccaaaaggtgttcaccaggccgagcatgcgcatgttcatatagccgggaatcaagcccgcgctgaaatacatcgtggcgatcaccaggcggtaccagagcttgcgcttccacatgttttgcttggtgaacagatacgccatatacgacgcgcccaccagcgccagcagcgttcccagcacggtgcgcgccagcgacacccacgcggccatgcccaggcgttccatcttcagcacctcaacatagttgttgaagtgaatgccaatgggatagaacattaccttgcccatatccaccatgtcgttggcggagatggaattgatcaatacatagtaaaaggggaacacgcacaagagcgtgaaaagcgtgaggaacgtgtagttgatcgcatcgaaaatgatgtcttcccggctctttttcaccttttgtccagttgcggcgcgcatgttcattcccccctctaaaacacgctggttccgcgaactttcttagaaagaatgttcgcaaaggtaaacagcaccagggcaatgagcgatttcatcgtgccgatggccgtagcgtaagaaacttggccgcctttgatgccctggttgtaaacatacaggtccaacacctggatataatcctggttcatcgcgttctggaacacgtaatactgctccatgccggtgttgaggaaattgccaaaggatatgatgagcaacacgaaatacgtctccaccaggcccggcaccgtgatgtaccagatgcgctggagccgccccgcgccatcgatcatcgccgcctcgtacagttcctggtcgatgcccgcaatggccgccatgtatacgatggcgccccagcccaggcccttccataggccatagccctgcatcgttagccaaacgtgatcctgcgaaaccaggaagttcaccggctgatccagcaccccggtttgcaccaagaggttgttgatgaagcccgtattcacgttgagcataaagaacaccagggaatacataatcgtccaggaaataaaatgcggcagcgtcgtcagcgtttgcacgattttgcggtagcgccggttggtgagctcgctcatgcagatggcaaacacgggcgtgagcggggaaaaaagcacgcccaggcccgccatggccaacgtgttgcgcagcaccatgatcaattgacgccgcagcaccgggttgccaaacagccgcgtgaaatgatcccagcccacaaattcgcagtccaacaacgctttgccgggtttgtaattgaagaaggaatacgaccatccccacaagggcaggtaagaaaagataaacacaaaaatcaagcacggtaagagcataaaaaacagcttcacgccgtcccgctgcactgcgcttgccgatttcttgggaagctttgcgtgcatatccaccactccaatcgcaattgtaatttcctgcggcaatcaaaatgttcgccctagcgcgcttttgcaaggctcggcttgctgtatagatttattatatcaactttagaagaatctgtcaagcgatattttcaaatttttatccttattttctctgcaggtttgtcccgcaattcaccgataaattcgcaagaaatatagcaactttcggaatagatttgccctccaaaaaggggctgtgaaaaaacttttgttgttctttcacagccccagagtattgacaaag

SEQ ID NO: 3820 - DNA, 1876 bp, Unknown
  16S sequences of unknown bacteria
gcagccgttctgcgtaatcggtgatcttcagcacccactgacgcatcggcttgcggatgaccggatatccgccgcgctcgctcttgccgtcgatgacctcttcattggccagcacggtgcccagctcaggacaccagttgaccgggatctcgtccacgtaggccagcccttttttgtaaagctggatgaagatccactgtgtccatttgtaataggagggatcggtcgtggagatctcgcggtcccagtcataagagaagcctagcgactggatctgctcgcggaaatggtcgatgttcttcttcgtaaactgcgccggatgatgaccggtctgcagcgcaaactgctcggctggcaggccaaaggcatcccatcccatcggatgaaggacattatatccctgcatgcgcttcatgcgggcgatgatgtctgtagcggtatagccttccgggtgcccgacgtgcaggccgttgccgctgggatacgggaacatgtccagcacatagtatttcggcttgctgaagtcatgcgtgtcgcaggcaaacgtcttgttcgacagccagtaattctgccatttcttttcgatcttctgatgattaaagcccatttttctcttcctttcataaaaaaacgccctcagaatcatctaaggacgtatgttccatacgcggtaccaccttagttcatgcgctaagcgcgcatgcactcacttcttaacgcgaagacacgggtatctgccgactcctcagcgagttcccccgttccgcgctctgtcctttcaccatccgcacagctctctgcaccgctttccaaggtactactctgattcacagtctttactgaattagtataccttaagaaagaaagacatgtcaataggttcatcgcgccagtttttcagcgcagcagcgtcttgaaccggatgcagcaggcgagctggacgatgccggtaaagctgcagagatacaggtagcagaagacgtgcaggtctgccgatatccccatcagatgcagcatgagggcgcaaagcgcagcaaagatcagcgccagcgcgaaatcgcggatctccagtgaacggcagctcgccttgcggtagaacagacgcagcagcgccgtacatggcagaaacagcgggatcagccagaagctctccaaaggaacaaagcggaacagcgcgccgaagctcagcgggagcgcaaagctcaccagcgccgcaaaataagtcctcagcatcaaatcacctgttatcagtatgcgcagagagcgcaggatcatgcgccatagcggacatccgtgatctcttgcccttcataatcgatgcgcatgatcatctcgcccgctgaccatactttcgcttctccctcatcccattcgatgcgcagcccatgcacatcatgcagcgtctgatgcgcggcctcttcttctgtctcctgttccttttgcagctgcgcatgcaccatatccaatgccgtaatatacatgtcgatcctctcctgtgctcccgccagcttgtgcagcgctgccgcgcgctgggtgagcagctgtgcaaagctgagcatcagcgagaggacgatcagccccaggatggtaaagaatccttcatctgacttgcgcttcatagtggacatcctctctgttccagtgcatcacgatccgttcgccgcgatattcaaagaaggcatcgtcgatcgcctgcagatagatgacatatcctgggcgtctgaccaggcggccctgatgatagtccagccgaagctcttccccaaagcgcctcagctgcaaggcatccgcttcgacctttacttcctgcgcttccgcgcagagcaggcgcagctgcagcacggcgatctggtcctggacgagctgctgctgcgta

SEQ ID NO: 3821 - DNA, 2772 bp, Unknown
  16S sequences of unknown bacteria
gaatagcaaccactaaaccgatcaggtacatagagtacgctaccagcatagcccggtctgcaaagaacatctccgcaaacagtatgtaaattggcagacgggcgctgcaactcataaaaggcgtaatcagcatgactttgaagcggtcacgccggttttccagagtccgcgacgccatgattgcgggaacggtacagccaaaccctaatatcatggggataaatgccctgccggatagtcccagcttgctcataattccttccataacataggcaacgcgggccatgtagccgctgtcctcaagaaaagccaaagcaaggaacaggataaagatgtttggcaaaaaggtcaggataccgcctacaccggcgataatgccatctaccagcagggagcgaagcacttcattgacaccggcggcaaccagcccgtcactgattaaggcagacaggctttcaatccccatctcaaaatatcctttcagccagtccccaatcgtaaaggtcaggaaaaataccacggccatgataacaaggaaaatggggatgctccataccttatgtgtcagcacacgatccactttctccgtcagggcatcttgccggtctttatttaccagaacttccctgataatctcctgaatgaaatcgtatttctcgttaatgatgtctgactcataattgcgatccagcacatcgggcaggtcaaccgggtagtttgctgtgatctccttatcttgttccaacagcttaatcgcataccagcgataatttgtcaggcccggatacttccttttcagctccgccataataaggtcaatcttatcttcaatggcatcactataaaccattgcatactcggaatggtggtcgtgccggtgcttggacgtatatttgtggtgatggatcaggcaatccgggtctttacagtccttgtggtgcgctgctgcgtgcagcagcacatccagacctgtccgctttcttgcggaaaccggaataaccgggatacccagcatttcgggaagccggtgtgtgtcaatttccatgccccgtttctctacaatgtccatcatattcagggccagcacaaccggctttcccagctccaaaagctgtaaagttaagtacaaatttcgttccagcgcagaagcgtctgcaacgtcaataattacatcgacttcatcactaagtatgaactgtctggatacctgttcctccattgtataggaagtcaggctgtaagtgccgggcaggtctaccagacggatgttcatatcgtggtctttaatggctccctctaccttctcaacagtaacacccggccagtttgccactttcaggtttgcgccggtataagcgttgaaaagtgtggttttcccgcaatttggatttccgatgaagccgatagtcagattttcacccatcggaatttaccccactaaaatgttttttgtgatattgcgccctaatgcgaagcgtgtcccgcgtatttttacgatcaggatgccatgtcctttgctattcaggacagtaacaggagtgccgcgtgtcattcccaatgcctcaaggcgcttttcaatgtttacaggtaatttaatatcttgaactttataattatttcctatggttccgtcacagaggtacatagctgtccctccttagcgtaaagtctgtgatgtgggcggcattttgcgaaattcagaagccatcattgcaatggtaatcacaaccagaacagcgtccgttaaggcaatcgccagccatacaccacggatacccagcccgccaatcatcggcagaagcacacacagggggataaacaggataatttggcggaaaagaaccagccatgttgctttgtttgctttgcccaaagactggaacagcgttaccgcaatcaggaagctaccctgcaaaacataggtactgaacatgatgcggaagtttgtcgcgcccgacgctgcaacactcggcgttgtaatgaacatggaaagcacctgctccgggagtaactcggcaggtatccagaacagcagggacaggacggtggcggctgcgataaatacttttgtcagcagctttacacggtcgtagtctttcgccccgtaattcgtaccggcggcaggctggaatccctgactgatcccccacaaaggaacaaatgagaagttccagaagcgcagagccgcgcccaaaaggatttgggatgtttcccctccatagttggctgccacacgatagatcaccgtctgctgaaccaaagtcaagacctgcattaacagggcagaaacaccaacagcaagtacctgtcggagaatggggccgtcaatgcggatgcgtccgattttgacatttgggcttttcttcttgaagtaccacacagtaatcacagcctgaacaaactgcgaaagtacggtagcataggcagccccctcaattcccatgccataggggtttaagagcgcaataaaaatcgggtcaagaatgatattcagaatagcaccgctggcaatgatgaacattgcctttttcaactgaccttctccgcgaataaccatgtttgcactctgaaagaagtttacaaacagggaaccggcaaaaatgatccgaagatatttttccgcataattcaggatattgtcacttgctccggccagagataaaagctgtcgggtaaagaccatgcctataactgtataaataacggaaaggatcacaacagcggcaaccagatttcccatgatcttcttcacagtgttttcatcttttttac

SEQ ID NO: 3822 - DNA, 1800 bp, Unknown
  16S sequences of unknown bacteria
gtagaaaaatgagcggatttgaggtgttttaggattgcgagagcatgaaatgcgaagcaatccgtgtatcatagtggtcaaaaggcattttgcccccaactgatgcctgcggattgctccgctgcgaagcagctcccacaattctgcatcatctttacagctgtagtttaacatgcagccgcagggaaaacaacacgtttttgcaggatggctcatatgctgtccgttttatgtataaagtttgataataaaaatacttgacaaacaaactaaattgctatatagtttgaaagtcaaatatatttaaatgaaaaatataagagagacaaatgaaatatcgaatcacaaaacaggagggtacgatggcagagatcataataggaacaggcgcagcggttccggattatgtgctggataatgacggcgtggcagagatggtggagacagacgatgtctggatccgagagcgaaccggaatcttgcagagacacattgcgaaagaagaaacggcggactcacttgcagaggaagcggcatgccgtgcgatggcagatgccgggatagcgccggaacgcatcgatctgattgtggtggcaacgacaacagccagagtgcggatgccgtgtgtggcctgcagggttcaggagaagattggtgcgaagcaggcagtctgctttgatctgaatgcggcctgcaccggctttgtgctggcttatcagacggcaacggcgtatttgaaggccggtatttaccggacggcgcttgtgatcggaagcgattgcatgtcacaggtcatcgactggggagaccgcagcacctgcattttgttcggagatggagccggggcggcagtgctgcagcggcatcccgggcttgactatcttccggttgccggagcggacggaggaaggggagaagtactttcctgtcaggcactgtatgagcgccagcctttttgcaaagagagcgggaagtccggtttcctgcatatggacggacaagccgtgttcaaatttgcagtgcgcaaggttccagaagcgattttggaggttctggaattgaacggactgacgatagaggacatcgactggtttgtggtgcatcaggcgaatcgccggatcatcgagtcggtcgcacggcatctgggcgtatctttggaacgctttccggtcaatttacaggaatatggaaatacctcggctgcgagcattccgattttgctggatgagatgagacacagcggacagctgaaaaaggggcagcgtcttgtgattgccggatttggagccggtctgacctggggcgcatccatattagattgttagaggaaaataagaacggaatctcagaggtcttgtaaatacaacctggagattcaaagagactaagaaaaagaaaaggagattatatatcatggtagaaagaattatggaaatgacatcggagaatctgaacattgaccgcgcgctgatccagccgacgtcttcatttaaaggagatcttggcattgattcgctggatttgtttgaactcgtcatggcattggaggaggagtttgacgtcgagattccgaccgaagatctggaaaagctctcgaccgtgcaggatgtcgcagactatgtggaggcacaccgcgcgtaaggggaggagcacagcaatgcagacagaaatcacagagttacttggaatacaatatccgatcattcaaggtggtatggcctgggtggcggagcatcatcttgctgcagctgtatcagaggccggtggcctgggactgatcggagcggcaaacgcaccggc

SEQ ID NO: 3823 - DNA, 2229 bp, Unknown
  16S sequences of unknown bacteria
gcttttaattttgctaaaaagaaatacaacgacaaaaaatcatgaatttgccggagggagaggcttcgtaaggaagttctctccctttggtttttgtagtcagccggaatgattggatttgtaggaaaaatcaatcatattggaggattacaaaatggaacagcattacattgatgaaaaaacgggcatcagatatactttgcaaggagattactatttgccgaaccttgtactacccatcgaaaaagaaaacagatctgtcggcatatggggacagcggcatttgcgctatctcaagcaacactgtaaagtgctttacaccaatctgctcacaagcggtaaactgagaagctatcttgcgaacattgatgaacaggctgaaactatgttttttcggctggtagagcaaatggcccagctcaacggtgttacagaatctctcaaggcaagcgatcaaatggcatgggtgcaaaagatgaataacatccgaaattccgcacaggagattgtctatgcggaattaatctacagataacatttctatctttggaaaagctgctgtcaagcgacggcagcttttctttttgggtagtttaaaatggatctctccaacagataaaagcagacggaatgaagcagatattgcagaaaatgataggtttatgttataatatcggtagtcttctgaaaggagaacgatagagcaatggcactacatgaattgctgcgaaccatgcgcaagaaagcgcttttatcccaagaggattttgcgaaagaactcaatgtgtcggtgggcacgattaaccgatgggaaaatggaaaaaccaagcccaatattacagcaatgaagaaaatcaaagcattttgcgagggaaaggcgatcccttttgaagaaatcgaatcagaatggctgagagagaaggagtaaccacaatggcggatattaagacaaatcaggagcgggacgagctgttccgccgtatctataaaattgcaaccgatctggtccatgcgggtcacgtgtcggaatgggattttaagtcctatgtactggggacgatgttctaccgctatatttcggagaacttcgccgcttatgtcaacgagggagaacacgccgccgggaatcaagactttgattatgccaggatgtcggatgaagacgccgagcctgcccgtgagggattggtgcaggaaaagggctttttcatcctgcccagcgaactattctgcaatgtccgcgcctgtgcggatcaggacgaaaacctgaacgaaacgctggagcgcgtctttgcccatattgagagcagcgccgctagcggcgatgcggaaaacgactttgccgggctgttcgacgacttcgacgtaaacagcaaatccattggggaaacggtggccaagcggaacaaggtgctggccgaactgctggacggcgtagcgcagatgccgctgtatgatatcggtggaatcaatcccgacctgttcggcgacgcctatgaatacctgatgagtatgtacgccgccaacgcggggaaaaagggcggccagtattttactccggcggatgtttctgagctgctggcccggctgggcaccatcgggaaaacaaggattaacaaggtctatgaccccgcctgcggctccggatcactgctgctgaaggtggaaaaggtgctgggcaaggacaacatcgagcggggattttttgggcaggagattgacctgaccacctacaatctctgccgcatcaatatgttcctgcacaacattgagtttgataaattcaacatcgtgcgggaggatacactgatctccccgcagcactgggacgaccagccctttgagctgattgtatccaatccgcccttttccgttccgtgggagggggataaaaacccgctgcttatcaatgacccccgtttctcccctgccggagtgctggcccccgcgtccaagggcgatatggcgtttattctgcacagccttgcgtggctggcgaataacggtgcggcggcgattgtctgcttccccggcattatgtaccgtggcggtgcggagcagaaaatccgcaaatatttggtagacaacaactacattgacgcgattatccagctgccgtccaacctgttcctcaacgtcaccatttcggtggacattatgctactgaaaaagaacaagacggacaacgccatcctgtttgtggacgcctccaaggaatttgtgaaggtg

SEQ ID NO: 3824 - DNA, 29869 bp, Unknown
  16S sequences of unknown bacteria
ggtcgtaaatttaaatcctatcggggccacgtcgggcatgtcctccaactattgggacgtgcataaaacgttcggctatatgtccgcgtacgaaaacgcatacttctacgcttctttgctggcgtacgccgatatctacgattttaaggctgacaattacgcgaagaacgggcagagcgcggaggcggaaaaggcgcgcgacgtagcggaggaataccgcggctatgcggcagtcacccgcgaaaagtacaacacgcttttctgggacgaggcgaaagggcgctatatcggcggcatcaacgccgacggcgagcggctggatttcggcttcacgtacgtcaactttatggcggtgagttacggcatcgcgagcgaggcgcaggcgaaacaggtgtacgactgggtggacggcgaccgtattatcgagggcgatacctcaacgggcgaggatatttacggcaagttcaaatacgccgcgcgctccaacacgctcgacgtgtccaccgtgaccgacgcgagcggcgcctactactggtacgaccatgcgggcgcgcttccctgcacgcctggctcgttcggcgggttcggcaaccagatgcagaacggcggcaccatcttctatatcagttactacgatctgatggggcgcatagcgggcgtgggcgcggacgacgcgttcggccgtttctcggtcattatggaggaattccataaggattcgctgcgccgcaacagttattcgcagcacggcgagtatatcgagggcgtcatcggcgagttccccgaaagcgggctcgtgccctatgctttcatcagcgggtttttgggcatcaatcccgacgtgaagggcttgaagatcagcccgaatctcccctcggacatggattatgcgggcatatccgaatactggtacggcaaccgcgaatattccattcagatctccagaacggtgcaaaagccttccgtcgagatccacgcgggcgtttactacgtgaccgtgcccgccgacaagacctactatatcaccgccgacaatcggctgatcgcgggttaggaggcagaatatgataaaatcgaaaggcaaaattttcactctcgccgcggcgttcgcgctgacggcggcgcttacggcgggcgtattcgcgcccgccgccgcggaagaggcgcagtttcccgtttatacgcaggaatttacctccgaagaggcggtcaacgcggactttttcgcgggctacgtcaacgcggtgggcaattccaccgtggcggaacaggtcggacaggacgacggccactggtttttgaaggacggcaaactcgtacgcgaaaacagcatcgacaaggatgcgggcacctggcgcgcagcgatcctgacgtacagcaagcaaacgttttccaactttgaaatggaagtggactacaagcagggcaaccagacgttctggtggacgggcgtcgcgttccgtcaggcggaggcgggcaaatccttcttcgacgacggcgcgggcatctttgtgcaggagggcggccaacccaccatgtggggcgccatcggcgtgggcggcccgttcgaaaagacgacctatccgaattacgaccgaaacgcatggcatcatctcaaactcaccgtgcagggcaataaggcaacgctgtccgtcgattcttaccccgccaccgaatggaatctgaacgcctccttttatcaggagggctacgtgtccctgatcagcatcaacaacgattcggcgtacgacaatttcaagatcaccgaacttcccgaacccgaaacgcccgaacttcctgatatcccgcccgtagaagaggcggacaccgacgacgcgctcggcaaactctcccaaaagacggatgatactctgatcgtcgagcgccccgtcaattaccgcaaaaaagagggaggcggctgttcttcctcgatcggcgcgggctttgccgcggcgggaagcgcggccgcggggcttgcggcgctggcgctcgttttgaaacggaaatagacttgaagaccatggttgcaaacatatgatattcgatataaaaatgtacaacacagaccgcagcatcatcgtggtgcgcagcgaaggctacgaatccatcttacggcacagtcacagtttcatcgagatcgtgttcgtggagagcggccgcgcattgcacaacgtgggcgaaagttgcgtggagatcgaaaagggcgacgtgttcgtcatcgccacgggcgaagaacacaacatccgccccgtctgcaaggagagcgactttaagatcgtcaacgtcgtttgtagccacgaactgtttgcggatatcgaatttcccgccccgaatcaagtgttttcccgtccggaacttcgttacgaggcgcaattcgcgctcatcgaacaggaatttgcggcggaatacggttcggaagagatcttatacctgctcgtttgcaacctggtcaactgtttcaagatcgaacgactttccgacgaacgaaagtctgtgcggggcaaactctcgtccaggaccatcgacgactatatcttaaacgcgaccgccttcatccaggaaaattacatgaaaaaactgctgctcaaagacatcgccgacgcggtggggctgtatcccgcgtatctgcagaaaatttttcgggaacaccgctccaccagcgtcatcgagtatctcatccgctaccgcatggaaaagagttgccgttttttgctggaaaccgaattgaccgtcgaggagatcagcctgttggtgggggtgggggatctgaaaaatttttacgtgaccttcaaaaaatatttcggctgcacgcccgtgcagtatcggaaacagcacgaccacaaataaaatttacagggagtcaaaatcatgaactcgggcatgaccaaaaaagagcgcgttctggcggcgctttataaaaaagagaccgaccgcattcccttttcgccgctttgcgacgattatttcgcaagttctctggaaaaacagaatcatccgtacgatttattgcgcgcgctgcgctacatcggcgcggatatcatcgaacgccacagcccctgctgcgaggtgcgctacggcggcggcattaccgtcgagagccgcgaagtcggcggcggcaagagagaaacgcattttatcacaaaatacggcgagatctacgaccgtttttattttcagaacggcgccatgtacacggaaaaacaccttctttccacgcccgaagacgtgaaagttatgacgcatatcgcccgtaacacgcagtatattccccgtttcgaactgttcgaagaacgcaaaaaagcgatcggcgacgacggcattcccacgcctacggcgccctgttcgccccttttggaaacgttgcaggtcttatgcgggctggaaaataccacctatcttttattggacgaagaggacgcgatgcgggagatgttcgccgccctccacgagcgcaacaaaaattattaccgcctgatgtgcgatctggatactcccgtcgtattcgcctacgaggacacgtcgaccaccatcatgtcgcgcgattggtttcagtcgctcgccgcgccctgcctcaacgaatacgcaaagatcttgcacggcgcgggcaaactgtatattacccatatgtgcggcaaactgagcggcttttccgaggatatcgcaaagattttatccgacggcatagactccgtctgtccgcccaccacgggcgatatggagtgttgggacgcaaagagcgccttcggcggcaaagtgatcatcggcggcatcgaaccttcctccctcgtcatgaaatcggaagaggcgattctgtcgcacgtatcggaaatcttggaaagaatgcgcggcggacgcggctttatcctctccacgggcgacgccgtgccgcacggcacttcggttgaacttctcaaaaaaattgccgatctcgttgcccgcgaagggtaaatcgcaggctcggctttcaaaaaactgaatcgcacgatgcgcgtctctttcggggcgcgcatttttttgcggaaaattttggaaaaggtattgacaactcgcagatcgtggtatatacttaattagtaaaatgattttactaaataatgtaaagtcataaaaaggggagagcccgaaggggagttcttccgaaaaaaatcccaggaggaaattgaatgaaacggaaacttttgatggttgtgctcgcgtttgcgttcgtgctttccatcggtctgatggtcgcctgcgcggacaagggcgacgatcccgtgacgggcggcgacatcacgctgactgtggaaaacgttccgaaaacgggcatggtaggccgcgaagtcaaactgcccgcggcatctgcgagcgactcgaaagagggcgatctcacggaccgcgtcaaactgaacgtcgatcttctgaaagcggacggcacgacgagcaaacagatcttattccgcgtcgccgcgaacaaggagcagaagtttacgccttccggcaacgaacttctcgactataagattacatatttcgtatccaacgacgcaggcgacaccaaggaagtcaaattcgacttcaaggccgcggcggataccgaagcccccgtgctgtctttggacaaaagcggagatttcgcgaatttcgaccccgcgacgggcgtgacgggcgtgcgcgccacgcaggatatccgtcttcccggggcggtcggcaaggagaccgcggacgattacgacgtgtcttcgcgcatcgaaacgcgcgtatatctcgcgagcgacgcagagtatgccgcgcccattctgaacttcacgggcggcgcgaaacagacgttccgcctcatcgagggaaactataaagtgcgtctgacgctctccgacgcggcgggcaacgctgccgaacccatcgaataccccttgacggtgagcgcgcccgatctgtccaaaaacctgatcctggacgcgggcaacgtgcgctgcgggttcgattcgcgctataactccacgctgcaacagttggagatcggccgtacatcctacggcagccaggcggacgactgcgccgctgcggcggtcggcgtatccaaactgcatgaaaattatgtgggtatcacgctcaatatcgatccctttcaggagggcggcgagcagatctacgatatcggctttgtcggcagcaaaaacggtactttgttctatcccgacggctccgagggcagttgggctccctatctgatcttacgtatcagcgaatcgggtacgttcgaacttcgcggcaccaccgcgggcagcggctcggaatcggacgcgatcgtcgcgttcacgggcacgctcaaagacgccaaggatcatacgctgtacataaaacatactttcaacatcgacgcggcggatccgagcaagtcgtatatccgttcgcaggtttgggtggacgttacgcccgataccgagatcaccgacgcgatgaagggcaaaaattacgccgaatacaaactggcgcgcggcacttccaacgtgaaagggcaactcgaatcggggctgttcgaccgtcttgccgacgaggcgacgggcgcgggctggctcacgttcggcgcggctacattctccaagaacgcgcagggacagtattacgacgatatcatgcgcatcaagggtgtttccatgtacgccgccgacgaaacggaattcgccgtggacatcgcccgtcccgttctgacgagcgaaggatctctgccgcagcgcgtgaccgtgggcgagactgtgacgcttcccgtctttacgagcacggaaggcgtggtcgcgtacgacgtgtacaaattcgattacgccacccgcacggtcggcgaaaaactcgcggtgaacgagcggaaagtcaagttcgaagaggcgggctactattatatcgtcgtttccgccaaggacgaaaacggcaatatgggctacgcggaccagatcgtcatctgcgccgtggaggacaacgaggcacccgtcattgacgtggacgataccgttatcaacgtgaaagtgggcgaagcgttcgacatccccgtggcgaccgtcaccgacaacgtggataaagatctgaccgaaaaggtcaacgtcggcgtggaaggtcccttctatgcttcgaatatcagcggcacgaagacttccattctgacggaaggcgaacattggctcgtctacaccgtttcggatttcgccgaaaacaaggcggaaaagagagtgaaagtggtggtcaaaggcgacgggttcgacgcgacgaaaaacctcgtggcggacaacaaagattacgaaaacggcgaactcatcgtggcgcccggcgcgctgtacgaatacggcgacaagtacgtgtacgatcagaaagtatccgttctgatgagcacggaatacgcggacggcagcaatcaacttttgcagatcaacctgcgcggctcctacgcggacggcaataaggaatggccctcgggcatcgtcatgcgtttcggcgcgacggcggatatctccctcatcaagcacgacagcctgatcgttgcaagcacctccaacgtgttcaataccgcttattggagaggggaagacgtccttttgcagtatcaggtgaaaaacataaaggtgggagacgccgattacgtctgctttatggtctggataaacggcaaagcagtgcaatacagcgtccagaacaagcccggcgtggagcctattctcgtcagcgagaacggcggcgcatggacgcagtctgaaagcggttttgtggcggtccccgtttccgtgttcgccgagggcggcgcggcgccgaggggcaacctctccgcaggccctatccgcatcgtcggatataacggctgggtggcgcacgtcaaagaactgtacgtgggcaaggaatatacgcagtatcccgccgacccgcagccgcccgaagggatcgaggctcccgcgaaagtgaccgcggcgcccgaactgaacggcgaacaggtagtcaacggcgcgccttccgataaaaccatcgcaaagggtccgcagggcgaaagcaaggtgtattttaaactcagaaagacgggcggcgaaatgtccctcgttctcacgggcgcggcaagcggcgaatggaacaacggcggcgggctttcgctgcattaccgcaacgattataacggtttctatatggtgaccaacggcggccgcgacgacgcggtttccacgcgcgacttctttttcaatacgggcgcgcttgccgacgacaccgattattatttcgcggtgcagatgaaatacgtttacaccgacgcgtcgcagacccgcgtgaaggcgatcgacgtttccatgtggttcggctcgagcgaggatgggctgtcagccgtggaaaaaacttttggcggagcggcggtcacgggcgaagcggggtacctgaacgtgagcgcgatgagcaccgcgcagatcacctccaacggcattctcattttaccctcgcccgcaggaacgaacaccatgaccgttacgggtatccgtgcggaacttgcttaaaatttcccgaaacggaagaaaagcggtgctttcaccgcttttctcttccgagcgtgaaggagtaaaacaatgaagaaagaaatcgccgacgggcaaaacgcggaaaccgcgcagagcgttccgctcacgggcgcaaaagtactgcgccgtcccatgaagaacaactcggtctgggcgcgcatttttaagcgctgggacttatatttgatgatggtccccgggctcttgtgccttctgatcttcgcgtacggccccatgtacggcatcattatcgcgttcaaggactacaaaccttatctcgggatcttcgacagcccctggacggacatgaacgggtgggcgaacttttactatgcggtcgcctcgcgcggatttctgaatctggtgcgcaataccctgatattgggcaccttgaaaatgatcttcgcgttcccgtcgtccatcgttttggcgctgcttttgaacgaactgcggctcaaatggttcaaaaaagtcgtgcagacggtttcatacctgccgtatttcatctcgtgggtcattatttcgggcatgctgtacgtatttttgcagaaagattacgggctgatcaacaaggtgctcgtaagcctcggcatggagcccgtgttctggtacgcggatcccggcaaatggcgcgcgatcctgaccatcacgaatatctggaaaaactgcggttggggcaccatcgtctttctggcgggctttacgaatatttctcccgatctgtacgaagccgccacggtagacggcgcgggccgctggaaacagacgctgcatatctccattcccggcattatgcccgtcatcatggtcacgttcgttctcagtatttcggggctcgtcaaggacgatttcgagcagatatacgccctcgtcggcacgaacagcattctatatgaaaaggtagacgtgatcagcacctgggtgtaccgccagatcagcaacgcaagtttcgaatcgtacggcaacggcaccgcggtcaacctgatgcagagccttttagcgctcattctgacgctgggcgccaacttcgccgtgcgacgcatgggctacgaaggcatttattaaggaggggacatgattaaaagaagcaagggcgaaaaggcgttcaatgtattcaatatcatcattttaacgttcggggcgctgctcttcatcatgccgtactggctgatcatatccgcctcgttcacggacgaactgacgcttttaaaaagcggcgggatctcgctgtttcccaaaaagttttccacctacgcctacgaatttttattcacgaccaacaattatatgctgctctccatctggaattcggtcaaaatgacggttctcggcacgctcatcacgacatttacctgtctattgaccgcctatcccgtttccaaaaaatatctggtggggcgcaggggcattatggtgtacatcatctttaccatgctgttcggcggcgggctgattccctcgtatttattggtatccagcatctttcccgataccatgtgggcgatcatcattccgggggcgctcgcgccgtattatctcattctgatacggaattactttatgtccattcccgattcgctggaagaggcggcgacgctggacggcgcgtccaatatgcgcatatttctgaaaatttatctgccgctgtccgttcccgtcatcgcgaccatcgtgctcttttgcgcggtttcggtgtggaacaactggttcggccccatgctctatatcagcagcaaggacaaatatcccattcagtacatgatacagcaacttttaagttccgtcgacagtatgctcggcggcagttcctccacggggctcatcccctcggaaagcgtaaagatggccgcggtcgttgcggcgtctttaccgatcatcatcgtctatcctttccttcagaagtactttatcaacggtatgatgatgggaagcgtcaaagaataaggaggttttcatgaagaaaataacaaagatcctgttggttttcctgattgcagcgctgtgcgtcggttcgtttgccgcctgcggcggcgggagcggcggcatgaccagcgacggccgatacattctgtccgtttaccgcggcaggagcagcggcatgatcgacggcaaggacgacgcgctcgtgaccgaggccatcgagaaaaagttcaaagaggacacgggcatcggcatcgacttgcagatgactctggaaacgaatacgtccattccgcagaaagtcgatctggactactcgaaaaaagacaaacagatggatctcgtattccattacgccagcgaggacgtaggctccgcgatcgtcaagtacgccaaagagagcgaatcggttaaggaagtggaggggcttttagaacagtacggccagcatattctcgccgccatccgccagggcgatacaaaccatatcgccgaaaagacgggctacgttctgcaggaaaacggcgaattgaaaatgaccatgatcccaggcgtgtacgcggaaaaacagtacggtatcctgctcaacaagacgtatatgaaacaggtgcaggataagacggggctggatcccgaaacgttcgacattgccaacgaaaactatcagaacatgaatttcaagcagttcgatacgctccttcgcgcgatgaaatccattcccgacgtgcagtactccctgacggggtatccctgggatatttcccgcgtcatcgcgccgaccttcggcgtggacgctatgagttacggcttgaaagacggcaaactcgtcccgtcgcaactcacagacggtttcgaccgctatatctccaccatgttcgaatgggcgaaggacggcttgtgggcgcccgacagcaacaacaagagcgaagtgcagatgcgttcggatttcatgatcggcaagagcggcgtgttcatcgcctatcccgagatcaacaacctcatccagttgcaccgccaggcgcgcgcgatggaggagaatgccgacaccgaatacatgatgatcgcaccccttgcggacgtggatgagaacggcgacacgctcatcgagaacggggagcccgtcgtgcacggatttttgaaaaacaaccgcgcgttcggcgccgtcattcttcccatgaaatccaaacaccccgagatcaccgtgcagttcctcgactggatgtacgcctcgcaggaaaattacgatctctgcaaatacggcatcaaggggcagcactggatcgagggccccgaaaaggtcatcaacggcgtgacctacaaaacgtgggaatatcccgccgccaaatacgacgaatatacgcagaatccgccctattcgggtatgtgggaacttctgcccaatctcaacgtatccaaccgcgtgcgttcggatctcatggataaggaaatggcatggtacgttgcgtgcacttcggaaaacgaggcgctcgccagcgtgacggaaggggtttggctgcccaaggtttcccgctcgctcgctatgcaggcgcagaccgtagacggcaaatacgtggaagacatccgttcttacgcctggacggggctgaccaacaacggcaaatcgcccgtggaaattttaaaggactacgttgcggaagtgagcgtttcctgcaaggaatacctcgacgcggtggacgcaaactaccagacggcgaaacagaaacttgccgaaaagtttgcataaacgaaaaggactgctcgcggcccttcttgacggagagtgaggcggcgcctcgctctccctttttttgataaggagaattgtatgaaaaaaacgatcgtgtttttactgaccgcgcttctggtgctcggcacgctggcgggctgcggcgaaacttcgccgcacggcgatcccaacgccaacaagaccgtgcccgaaggctataagcggctggagatcgaacaggattccaacggaaagcaggtattgggcgtggggaccgaactcgacccgcactttctttcctgcaacgcgggtctgagcggcacattccaacccgacagcaaagaatcgggcgaaaagtgggaagtcaaggcgagcgactgggacgatattttcgtgccgcgcatgaaagaaatgaatttaaaacgcatccgcaccatggttttgccccattatttctgcccgtccgaagcggcttacacctcgaaggcttacgactggcagacaacggagatgaaatcgctctatcaggtgctcgacacagcccaggaactggaaatgtacgtcaatctgaccatgtggggcgtggatacttcccattccgcatggctcgccgcgggcgacagcggcacctggtgctgcgaaccgcaggagggcaaagaggaaatttttgcggaactgttcgccaccatgatcaaatatctcagagaagaaaagggatatacctgtattcaagagatcacgctctacaacgagccgaactccttctataaccgctacggcgcgatcacggggcacgaattgtacacggaaatgtgcatcgccacggacgaggcgttcaaagaggcgggcatccgtcaggacgtgaaattcaacctttccgacgacgcgcgcgactccacctggctaggcaaatccgcggccactttggaaggcgtggcggatatcctcaattcgcatacctacgattttaccgaagaacacacgaacgcgcagatccaatacgaactgccaacttataatttaaagagttatatggacgccatcgaagacagccctctgccgcatatgttcggggaattcggcacgggacacgtggaaccgcccagcatcgcgaccgaccgccataccgaaatgcgcggcttgcagatcgcgcgcatcgccgccaatatgctgtatatgggctcgtgcgggttcagccactggccgctgttcagccagtactataaccgcccgtcctccgatttcgtaacggcgtatcctttcgaaatcatgaacatgggattgtggggctatgccgacgaagattacgcgccccgtcccgtctactatgcgtacagcctgctttcgcgctttgtgcaaacgggcgcgcacatctaccccgtggaaaccaacgacgcgaacctcgtcgccgtcgcgctcagaacggaggaagggaaatggacgtatctcgtcgtcaacgactctgcggataccaaaaatattgcctttgtcaacaacaccaaatttcccgcgtcgctcaaccgctacgtatacgagttgggaaacgtgccgacggacggaaaacagatacagtcggataagacggtcactgcggacggccgcgtcgtttccgacaggctcggcggcatgacgttcgccgtgtacagcgatcttgaaagcggaggtcggacatgaaaaagcggttggcagtctttttgggactgatgttatttgcgggcgtcgccgcgggatgcggcggtcccgcgggcaaaaacgatacgtaccttcttcccgacgggtataaggaacttgccgtcggccgcgccatggagaacgcgaccgacggcatcggcgtggaattcgacccgcattttttatcgcagaatatttccaagggcgcggcgaaagaggactgggagatcgtcagacgccgcacgaaggaactcaaaatccaaaaattccgcgtgcaggttttgcccgagtggttcgaaccggtcaacgacaacgacgatcccgataccgtgaattgggagaatatcaccaaagagaccgaggagatgaagtcgctctacgcggtgctcgacttggcggaagagatcggcgcgcacgtgaatatcacgctgtggggcgtttccaaaacggtaaaactcattcccggcacgctgtcgggtgaatttaaaaatcctttcgccgccgaggcgaacggcaaaaaacattttttgggcgagggcaacgattccaacaaaaactggatcatgggcgtcgccgaagagatggaagaggaatgggcggaaagtttttccatactcgtgcagatcctcaaaaaagataagaactattcctgcgtaaaagagatcacgcccgtcaatgagccgagttgggcgtattacgtgcaaaacgcgcagaaccccaaagacgaggcggattgggacggctacgtgcgtatgtgcaaaaagttggacgccaaattcaaggcggatcaaatacgcgacctggtgctgttcaatctgtcggacgacgcggaaaattacgactttctcgccaaaagcgtggaagaactgggcgagatcgcggaccttttcaactcgcacaattataaattcaaccacgatacgcccaaccaaaacatgacggaatgggaagatcgcaacgcggcgcagaccgcgcgggtcggcaagccgcactttatcggcgaattcggctccaaccagaaccgcagcacgagcacccgccagtacgacgtgtacacctacgagcgcggcgtgttcctcgtgcgctccatgctcaattacttcaacgcgggagccgtgggcatgagttattgggtgctgttcgaccaatattacaaccgcggcgcgtcgtataacgagttcatgcagttggggctgtggtgccataaaaaggatacgtacgtttccgaacccgaattgcccgcgcccgaaaccgattatcagatccgcccgcagtactacgcctacggactgatggcgaaccacgtttcgcgcggctcgaagatctatccgctgcgcacgggcgacgaactgatcgccgcctccgcctttttacgcggggacggcaagtgggtgtacgttcttgccaacagttccgacgcggacaaaaaattcgctttccgcaacgaattttacggcgagttcgacgtgtacgcctatgcggaagacgcgctgcccgcgggcgaagcgatgattgcggcgacggatacggcggcctttgaaaatcagtgcatgcccgttacgagcaaggcgcacggcgttctcgtactcgtgcaaaaataatgaaacgttcggcagcattccttgcggatgctgccatcgtctgcggaggaattatgcaaaaaacagacgcaaaatggatatggaacgcaaacacagacttcaacgcgcatcagtacgcggttttccgcaaagaatttactatcaaaggcaggtccgcggcgctgcacattacggcggattcccgctatcaactctatctcaacggcgaatatctcggattcggaccgttacgcgcctatcccgatcactataaaaaggacgtctacgaactcggcgggctgctgaaaaagggaaaaaacgtcctttccgtgctcgtcgaacatttcggatgcgatacctttcagtatctgaaacgggacggcgggctgttggcgtggctggaatcggaaggcgaaaccgtgtgggtgagcgatcggtcgtggaaagcggacgccgcgcgcgaatatgccgcgaacgtgccgcgcatcagctgccagcaaggctacgaagagcgggtcgacgcgcgcgcgtactgcggctggaaagaaattgtctgccgtaaaaagatgccgtccgcgctcgaattgcgcccttacgacgacggcctgcataaggaattgcaggagcgggatatcccttttctcacgcgtacgcccgtataccccgcgcgcctcgtcgaaaccgagcgcatcgtcgggaaaaacgctcaggtttgcctcgactaccgtaaaattctgccgcgcgacggattcgactgcacgccttggaagatcagcgcggggctgcttttccgcgtgcgcgcccgaaaggcgcatgttgccgaaatacgttaccgcgaatggtatcacgaagagatgctcgtcaacggcgcgcccgcggacaacggaaagttttctttccgccgcggcgaaaactggatttttctgcgcgaagagggcacgcgccattcgagcgtcgtcggtttttccctttcgggcgaagggggactcgccgtcgaaaacgcatatctcgtcggcccgtttgcgcccgatgaaaatatgacgggcgatttcgcacattacaagacggtcgcgggggaatcgatcggaacggcggaaaaggaaagtattttccaaaacgctgcccgcggctgtttggataagattcccgaaagatttctcgtcgatctgacgagcgatctgattcccgaaaacgtgtttttgcaatgctaccgcgagcccgccgaaccctgtttcggcgtacaggaacggcagtatctctccgaacggctcacggcgggcaattccgccgcgttgcagacgggcggggaagaaatacgtttattgttcgatttcggcacagaactcgtcgggtttctgtgtttggatattacggcggaagcgggagcggttttcgatttccacaatttcgaattcattcagcccgacgggcggaaaaatttcgcagagggcatgaacaacacctgccgctataccgcgaaagcggggcggcagaccttccgctttgccgtgcggcgcgggctgcgctactgctacgtaacggtgcgcggctgcgagagcgccgtctttcataagttgtacgtcgagcgctgttcctatccgcagacggggcgcggcgattttctttgcagcgactggaaactcaaccgcatttacgaagtcggcaaaaacaccctcgtcaactgcgcggaggatacgtttaccgactgccccacctacgaacaggtgcattgggtaggcgatatgcgcaacgaggcgctcgtgcattttatgatgaacggcgacaaagcgctctggctgcgctgtttaaaacaagtgggcgaatcgctggaatattcggatatcaccctatcgcaggtgccgagcggctggttcaacgtattgccctgctggacgtttctgtggatgcgctcaatctgcgaatattaccgctatacgggcgatcgaaagggcgcaaaagaactcgtgccgttcctgcgtaaaaatttcgaaggcatccgaaaacacgtcaacggcgacgagctgtttcagatgttcgcctggaatatgttcgactgggcggcgatggacaccccctgcgacggcgcggtgacgcacctcaactgtttcgccgtgctcgcgctttccgaaaccgccgcgtttttgcaggaattcggcgagccgtgcgccgcacagtgccgcacgctcgcggattcgatcaacgccgcgatcaaccgtttgttgtgggacgaaaacaggcgcgcctatgtcgactgccttcggtatcgggacgggaaacgcgttttgagcgaagtgttcagccagcagacgcagacgatcgcctttatgagcggcgcggcgcaaggggaaagaaaggagcgctgccgtcttttgatggaagcgcccgaagaggggtttgtgcgtgcgggcagtccctttttcgaattcttttatctggaagcgatgatgcgacggggcgacgatgcggcgtttatcggcgatcttttgcgcagttggggcaaaatgatcgacacgggctgcgataccttctgggaaatgtggacgtatgccgcgcccgacggaaggctgacgcgcagccattgccacggctggtcggccgcgcccgtctattttctaagcgaatacgtgctcggcgtcacgcccgtcgaggcaggctacaaaaaagtgcgcattcgtccgcacgcctgcgggctcgaatggtgccgcggcgcggtgcccacgccttacggcgacattcatgtgcgctgggaaatggtttcgggggaaatgcgccttacgtgcagcgtacccgaaggcgtggaaattgaatactgataatgataccggaggtaattatgtacgtagtggggtttgatatcggcggaacgaaatgcgccgttttgatcgcgaagatcgcgcagggaaaggtggattttctgtcgcgcagccagatctgtacggaaggctcgtggcagagcattctggaccgcctttgcgaaatttacgagtgccaactcgcgcttctggaactttccaaacaagatattacggcggcgggcgtgtcctgcggcggcccgctgagcagcgaaaaggggctcatcctgtcgccgcccaatctgccggggtgggacagcgtgcccgtatgcgcctatctgggcgaaaggctgggggtaccggtccgcctgatgaacgacgcggacgcgtgcgcggtggcggaatggaaattcggcgcgggcgcgggcaagaaaaacatgatatttttaaccttcggcacggggctgggggcggggctcatcttaaacggcgcgctgtacagcggcaccaacgacatggcgggagaagtggggcacgtgcgtctggaaaaagacggccccgtcggctacaacaaggcgggctcgttcgaaagtttttgcagcggcgcggggatccgccagatcgcgcagaaatacgcggcgaaatgcctcaatcacggcgatcccgtcagtttctgccgcgacgcggactttatccccaagatagacgccaagcgcgtcatcgaatgtgcggaagaggggcacgaggacgcgatcgccattttgcgcgaaacgggcgcctatttcgggaaaggtcttgcggtcttggtggatatcctcaatcccgaactgatcgtggcgggcagcgtgttcgtgcgcgcgcacaaatttttgtacgacagcgccatggaaacgctcaaagccgaggcgttgggcgcgtcgcttgccgtatgccgtcttgcgcccgccatgctcggagaaaaaataggcgattacgcggcggtcgtcgcggcgacgaggggacaagatgaaattatttgaacgttctttaaacggcgaatggcaactccgccccgctggcggcggcaaaactatgcgcggcaacgtaccaggcgacgtcagttacgacgcgtttttaaacggcgaaaagcccgactaccgcgcaggggacaattataaactgtacgccgacctcgtgcaaagcgacttcgaatattcccgcgaactgaccgtcgggcgcgaattgctcgactgcgacgacgtcgttttacagtgcgacgggatagacaccttttcggaaattttcgtcaacggcgtgtcggtgggtaagaccgacgatatgttcatgcaatacaaattttccgtcaaagcggcgctgcgcgagggtaaaaacgagatcagaattttgctgcgctccaccctgaaagagatggaaaagtttgaaaacgaccgctacgtatccattttcaacgaaaagagaatcttcgtgcgcaaggcgcagtgccatttcggctgggattgggcgcccaacctgcccgggtacggcgtgtggcagggcgtatcgctgtacggcgaaaacaagtaccgcatgcgcgatatcgcctttttcacccgccgcgacggcagtgtgcgcgcggaaattacttggagtttttccgattatttcgacgaacgcgccaaagacgacgaggcggttttggaaattttcggggacgaatcgctcacccttcccgtgctcggttgcaaggataaactttgcggcaagaagagcgttctcaattttcatatcccgaacgtgcggctgtggtggcccaacggatacgggaaacaggaattttattacgcccgcgtgcaattgatgcgcgaaggaaaggcgctcgataccgcggtgcggcggtttgccgtgcgcgagatcgaactcgatcagagcgcgtacgacgcgcactccaatatctgccgtctgaaagtaaacggcgcgcccgtgttctcaaagggctccaactgggtgcctgccgactgttttgcgggcacgctggatgagaaccgctacgaaacgctcttggaacttgcgcggcgggcaaacttcaatatgctgcgcgtgtggggcggcggctattacgaaaaggaagttttttacgacaaatgcgacgaaaagggcatcatgatctggcaggattttatgttcagttgctgtgatattccctatgattcctttgaatttatcgaaaagatcaccgaggaatcggaaaacgtattcgcccgccttcgcgctcacgcgtgtatcgcgctcatatgcggcggcaacgaactcaaaggcacgctcgacccgaccgaagagcccgtgtacggtctgccgttcgtcgattattttctgcgcggcatcgcgcagaaatggtttcccgatctcccttacgtcaatcaaagtcctttcgggtttaccgaagtcgccaacgaccttcaaaacggagacacgcataccaactgctacgaagaggcgatcatcggcggagatatggcaaaataccgcggcgtgctggcgaaaaaccgcgcggcgttcttttccgagtgcgcggttctggggccctgccgctaccgttccctgaaaaaattcatgcccgcggagaaactgtggccgctcaacgatctgtataccgagcgctttgtgtcgaatccctattcgccctgcccgctcacctttgccgagcgggaacttttgacggcgcgccaactgttcggcgccgtaaataacgcgcgggagttctgtcacaaaggcatgcaggcgcattacgaaattttgaagagcgagatcgagcacgcccgcgcgcagcgtttttgcggcggctttatgaactggatgtacaacgatatctggcccacgggcacctggtcggtggtggactactatctggaaccgaaatccgcgtactacgccatgcgggaggcgttccgccctctgcacgccttttttacaaaggaaacgggcggattccgcgtcaacgtcgtcaacgatacgatgcgcgaagccgcgggcacgctcacgctgtgcggcaagcggctcggcggcgaaattttatggcgcgagcagaagtttgtgcgcgtcggtaccgcgaatatcgcctttttccccatgcttgcgggcagggagcgcgccgactactggacggcggaatttgccgcggaaggggaaattatcaagagcgtgtatttcccgaatttatggaaactgccctttcaaagcgactatacgtacgaggtcgcggaaacgaatgggggatactttgtggatatccgcgcccgcgcgttcgcccgcgccgtaagccttgacgtcgccaaagagaacgcgcgcgtttggtattcggaaaactttttcgacctcgaggcgggggaaacgcgccgcgtatttttggaaacgagtgaaacgttgcgcgcggaggatatccgcgtgagcgattttacgaaattgcccgaagaataaaaaaagaggggatatcccctcttttttatttgtagttttttgcggcttgcaggaaatagtggatattttccgcgctcacgtcgccctgtatgttgtgggcggcggcgaaaatgtagccgccgctttcgcggaaggtgtccatcagatttctgacagcctctccgatgctctctttgttgccgcgcggaagtacgctttgcgtgtccagtcccccgtgaaaggcgatgtttgcgccgtacgtttctttgagtctgcaaggcgccatatccccgctgcacggctgtatgggattgaggatatccacgcccgcctcgatgagcgaggggatgagcgagaacacgttgccgcacgaatggtgtaaaaatttcgccgcggtcttttctttggtaaagcgcacgcgctccttgaaatagggcaaaatcatttcgtcgaacatggttttggaaaagaacgtggaactctgcgtggcgaaatcgtcgccgctggaagtgtagtggatataaccgccgatcgctccgtaatagaggtcggaaacctgtttctgataggctaaaacgcgctcgaaaaagcagtgcacgacttcgggctccgccgccatgcgatagagaaaatcgtcgaatccgaacatccagcagcccagttcgaatatgccgtacacggggtgcgaggcgcagatcacgtaatcggtgttttcatacagatattttgcctgccgtttgatcgcgtccagcgcttttacgtcgatcgaatcgggatcaggaaagggataattttccacgtctttgaggcccgcgtcttttaggggcgaatctacgatatcccagtacaagcccgtaaatttgcgcgtaacgccccattcgtccacgtacgccgtatcgtctatcttgcggtacaaactctttttgggcgcgaggatatatcccaccccgcgcgtgtcgatatcgtattcgcgcaaaatgcgctcgtcgatggaggcggtcgccgcaaagggcaggcgctcgtcctcgtcattcccgtaaaagcccaaaaagtctttcattttggcgatcaccgcgccgtccgccgtcgagagcgggcatccgccgaaatctacggtcatcttttgcggcgcgcggtgcgaaaccgtgtctaaaaaatcttgccttctcatgttttcctccctgaaactcattttgccaccgaatccgcgtcgaacgaacgatcgaacgcggcgatctgtctgagatacgatctgtatttttcgagatcgaagggcggtttgccgtgcagatagtgatttacaacggtttcgccgccgacgtgcaattttaacagaaataatttgtgcgcgcccgtagaaacgcgcacccttcccaccgctgtgttttcgtttgctgggctgaaaaattcgcccgcaagtacggtttcgcccgtgtccgcgtcgatgacttcgtattcgcccttcgcgtctttcgagccgtcgttggcgacgaccgcttccagatgccagttctgaggctcccgcatcattaggaccacgggcttttgcacccgtttgatataatagtaggcgagttttttctgtccgtaataatcgcagaccgcgtcggaaaactgcggccagccgtcctgtatgttccaccagatgatgccgctcttatcccatttcgagagccgtgcccattcgatgaaaaactttttcgcctccgcctgcgaaacttgcgaggcgaacgcgaacgtctgtaagttttgcgcctcgatgccgaaaaattcgccgatttggtcgctcatcagtttcaggcggtaactgaaaaaatcgcctttgccgtcgggcgcggtgcagtgggcgatccactcgtcgttgtcctgccacggccataacttgtcgggcgaaagaaattttttcatcgaagatacgttcgggcagccgtgataaccgatctcgctgataaagtgcgctttcgagcccgtgtaatagtttgccttgaaacaatcccgcggaccccacagatgattttcgggcagcaaattttcatcgcgtgtttcccatgccgagggcgatacgtagggcgatgagggcagataggggcggaacggatcgtatcgaaagagcgtttcgggaacggtcttccgcgtgatcagattgtttgcggggtccatttcgttgaccatcagcccccaatcgcactcgttgtcgccgcaatacagaaggagcgcgggcgaattgcgcacgcgcaggcaaagttttttcacttcctcgcgcatctgtttctgaaatttttcgtcggtcggcaccatctggcacgccatcgcgagatcctgccatacgaaaatgccgtgatccgcgcaaaattcgaaaaaccgatcgtcctcgtacacgttcccgccccaacagcgcacgatattgcagtttaagtcgcgcaccttatccaaaatggcggggatgcgttcctcgtcccgcgcgtgcagcgcgtccgcgggcacccagttggtgcccttgcagaagacggggattccgtttaaaagcacgcggaatctgccgccgttttccttgcccgcgaggtctgaacgctcgatttcgacggtgcgcagcccgaaacggtattgcttttcgtcgagtactacgccgttttccgaaatcagcgaaacgcgcgcctcgtacaaattcggctcgccgtaatcgcgcacccaccagagtttcgcttccgcaacgtcgatgcgcgccgtcgaaacgcaaaaattcactttttcggcatagtctatctcgctgtcgccgcactttgccgaaagtctgagcgtcgccttgccgtacagttcgggcggacagcggagggaatactggaaccagagcgtcgcccgccgtgtatccgcgcgcagtgtggcgaaataacagttttcgatcccgatatctttgcggaataagatctccgccccgcgccagatcccgcccgaaagcaggcggggcatgatatcccaaccgaacatatgcggcgcttttctgagccgtacgctcgcgaaattgaggggaaaggcgaccatataggcgtaatattcctctttcgaggcggcgcgcacgggcgaaaagatatgtacgaacagccgattttctccgatcttcgccgttgttgcgatatcgaacgcgtgctccacgagcatattgtcgctcgcaccgatctttacgccgtttaaaaagtattccgcgatcgtgtccacgccgtgaaagacgagataagggttgcccgccgactgcttttcgtcgagagaaaaggagatctcgtaccacaaatcgtacaattcccgcccgcgcagggataaaatgttgttgccgaaataaacgtccccgatttttcccgcgttcataagatcgatctccgcgttcgagggaatggcggaagggatgctctccctccccgcaagatcgtcgggcgtgcgcaccgaatcgacgtctttgatcagataaagtctgcacgcgccgcgcagtgacagcggttccatatttctttcctcccttatggctttttcctattatataataaaaaaaacggcaagtcaaacaattagtaaaataattttactaatacacttgcaaacgggaaaaagttttgatataatttagaaaagcaaaaaataaaggggcagaaatgaactcgaaacaactggtgaaaaacgcgatcgcgggcgcgggcgtcgaccgcatacccgtatatctgttcaacaaggatatcgaacaatcggatatcgtttcctactgcgtggaaacggcggaaagttttcacggcgacgatccgaaccgttcggaatggggctttttatgggagcggctcgacgatacgatggggcagcccaaagaacccgtcatcaaagactgggcggatctgaaaaattatcgcccgcccgacggcagggaccgttcgcgccttcggagccttcccgcctttttggaaaaatacagagataagtatatcgttgcggggttcggcatcacggggttcgggatcctgacctttttgcgcggattcgaaaatacgctggaagatctgtatctggaacgcgagaatctggaaacgctcgcggatatggtgttcggatacgaggaggacgtcatccgccgtctcgtcgaaacggatatcgacgcggtggcgttttacgacgattggggcatgcagttttcgctgatgatcagccccgcgctgtggcgtgattttttcaagccgcgctacaagcgccagttcgacatcgtgcacgcagcgggcaagcacgtttattttcatagttgcggctatgtgtacgatattttggaagatctcgtcgagatcggggcggacgtattcaatttcaaccagcccgaagtgatggggctggaaaaattggcgaaattccgcggcagagtgtgtttcaactgccccgtcgatttgcaaaagattgcgatcaacgccgaccgcgcggcgatcgagacgtacacgcggcggctcgtcgaaacgttgggcacgggatcgggcgggtttatcggctacgtggaagagtaccattccatcggcctttccgatgaaaattacggttacatggtcgacgcgctgcgaaattatcggccatgaaaaagtttatcatatgtttattgtgtgcgctgtttttattgcccgccgcgggttgcggcgcgccgaaggaggaaaatgcaatgaaatacggtctgtcaaatcaaaacggaacgctcgttttcgagggcgcgccctacttcggcatgggcgtcaatttttacaatctgttcaacagttcgttcccgaaagaagagggggacgcgttcgacgtgtccgttgccttttacgggctgaaagtgctggctgaaaacaagatcccctatgtgcgcgcaaatctgggcggctattactggcacgaactgcccgtctatctcggacgcaaagaggaataccgcgccgcgatcctgaaaatcgcaaaagaggcggagcggctgggcgtggggatcattcccagttttttctggctcattcaatgcgtgagcgattattaccgcgagcccatgcgcgcctggggtgacgaaacaagtcttacgcggcgtttcatgcgggaatacaccgccgacatgaccgcgcttttaaaggactgtcaaagcatatggggatgggaattcggcaacgaatacaacctcggcgcggaccttcccaacgcggcggaaaaccgcccgccgctatacgacggcagtccgcgcgacgcgtccgactgcatcactttgacggatatcgagagcgcgttcggcgagttttccgagatcgtgcgcgaaaacgatccgcacgatcgcatgatcaccagcggcaacgccacgctgcgagcgtcccagtacaatatgcacgcctacggcgcctggatacaggataccgaagaagagcacgaaaaggtcaccgagaggtttcatcccgcatatatggacgtcgtcagcgaacacatttattttcggaaagaaaattatttcggtagggaaatgacgctcgaagaatatctcgcgtatacgacggaaatgtgcgcgtcgatcaaaaagcctctccttgtcggagaattcggtcacaacgatctcaccgaacccgagcctacggaggaaagaaaagaggcggcgtaccgctacatggcgggctgcatggtggatttcaacgtgcaggcgagccttctttggaattacgacccgctcggcggcatcgaatacagtttcaccgaaacgagccgcaaggggcagtttctcttcgcgctgatacgcgattgcaacgaagaatacgcgaaaaagacgaaataaaaaaagaccgacgcgcgtcggtctttttcgttacagtttgagatagtgatagagcacggtgcacgcgccgccgagcgcctgctgcgccgaggcgatggaggcgcgcatcagttgcacgcgcttgtatcccgacagcaaaatgcggttgttgatctccgattcgatataggcgaaatatttgtcgctgagttgcgcgtacacgccgccgatgatgatcgcctcgcagtccagaatattcaccgcgttgatgagaccgatgatcagatgatccagactgcggaacagcagtttttcgccttccgcgtcggcatcgcagaatgcgagcagttgcgaaaagtcggtaaaatctttgccgaaagcggcgttgaacttcgcgagcaccgcgttctggttgataaacgtttccagacagccgcggttaccgcagtaacagagttcgccgttcgggtcgatacaggtatgcccgatctccgcgccgctcgaccgcctgccgttcaagaggcggtggttggtgatgatcccgacgcccacgccctgcgtggcgagaaaatagatgaaatcgccgatattttttcccttgccgtacatctgctccgccagcgcgcaggcgttgccgtctttctggatataggtggggatcttgaatttatctttgaggtagcggcatacgttgaaattattgatcccgaaaaaattgggcgggttgatgatcagcccgttttcggcgtccacgggccccggcgtcaccacgccgatcccgagaatgtcgttgggcttgtagcgtatgacgtattccagttccgattcgatcttatgcaaaagcgattgcagattttcgccgctgagtttgattttttgctggatgatgatattcagtttcatgtccacgcgcgaaacgcttaaaaaatcgcggccgatggtcacgtcgatgatatgcggcgcctcggggtgcacgacgagatagatgggccttcgtcccggcaggctgtccttggattcctgcgtgcccgtttcgcagatcaatttgttctggatcagttcgttgacgagattggtgaccgtcattttcgtcagtcccgtctttttggcaaggccgatgcgggtggtgcagtcatccaagatcaagtgtctgagtaatgtattcaaatgctgttctttgacaagttgtccgcttttgatattgttttttgtcatttcgtttcccacctctgcctgcgcatgaaactctcattcttccctaatattataaaggaaaatgatcgaaaggtcaatacaaaacaaaataatccccaaatcttttggcgcgctgcaaaataatacgatttttgcgcaaaccaggacgtggcgccgcgcgcgcggatgtgatatactgattgtatacgcaaaaagcaaagaacaggtgatatcatgaaaatagcgatcggcgtagatacgggcggaacgtataccgacgccgtactctacgatttcgacgaaaagaaaattctggcgggcgccaaagcgctcaccaccaaagaagatctgtgcatcggcatcgcgaacgcgctggacgcgctgcctcaagaactcttcgcgcgcgtgcgcatggtctcgctgtccaccacgctcgcgaccaacgcctgcgtggaaaacaagggcggcaacgccaaattgatatttttcggaggcgataaggtcattttggaccgctacggcgcgcagtacggtctgccgccctcctccgagatctggataccgccctgcaagacggggctggacggcagtatcccgcagccgcccgactggaaaaaattcgaaaaagaggcgcccgcttttttgaaaaacgccgagggcgtgggcgtcatcgaactgtacgccatgcgcaacaacgccgtcatcgaaaagggcgcgaaagagcggctgcaaaacctttcggacgttcccgtcacctgcggctgtgaactgttcaacgaactcaacagtttgcagcgcggcgcggggacccttttaaacgcgcagttgtatcccgtcatccgcgattttatccgcgccgtcgaaaaggtgatgaaggcgcgcgggcttgccgcgcccgtggtcatcatgcgcagcgacggcagcctgatgagcgaacaattcgcccgcctgcatcccgtggaaacgctgctttgcggtcccgcggcgagcgtgatgggcgggttcgggctgaccgacgagaagaacgcagtcatcgtggacatgggcggcaccactacggatattgccgtcgtcgtggacgggatccccgtgcgcgcgggcgacggcgtttccatcggcaaatggcgcacctacgtcaacgggcttatgatccgtacgttcggtctgggcggcgacagcgccgtgcgctaccgcgaccgcaaactcgttttggaagagttccgcgcgatcccgctgtgcgtggcggcggcgcgctggccgcagatccgaacgcgcctgcaacaacttgtggacgagggaaagatcgtgcattcgcatttccgtcacgagttttacgcgctcgccaaagagcccgatcttgcacgcttgaacgaggaggaacgcgcgctttgccgcgccctcaaagacgggcctcttattctggaagacgcggcggccgcgatggggaaagatctgtatactttccgcattccccgcctgttgaaggaggggaccgtgcaggtgatcggactgacgcccacggacgtgatgcacgtgcgcggggatttcgagcggttcgacggttccgtttcccgcatggcggcggatatcgtggcgggcaatctggagatcgcgaccgaacaactctgcgaacgggtatacgcggaaatacgccataagatgtacgtgaatatcgtcaagatcatcctgcaataccaggacggcttttacaaaaacggaaagttcggcgaagagagcgaccattggattgaggaatgctaccgcaccgcgctcggccagggacgcggcgtggcgcaggcggggctgaaaacgaatttcaaactcgtgggcatcggcgcgcccgtcggactgtttttgcccgaggtcgcgcgacttctgggcacgacagccgtgatacccgagcatgccgaagtcgccaatgtggtcggcgcggtcacgggcaacgtctacgccgcctgcaccgcggagatacggcagaaaacgggcgaaggctttatcgtgtacggcaacgccgaaacgcgggaattcgaaacgctggaagatgcggaggcgttcgccgccgctgacgcggagagcgccgcccgcgccgaagcgaagatgcgcggcgcggcgggcgagatctccgtcgtcacccgttccaaatacagcacgtccgccacacagtacgacgacgatgaggaaaagttgtttctgggcgccgtcgtcaccgccgaagcgatcggctcggtggggtttacaaaataaaaaacgcggat

SEQ ID NO: 3825 - DNA, 32759 bp, Unknown
  16S sequences of unknown bacteria
tgccgcccgccccggtgtgccgcgtctttgccgacgcaggcaacaccgccgtgggctataaccgcgacatcaatcgcgttgtggcaaagctggaagccgcgctgaatagcgccggggtgtgacaaaagccggacgggatttttcccgtccggctccagcgtgtcgacttcgtcgacacgctgctggacggggatgccggatcgcggcggctcgttatactcgccttgctccctctatccccgccagtaccacccctgctcttgaaaaataacggaaacacacgtgtttccgttatttttcgcctataaggtgtgtttgcgaggcacatgtcctcgcaaacaccgatcggtaacccgcctccgtttttttcgttttccgaatggcggattccctttttcgacagcctgaagccggacgggattcctttcccgtccggctcttctgtaaaccgttgactttttccagcgcttatgctatagtaagggtagacaaggggcgcttgtggtggagcctctgtcggcccctagtccctacgctgtgctagagcgtagggactattttactttcacggcgttcaccgctaagagcaggagcaggacagccagacaaagtatgtaccgggcaacctttttccccatcggcctcacctcccttctatcggaggtgtgcgccccttgactaccatatactaggtaagggatgaacacatcccgcctagcggctcagcggcggcttggcgggaaattttccccacaaaggcgtcaaaagtcctcggaatacgacggtattcctgcggtttttccttgttgtggagaaaattcccttcgccaatccatccgctggacgtattcatcccttacctggcacagttccatcgagatgtcaaaagcttttccccggtttttccgcaccacttatcggacaaagctgaaagtggtggctatatataggaagttttcataatttttttcggcatttctattgacagcctgtcctcgcggctctatactgaaggtaagcgaattccccgccttcagaaaggagcgcgcgtatgaaacagtccacccgaccggccgccgtgacggccgccgtcatcctggtgctggagctggccggcgccgccttctgggggcacgccgccctgcaccgggaggcgtacgcgcgggcctacaacctgctgcccatcgcggtgctggagctggcggtgcagcccctcatgctggcgggtgccgcctatctgctgctgtgggcgctggaccggctgttcctatccccatattcatggcagaagaagaccgatgtcgcgtccaagacgcgacagggaggcgccctctgtcccgtcgggcgggtggccctgcggctgctggccgccgccatggtggtggtatacttggccctcgtcctggggggcctgttcggccgggtgtccggcctgacggtcgagtggctgctgcggctgcggttcctgctggtgatccccggggccgttctgtacgccggcatgaaagcgccgccccccgcccaggaggagccggcggactaaaccagaaaaacgcgcacggttttaggtgcgcgcctttttagaagaaatggcccagcggaactcgttccgctgggccatttcttgcaaagcggcggaacccggcccggattctccgctcatggcgcgcccctttgaccgtgcgcgttttcttatagggtaaccggctccttttcggggacgcggctggcggcgtcctccacgccagcatccttggcgcggatttccacccggcggattttgccgctgatggtcttgggcagctcggtgacgaactccaccacccggggatatttgtagggcgcggtggccttcttgacgtactgctgcagctccttggccagggcgtcggagggcggatactggctggtcagcacgatggtggccttgaccacctggccgcgctccgggtcgggcacgccggtgatggcgcattccagcaccgccgggtgctccatgagcacgctctcgatttcgaacggcccgatgcggtagccgctggatttgatgatgtcgtccagccgcccgacgtaccagtaatacccgtcctcgtcgatgtaagcggtgtcccccgtgtggtagaccccgccctgccaggccttggcgtacagcgcgtcgtcgttattatacgcgctgaaaatcccgtactgccgcccggttttgcaggggcgcaccacgatttcgcccacctcgccgggggccacctcgttcccctgccggtcgacgagggccacgtcgtacaggggggagggcttgcccatggagccggggcgggtctcgctgcccgccaggttggcgatgagcagggtggtctcggtctggccgaagccctccatcaggtggatgccggtgttctcgagaaaccggcggtacacctcatagttgagggcctcccccgcgttggtggcgtattccaggctggacaggtcgtacccgtccatcccctccttgatgaggaagcggtagatggtgggcggcgcgcagaaggaggtcacccggtacttctggatgatccccatcaggtcggcggccacgaatttgtcgaagtcgtagaccatcacccgcacgcccgccagccactggccgtagagcttgccccaggaggccttgccccagccggtgtccgccaccgtcaggtgcagcccgccctccttgacgttctgccagtggacggccgtgacgatgtgggccagggcataggtgaagtcgtggatgaccgccttgggatagccggtggtgccggaggtgaaatacatgatcatggggtcggtggccagggtgtccgtccgctcgaggacgggggaggcggcctgtaccgcctcgtccaggaaaaggaagccctcctttggctgccggacgatgcaggggatcgtcagggtcgggcagaccttccgcgcctcggcgacgtagtcggccagctccccctccggggtgcagaccaccgctttgatggaggccgcctgcacccggtagacgatgtctttgacggtgagcatgtgggtggcgggcacggccacggcccccagcttgtgcagggccaggatggtggtccaatattcgtggtgccgcttgagcatcagcatcacccggtcgcccttgttcaccccggcccgccgcagggcgttggccgtccggttgctcagctctcccagctccccgtaggtgaagcggcgctcttccccggccacgttgcaccagaccagggcctcgctatccggctcctcggccgccagcacgtccatcacgtcgtaagcgaaattgaaattgtccggatggtggatggaaaaccgcgtgagggtgccgtgctcgttaaattcctcctggcagaagcgtttgtacagctgcatattcatgcccaacctttctaatgtcaaagccgccgccgttgggcgtcagcctccgattttgcggaagcgatcgtaccgggcgcgcagcaggtcctccacgggcagcgcccgcttctcggccagcttgtcggccagcgcctgcccgagagaggcagaaagctcgtcgaaatcccgccccttttccggcaccacccgttccaccacgcccaggcgcagcagatccgccgccgtcattttcaggcattcggcggcttccttgacctttttcgggtccttccacaggatgctggcgcacccctcgggggaaatcaccgaatacaccgcgttttccagcatccagacctcgtcggccacggccagcgccagcgcgccgccgctgcccccctccccgacgaacaccgacaaaatgggcacccgcagggtcatcatctccatcaggttttccgcgatggcctggccctggccccgttcctcggcccccacgccgcagaaggcccccgccgtgtccacgaagcagaccaccggccgcccgaacttctccgcctgcttcatcaggcgcagcgccttgcggtagccctcggggctgggcgcgccgaagttgcggcggatccgctccttggtggtgtcccccttctcgatggcgacgaccgtcaccggctcgccgtgcaggcgggccaccccggccaccaccgccccgtcgtccccataccggcggtcgccgtgcagctccaggaagtcggtgaagatatgctcgatgtaggcgaggcccgtgggccgtcccttggcccgggcggccagtaccttgtcgtaagcgctcatgcccgcggccccctttcgtgcagcgcgagcagcccggcgatgacccgccgctgctccttgcggggaacgatgcagtccacaaacccgtgctccagcaggaattccgcccgctggaagccctcgggcagcttcttgttggtggtctgctcgatgaccctttgccccgcgaagcccaccatggccccgggttcggccatgatgatgtccccctccatggcgaagctggcggtcacgccgccggtggtcgggtcggtgagcaccgtgaggtagaacaggcccgcggcgctgtgccgccccaccgcgccgctgaccttggccatctgcatcagggagaggatcccctcctgcatgcgcgccccgcccgagacggtgtagcccaccaccggcaggccggcctcggccgcgtgctcgaacaggcgggtcagcttctcccccaccaccgtgcccatggagcccatcataaaatacggctccatgacgaacagggcgcagcggcggcccccgatgcgggcggtgccggtgaccaccgcctccttctcgcggcaggccagccaggcgttctccagctttttgggatagccgggaaagcccagcaggtcccggcttttcatctccccgttcatttcctcgaagctgtcggggtcggtgatgaagctcacccgctggcgggcgttcatgcggaaatggtggccgcaggggcagacgctgtggttgttccacaggtcgcccaccggcaggcggcggccgcaggcggggcagagcttggtctgcaccgtggtgtccgcgtcctgccgggcaggcgaccgcccgcccttctccagctcgttgttcggcgtcttgaaaagccccaaaagctgcataaactgtcacctgactttctaacaattgctaatgttgatgagtgttgtttagtttctacctcgcccaccggggcgctgccctatcgggcttggtggaggtatgcgggacagaaccccgtactcctctcgcggctgtgagccgcccgcaccccgtctttctttttcgtgcgtgaaaaagaaagacgggggagaaagaaaaagccttatgtacctttccggcggggagaggccgacattgtgcctcgcggcgagccctgtgtcgctgcgggctttggccctccgcaagagaaataaaaccttttagacactgtgtcgccgctggtgcgcccgctaatgcccacgcggcagcagcgttctgctttctaccggccccgcctcgcctgtgcgtagccacacgttgcggaagtcgggcgaccaactccccaggggctccgctgcataaggagaaccaagagacaagggcggacgctctgccgctgccgggctcgtcggcttaggccgccgagcccatacggggatccgtaggaaggtagccgcaagtgagaatttatccgtgctcgattgatagggctcgccgtcctaagacggggagaccccaccggattgtacaatttgggtgagcgcccaagtatactacgcgcgtcagcgcgctcgtagcgcgggaaaaggacacgcttcccggcagataggcgctgttgcgaactatagcgccgaatatttttcaggatgtatttcctacatggggggtgaagaacggggcgcagcctcgttcttccagtgggggtctcccccacggcgcgatcgcaatctcaagcagataggacggaaaagattcgacgtgttcttttcctgcgcgtctgttggccatgttttttcttttctcccccttcttttctttttccggaaaaagaaaagaaggggtgcgggcggctcacagccgcgagaggagtaaggaattctgccccgcatacctgcataaaacccgatagggttatattgccctggcgggcaatcggggaacccccggcgtatcaccggtttttcataaaatcggtggtatacgtccccgcccggaacgccgggtccccgagaatctccagctggctctcgatgttgaccggcacccctttaatgaccagctcgcacatggcggattccatcttgcgaatggtctcctcccgcgtaccggcgtagacgatcatcttgccgatcatcgggtcgtaatagggcggcacctcgcacccctggtacagcgcggtgtcaaaccgcacccacggccctcccggcacgtggaggaaatccaccgtgccgcagccggtggcgttgacgcggcattcgatggccgccccggtcagccggatgtcctcctgggtgaaatccagggggatccccgccgcgatgcggatctgccacttgacgatgtccaccccggtgacaaactcggtcaccggatgctccacctgcaggcgggtgttcatctcgatgaaatagaaccgcccgtccccgtccagcaggaactccaccgtccccgcgcccaggtagcccgcggccttcgccgcccccgccgccgcgtccatcatctcctgccgcaaggcgggggaaatggcggaggagggggtctcctcgatgagcttctggttgttcttctggatggagcattcccgctcgcccaggcagaccacgtgcccctgctcgtcggcgagcagctgcacctcgatgtgcttgaccggggagaggaacttctccatgtacacccgcccgtccccgaaggccttttccgcctcggcggccgcggtgtggaaggcgttttccagctcctcctccccgttcaccaggcggatgcccttgccgccgcccccggcgctggccttgatgagcacgggatacccgatgcgcgcggcctcggcccgggcctgctccaccgattccagcagctcgctgcccggcacggtgggcaccccggcctccttcatcaggcgtctggccgcgtccttgtcccccattttggagatgatgtccccgtcggggccgatgaaggcgaggttctgctccttgcacagccgcgcgaaagccgcgttctccgacaaaaagccgtagcccggatgaatggcctgcgccccggtggccagggcggcggccagaatattctgctggttgagatagctgtccgccgacgcggccgcgcccacgcagacccgctcgtccgccagggccacgtgcagcgcctcctcgtccgcttcggaatagaccgccaccgtggcgatccccatttccttgcaggcgcggataatccgcacggcgatttctccccggttggccaccaggatttttgaaaacatactgtattcatcctttcgaggaggaattccatgtggggatgtctgctctgctctatttccctattaacgcaaaagagaaatccgccgtgacgcacagcttgccgttcacggttcccttgccggtgcagaaatagaacggccccttggccttcacgagggtgcacgtcgtctcgaacacgtcccccggcttcaccgggttcttaaagcgcaccttgtccaggctggtgaagaagggggtggccccctcggcggccccggcggccagcagcacgcaggccgactgggccaggatttcgcagaggatcaccccgggcaccacgggatttcccgggaaatggccctggaggaaccactcgtccccggtgatggttttgcgcccgtgggcctcgccgtccaccacctcggcctcgtcgatgagcagcatgttgtcccggtggggcagcagctgcataatctcttgcttgttcatggctttcccgccctttcagcgcaggcggaacaggggctggccgaactccacgacctggccgttctgtacgcagacctccgcgatttcgccgtcttcctcggcggtgatttcgttcatcagcttcatggcctcgatgatgcagaccacgtcgccctttttcacccggtcgcccaccgtgacgaagggggccgcgcccggcgcgcccgccagatacgccatgcccaccatgggggccttgatgacgggcccggccgcctcggccggcaggacgggggcaatttccgccgccgtttccgcccgcggggccgcgggcagggcaggcgcttcctttccgccgcccatggagagcttcagcgtgcagccctcctccgtccattccaggccggtcagtccgttggcgcgcatcacccgggccagctgttcgatggtttccacgttcatacaaatttccccccactgaaaattcctgcggaatttcggcccccgccgggggctttattccgctttcgtaaaggcgacgcaggcgttgtgcccgccgaagcccagggacaccgacagcgccatgtccagcgcggcctcgcgggcctggttgggcacatagtcgaggtcgcagtccggatccggctcctgatacccgatggtgggcggcgcgacgccgtcccgcagggccagcaccgccgcgatggcctccaccgcccccgccgcgcccagcatatggccggtcatggatttggtggagctgaccagcacccggtaagcgtccgcgccgaagaccttcttgatggcggcggtttccgccttgtcgttgaggggggtgctggtgccgtgggcgttgatgtacacccgggccgcgtccggcgttttcccggtttcctccacggccaggcggatggcccgcgcgccgccctccgcctccggatggggggccgtcacatgatacgcgtcacaggtgcagccgtagccgctgatctccgcgtaaatcttggccccgcgggccttggcgtgctcgtattcctcgaggaggagggcgcccgccccctcgcccatgacaaagccgccccgccgcttgtcaaacgggatggacgcggcctcgggatcctcgctggtgctcagggccatgcagttgatgaacccggcgaagcccatgggggtgatggccgcctcgctgccccccgccaggatggcgtcggcgtagccgtatcggacggcccggaaggcctcgcccacggcgttggtgccggtggcgcaggcggtggtcaccggcaggcaggggccggtggccccgtacttgatggcgatggtgcccgccgcgatgttggcgatcatcatggggatgaaatggggggacacccgccggggtcccttttcgatgagcttggtgtgctcgctgtcgaaggtctcgaacccgccgatgccggagccgaagtaaacgcccagccgctcgggggccacctgcccgataatgccgctgtcggccatggcctccttggccgccgccagggcgtactgcacaaagcggtcggttttgcggatttccggcttctccagcacggtttcggggtcgaagcccttgacctcggcggccagcttggccttatactcggccgtgtcgaaccgggtcaccggcccgatgccgtttttcccagccagcaggccctcccagaaggcggggacgttgttgccgacgggggtcagcgcccccatcccggtaattaccacgcgtctcgtttccatagcttttgtcacctatctttatccatcacagtggttgcgttcggtttctttgattatggggcaagtcctgttgattcgtttcctgtgtcggtttgccctatcgggcttggtggaggtatgcggggcataaccccgtgttcctattgcgccaatgtggcgcccgcaccccctcttttccttttctagaaaaagaaaagaggggggagaaaagaaaaagcctggccaacagacgcgcaggaaaagaacacgtcgaatcttttctgtcctatcaacccaggagtgcgatcgcgcccaagggcgctttagttcgcaacatcgcctatctgctgagaagcgtgtcctttccccgcgctacaagcgcgctgacgcgcgtagtatacttgggcgatcacccaaattgtacaatccggtgtggtctccccgtcttaagacggcgagccctatcaatcgagttaggataatccctccccgcttgcggctgccttctacgggatccccgtatgggctcggcggcccaagccgacgagaccggcagaggcagagcgtccacccttgtttctttattctttccatgcagcggagcccctggggagttggtcgcccgacttttcggtgcgtgtggtgacgcaggcgcaaggcggggctggcagaaagcagaacgggctgccgcggcaactagcgggcgtaccggcggggacgcaggcgctaaaagtttctatttttcttgtaaggggccgaagcccgcagcgacacaggggttgccgcgaggtagcgagtgggtctccctccgccggatggttcccccaaggctttttctttctcccccatctttctttttcacgcacgaaaaagaaagatggggtgcggggtgcctcacaggcacaaccagcccgcggggtcataccccgcataccaacgctcaacccgatagggttatattgcccggcagggcaatcggggaacccgatagggttatatcgccatgccgccgtcgacccggatcacctcgccggtgatataatcccctcccggcccggccaggaacagggccagcgccgccacatcctccggcttccccgcccgtcccagcgggatggaggacagcagcgccgttttatccagcgcctcggtcatgtcggtctcgatgaggccgggggcgatggcgttgcagcagatcccccgcccggccagctcccgggccaccgccttggtcaggccgatgacccccgccttggaggcggaatagttggcctgccccgcgttgcccatgatgccgcacaccgagctgaggttgaggatcttccccgcccgcttgcgcacgaagccgggatagcagtgcttgatgaagttgaagcagcccttcaggttggtgtccaccaccttgtcgaagtcctcctccttcatggagaacaccaggccgtcccgggtcaccccggcgttgttgaccagaatatccaccccgccgagctccttgcccacggcggccaccaccgccttgaccgcgtcgaaatccgccgcgtcgcactggtaggccgcggccttcacgcccagggcctcgatgtcccggcgggtttcctccgccgcgtcctgccgcccggcgtagacgatggccacgtccgccccgttttccgccagcttcagggcgatggcccgcccgatgccccgggacccgccggtcaccagggccgttttccctttcagcatgttccctctcctttgcaggctgtcaccgccgcggccaggctgtccgcgtcctccacctggagcacggccgcctggggggcggtttttttgatgaggccgcacagggtcttgcccggccccacctcaatgaacgtgtcgatccccgccgccagcatggcctccaccgtcccctgccagcgcaccgggcttttcatctgccggacgagcagggcgcgatagtcgccctcgtagggccgcgccgtggcgttggcgtacaggggcagggccggatccttcatggcgaagcgcgccagtaccccggcaaacgcctcggccgccccctccatgaagggggaatggaagccgccgcccaccgcgaggggcagggccttgccgcccgcctccttcaccgcggccttgaagggctccagctcctcccgcgcgccggccaccaccagctgccccgggcagttgtagttgaccgggtacacccggcggaaccgggcgcacaggccctccaccgtggcgttgtccagcttcaccaccgccaccatggccgcgtcggtctgctcggcggcggcctgcatggcctccccccgggcgcagacgatggaaaagccgtcctccgggctgaccgcgccggaaaaggtcagggccgctatctcccccagggagaagcccgccagggccgcgggggccacccccgcctcccggagagcgcacgccgccgccaaatccacgcagtacaggcagggctgggtgttgcgggtgacggtcagctcctcctttgtgccctcgaagcactgggtgagggtgccgggccgcagccgctccgccaggtcgaacaccgcccgggcggcggcgcttacctcgtacagggattttcccatgccgggatactgggccccctggcccgcgaacaccaaggctattttacccattttttcgctccgttcagcaccgtttcggcttcctcgaagatttcccggataatctccgccgccggctgctccttattcacaatggccgcgatctgcccggccaggaaggagccggtcttctcgtccccctccacggccgcccggtagagggagccggttcccatggcctccagctcctcgtccgagatgtcgctgtattccgccttgagataggcgcgggagaaggggttcttcaggctgcgcaccggatggcccagccgcttgccggtggtcatggtggcgatatcgttcgccgccagcacctttttcttgtaattttcatgcacgccgcactcctcggccaccaggaaccgggtgcccagctgcacccccacggcccccagcagcagggccgcggccacgccgcgcccgtccccgatgccgccggccgcgatgaccggaatgtccaccgcgtccacgatttggggggtgagcacgatggtggtcagctcgcccacatggccgcccgattcgccgccctcggcgatgaccgccgccgcgcccgcccgggccaccagccgcgccatggccaccgaggccaccaccgggatcacccggatgcccgccgccagccagcttttcatgtatttggaggggttgcccgcgccggtggtgatcaccggcaccttctcctccgccagcagcgcggccacttcctccacgtgggggctcatcagcatcacgttgacgccgaagggcttgtcggtcagctcccggcagatgcggatctgctcccgaaggtaatcgctgcccgcgttcatggccgagatgatgcccagcccgccgccgttcgacacggcggccgccagcttcccgtcggcaatccaggccatgccgccctggaaaatgggatattcgatccccagcatgtcgcaaatcggtgtgtgtatcaacctgcatccgctccatttctatgccaaatatggtgataaaagggggtgtttcaccagaaaaaggtgcaaaatatgcagccaggaaggtgctttgcaaaatgcatgattttgcaaagcacccctgaaaaaccgcgggcataacgctcgcgttatgccggtgggcacatgaattgtggcccgcatttcgcgtcttatagacgcgaaaccgcgctttttcccagtctctgcgtatattcatgcatgattttgcaacgcgcccctcatggccgcatggtattgtgggaaatgggattagcccattttctcctcgatgatggccaccagttccccgacggactccaccttcttctccagctccagctcgatgcccaggctttcctcaaggtccatcaccatttcgacggtgtccagggaatcgacgcccagctcttcaaaggtagtctccatcttgatggaatcctgctcgatgctcagatgattggccagcatttccgcgactttttcgaataccatattcgtgttcctccgatgatttttatttgtatatagcaaaaagggaatggccctttgctgctcaggttttatgtcctctatgggctaccaccgcagcacgcaggcggcgctggataagccgccgccgaagccgcagagcaccagattgtccccccggtgcagcagcccgccccggttgagctcgtcaagggccagcgggatgcaggccgccgacatgttgccgtaccggtcgatgttgatgaagaaccgctcgtcgggaatatccagctttttgcgggccatatggatgatgcgcacgttggcctgatggggcaccacccagacgacgtcctcgccggtcatgcccgcctcggccatcacgtcccgcacgtcggcgcacatggcgttcacggcgaatttgaaagtctcctgccccttcatgtggatgtagggcttcatgggctcccgctcgtaaaagggggatttgccgatgaactgggggattttgatcacgtcgtccccgccgcgggagtacagcttggaggtcaggtagttgtccccttccccgaggaccaccgcgcccgcgccgtccccgaagatgacgcaggtgctgcgatcctcccagtccatgatgcggctcatccgctcggcacccaccagcagcacctttttcacttttttccgggcgaaataccccgccgccgtctccagcaggaaaatgaaggccgggcaggccgcgttgatatcgtaggcggggcaggtcgccccgagatgatgctgaatcatgcaggcgaggctggggctgacgtcctcgttgctgaccgtggccgccaggatgagatccagctcctccggcttcaccccgctgttttccagggcccgccgggccgcctcggcccccaggtccgccgccgtctcggtggtgcagacataccgctgcttcacccccacccgctgggtgatccattcgtcggtggtgtccacaaactgggacagctcctcgttggtcaccacccgcggcggcacgtagctccccgtgcccatgactgcaaaactcatactcgtttcttcccctcaccttataactcgtcgccgatggtcttggcgaaatactcgttaagccgccggatgaccagcaggacgtatttcttctcctcgtccgacaggccccggctgatttcatccaccagctgccggcggcagatgcggttgtaggtgtccacacccttgcccgtctcggtcaggtacacccgcacgatgcggctgtccttctggctgcgcaccttgcgcacaaagcccttttgaatcagcttgctgaccgcgatggtggccgaggataccgtgatgcctaaggagcgggccagctcggtgaccgtgcagccatcgcccttggcatcccccaagcagaggatgaggtgcacctcgctgaccgacagggtggtttgccggctgcgcttgagcatctgcttttccagccgcaggacattgcggtagatactgaccagtatgtcgtccagtgcgccgctgaagccttccatcgttcccttgcccctctcaccggaattgctttgacagcctatctatttgaagttcaaactatttgatattctaatggaatcttttgcatttgtcaagaaaaaatccatgaacagattgtgaaatccatcgacacacttccataaaaaccgaggaaaaccgcggggtttcgctctttttccgggatttaccggttcctttttcgtccgggccatggtaccatgagattgtcacaaagctgcatttcatccagcttatggcagccacaatcacacgacgagccgccccttggcggccggaaaggatgattcggatgaaaaacaagaacctatcgatgtttgctttgaccgccgtgctggcggccctgtcgataaccctggcgggctgcgccggcccggccaaggaaaccgcctcctccgcggcgcaaggccaagcggcgagttccgccgcctcccagacggaggagacgggcggcgagacggaaagcctcccgcccgaggagaacgccggcgtcctcccgcaggaggaggccggacaggccgccccgcgcacggaggccgcgccggacacgtccgccagcgccaagagcagcgcctcctccgccagccgggcaccggagcggcagccggaagcctccgcctcccgctcttcctccacgacggcggcctcccggcccgcgaccagcccgagccgcacccagtcccccgccgccaccaccaggcggcccaccaccaggcggcccaccaccacctcgacggcgaaaaccacccgttccaccgccgcccccaccaagccgccggctgacggcagcctgtccggctacgccgacgcggtggtgaagctggtcaaccaagagcgggccaaggccggcctgaaaagcctgagcgtcaaccaggcggccgccgccgcggccaatgtgcgggcccgggaaatcgaaggcgccttctcccatacccggccgaacggcagctccttcagcaccgccctgaaggagcagggcgcctcctaccgcgccgccggcgagaacatcgcctacgggcagcgcagcgccgagcaggtcatggagggctggatgaacagctccggccaccgggccaacatcctcaacgcccagtacaccgccatcggcgtgggcgtctaccgcagcgcctccggcaccctccactgggtgcagctgttcatcggctgacgcgagagcataaaaaacgcacgggtttcaaagcggcgcatcattagcggaggatccaaactggttttcgccgcttcgcaagaaatggctcagcggaacagattccgctgagccatttcttctaaaaggtgcgcaccttaagtccgtgcgtttttttatgcgtgtttatttgtactgcaggccggtgacctgggagccgacggccaggtaggaggaggcgttgccggcggtcagcttcgccccgccgatgaccacgttttcgaaggtcacgcccttgacctggcggcccccgtcgtagccggacaggccggatttcagcggggccgcgccggtgtaggcgatgttcttgaacacgacgttctccaccgccttgccgggctggctgttgtaggcggcgttcatcatcacccgcacgttgaacagctgctgattgctcacgccggaaatccggacgccgtcgaacaccacgtttttgacggtgacattgtcccctgcgttgacgcccagcaccccgtaatagggatcccccggggtgcggctgtcgatgacgtcgatattctggaaggtgagatcggagatggtctcgttccggccgggatcggcgtggatgccggtaaacacggcgtgggccgagtcggacagcagggtgcagcccttggcggtgacgccggaggaattgccgatggccccgctgctcgaggcatagacggaaatgcagtcgtcgttggagcggatgaagctgtcggtgatggtcacgccgctgctcgccttgatgttcaccccgtcggtggccccgtaatggctgaagattttcaggttatgcagcgtgacgtttttgctctcctgcaggctgaccgagaaggaataggcgttgctgaaggtgatcccgtccaccgtcacgccgtccgatccggcgatgatcacgccccgctgggtgttgaagttgaagcctccggcgatcacgtcgttggtgacggtgccgatgtccaccatgccccgcccggcgattttcacgttcttgacgccgcagaccagcaggctgccccgcaccacggcgcccggctccagatacaccgtctcgccgcttttcgggtaatagccgttgacgatctggcccgcgccgatgaccgtccaaatctgcacgctctgggtatcgctgggccgtttgtcgctgccgttctgggcggtgcaggccttgccgtcgatgtacacggtgattttctgcccgtccttgaccagggcgacatggtgctccttgccgtcggcggggagcttttccttggtcacatagggggtctcccagccgccgatgttggaggccagggtgccgtccgaccggcggtacagcccctccatcaggatgccccgctgcatgggcgtggcgtcgctgcccgccttcagggtcaccttggcggaaatggagaactggccggaggcgttgtacaggtaatccatgtccttgtaatcgtccaggccgtcgaaggtcatggtctcggcgtattttttcagcagcaccggcttgccgtccatgggcacggtgtcggtgtccttcagctgggtaatcagcgcctccggcagggccatcttatacagatacacgttccggatggtgccgttccacacgccgaagcccacctcgggcagggtggtcaccctggcggggaaggtcttctgcgccttgggcttggacacggggtcgttggccatgatataggccatgttggtcttggtgccgtccagggacaccgccagcttctgcgcgccgttcatggcgaaggtcagcttgttgccgctgaccgtgggcttgatgcccagggactcggggtagaccttgacggcggaggcgttgaaggtgccccggttcttggtgatggacacctccgcccggcccgacaaatcgaagctgatgagcgggctgttctgcaccttgggctcgatggtgttgcccttgccgtccaccacccgggtgttggccggcagctccgggtcaaccttgacgttgtaggccgccaccttctgccagtccttgccgccccccttgacctggaaggtgtaatcggtgtttttcagcccggcgggcaggctggccggcgcggcgtacagggtcagcgccgggggcgcggacaccgccgtgctcccgctggtggccttggtgccgccggaggggttggttttgtccccgccgccgggcacggtcaccaccatggtgccgccgcttaagtcggtgacgatttcggtggccggggcgctgccggtggtggaatcgccggatccgcttgtctcctggccggacgccgcgccggattccggcgcgctgaccggcgtttcctcccggcggcaggcggacaggctcccggtcagggcggcggccagcagcatggccgtgaccgcccgcagggcgcgcatggactgcttcatagggctttcatcctttctttattggaaccggatatccttggtgtagttgccgatgaggaagtcgctgcccggcccggtcacccgccggccgttgagcacgaccctctcgaaggtcacgccctccaccagccgctccggcccgtccccgtggatgacggacatcagcgcgttgtccccggtataggcaatgtcccggaaggtgacgttccggatggcgcggccgctggatttgcagtaatccgggttgttccacacccgcaggttgaacagctggttcttctggaaatcctcgacgcggatgtccgaaaacagcacggtgtcgatggtcacgtcgttggcggcgttcagggccagcacgccctgatagtcgctgtagcccgccttgctgtccagcacgtcgatatcctcaaaggtgaggccgcggataacgtcctgcccgcccggcgcggcgtggatgccgccgtatatggcgtgggccgcgtcgtttatcagggtgcagtgccgcacggcgatgttctccgcgttgcccgtgtaatgggtgaaggaggcatagaccgcgatgcagtcgtcgttggagcggatgaagcagtcctccaccgcgacgttgcgcgaggccttgatgtgcacgccgtcggtggcccccaggcggctgaacatccgcacgtcggtgaaggtcaccccgtccgactcgcacaaatggctgcacatggagcgggggtcgaggatggtgatcccctccacccgcaggttctcggcgtagaggctgacgatggactggcccggcgactgccaaatgatgccccggccccgcaccgcggcattcttcacgccgtaggcgaggatccgccccttgaccaccgcgccgggctccaggtacagggtctggttgtccatgaggcagaaatcgtgggacacgccgcccgcccccagcaggaggctggccgcggttttgggcagggcccgctgctcggttcccgccgcccggccgtttatgtagaaggtcagctccatcccctgcttgaccagggccacgtccgtccaggcccccatgggcaccttgtccgtggagaaaaaggggtattcccagctgcccaggttggtgtagagcaccccgtccgaccgcacggcgagcaggccgctgaacaccacgttttccacccccggccgcgcggggtcgaggtatatccgggccgtcagcgtataggcgttctcccccgtctggagggcgtagccggtgggcaccgcgtcgtcgtggccgtccaggcacagggcgggcgggccgtaatcggcggcgatcgaggggttcccgaccggccgcccgtccttatcgcccgccttgtcggcgaagtcctccgccagcggccaccaggcgtccgggccctccggcagctctccccggccgtatccctccagctccccggcggtcagcgcccgggtatagacggcggcgtcccggatgccgcccttcatcccctcggtgccggtttcggggaaggtgtgcacccccggccccaggcgcacgacgttcgggtcgtccggcgcgggcgcttcctccggcgtcccggccatgatatacaccatccgctgccggtcgccgtccagggaaagggtgaccttcccgggctggcgcagggtgaggacggccgtcccgtcctccatcttcagcggcagctttttcgaggccggatgggcctgggcggacgcgataggcccgccgtccgcccgccgcacccgcacctgcaccccgccggtgaaatcgaacagcaccatcgggctgtcgatgaccgggtcgtcatcgctgctgttctgctgaaaatccggatcgattttgacgttgtacacgtccagctcccgccactccccacggagcggccgcgcctcgatgcgataggcggtgttgcgcagcgcctccgcctcgggcgcgatgggataggtcaccagctgacccccgccagaaaacatccaaatccctcctgccgtcagcaggccggcggccaccaccgccgccgccaagccgacgcctttttgtcttgttgtcagcgacatcacgcctcccccctgtgtcctgctggttttcattatatattgcacagtcggcaaatacaattgccatttattttagatttattccacatttttgtctcggcggaaggggacagcaaatattcggaagaaagcgtaaaaaattgggcgttgctggacagaatgcctatgctctataatgaaaccagagcaaaaccggacagtttccacgaaaagcaagccggttctttcattttacaccattgtgaggaggagcgatatggaaatcccaggaaaacgcctgctggccggcgcgctggcggcgctcatcgccggaggcggcgcggccgccgtgcagcccgtcccccgggcgcgggccgcgtcccgcaccgtcaccgaaacctatgcctcgccccggcacggcaacgaaacggggctgggcaccgtgtggctgtatgaggcggagaaaatccagtcctcgcaaagcctgaccagcggccagtacatagccatgaccaaggacgcgaacggcaactacgtcggcgaggccggcaacaaggccaccatccgcgtcaacgagagccagaacaaggccgcctaccccatggcggccaccatcgaggaaaacgcggtgctggccttcgtcgccccgcgggccgggacgataagcgtcgccgaaaccgccgcccggctggacggctggaaccccgccgacttcgacggggcggggctgtcggtttacaaggacggcgagcggatatggcccgccgagggcgataacccggtggtcaccgacacgccggtgaccgtccccgccctgccggacatcgccgtcgaggctggcgacaagctccgttttgtggtggacatcggccgggtgggcggcacccagtggggcgacaccgtcatctggccggtcacgctgtccctgtcctatgaaaagggcggccggccgacggagagtaagacctacgcctcccccaccccgagccacccggacgggcaggacaccctgtggctgtacgaaggggaaaccgtgccggtgggcagctacttctccggcaatttcgcccccatgaccaagcaggccgacggcacctatctgggcagcgcccccaattacaaggccaaggcgggcatccagtgggatgacggctatctgctcaagcccaacgtggaggaaaacgcggtgcgcacctttgtcgtccctaaggcgggggccgtgtccatcgccgcctccaccgcctccctggccgcctggaacgatgcctgggacggcgtgggcgtggcgatctataaagacaccaccaagctctggcccaccgacagcgaccacaaaatcgccggcagcgcgccggtcagcatccccgccctggccgacatcgccgtggaggaggggagcaaaatccgtttcgtggccgacgtgggcggcgccaacgagtggggcgacgaattgctctggccggtgagcctgaccctgaccagcgaggcggatctcggccccatcggcacgcagacctataccgcgcccaaatacggcgcgcagtacggcctcggcacccgctgggtctacgaggcggaaaccttcgccgcgggcagcgccccccattccggtgtgttctccctcatggccaagcaggacaccgtcaccgagggcgggccctactacctgggccagggcgcgacctggggcgccaagctggtgttcgagaaggcgtcctataagctgcagcccaacgccgagcagaacgcggtgctgacctttatctcccccggctacggccaggtgtcgctgcccgagaccgcggttacccgccacggcggcgcacaagacgccaacgacggcgcgggtctgtccatctatctcaacgatcagaaaatctggccggcggacgccgagcaccagctggtggacgccagcatgggcaaccgcttcaccgtcccggccatcgaggccgtcgaggtggaggagggcgacgccctgcgcttcatcgtggatctcggcccgaccggcggcaacgagtggtgcgacgacatcgactggcccgccagcgtgacctataccggcagccgcgccgacgcggcggacaaggtggaggatccgatcatctccgagcccaccccgcccgaccccggcgaggacgacaacagcgcctttgaggcggcggaatacaaggcccccggcgagggcgagctgaaatggcccgacgtgtggctgttcgaatacgagacccgcgccgaggacggcgcggccaccgggacgttcgcgcccatgacggtggatctcaacggcgaccggctggcctacggcaccgacaaggcggcggatttcagcgccgccctccacgcccaggccctcttcttcaccgagaaaaaggacggctatctcacctatcccgtccagcccggcaacacccagaacgccgccatcaccttcatcgcccccaaggagggcgtcatcaagattccccaggccaccgtcaagcggtacggcggcgtcgcttcctgcgacggggacggggcggcgctgcgcatcctggtggacggcaggcaggtctggcccgccgagggggaaaccgccctggtctccaacgccaaccacaacaccctgaccatccccgaaatcccggacatcgcggtgaacatggacaccaccgtccggttcgtggtggatatgggcgaggccaacaactggtgcgacgcggtgatgtggccggcggcggtgacctacaccaagtcggcggaggacgacaaggatcccaccgacatcgaggaacagaaaaaggccatggaattccactcccccacgctggagaatccggccctgggcattgtgtggaaatacgaatatgaagacatcgccggcaggagcgagctgtactccggcgtgttcggcgacatggtgaaaaagaccaccgacatcggcctgtatcagggcaaccggcagctggacgaagccgcccacgccctggtgctgaagaaggaaggggctctgcccatgcggccgggcgccgaccagaacgccattctcaccttcgtcgcgccccgggcgggcaccctgaacatcctgtccaccgaggcggtgcgcgccggcggcggggacggaacgggcctgtccatcatcctcaaccggaaccagcagctctggcccggcgacggcgcggccttcctgctggacgacgccggcggcaaccgcgtggcggtgccggccatcaccggcctccaggtggaggagggcgacctcatcagcttcgtggcggatatcggcaaggtgggcggcgacaaccagggcgacgaggtcgtctggccgatcaccatccggtacgacgagcccgagcagcccgaagatcccggcgacagcagcgccccggaggacggcggcagccccgacaccggcgcggccgcggcggcgctgcccctggccctggcggccgcgggcgcgggcctgctcctcgcggcgcggggcggacacaaacggcgtgaaagaaaggaccggtaatacggcgtgaaaaagcaatggacagccctggcggcggcggccgccatcaccctgaccctcctgccccttggcggctgccgccagggcggcggggaaaccggcggagacagcccaaaagacggcgagccggtggtggtgcggatttccatggataacaagctgatgaccgaagcggcccagcagtttgaaaaggacaatcccgacatcaaaatccagttcgaatccccctccgacgacgagcagaagctgatgtccggccttgcggcgggcacggcccccgatattttgcgcatcctcggcgcccagcagctcagcggctacgtggtcaagggcatcgccctgaatctcgacgactacttttccaaaagcagcctcatccgcgccgacgacatggaggacatctgcaacacctaccgcttcgacggcaaaaacatcggcaaaggctccttctacgggcttcccaaggactggagcaacgacctggccatgttcgtcaacaaatcggtgttcgagaaagccggcatcccggtgcccagcaccaccgagcccatgaccttcgagcaggcgttcgaactgtcgggcaagctgaaccagaaggacagcagcggccgcatcacccagctcggcctcttcaacgccctgatgcccaatcaaattctcgactacggcatgttcctctatcacctggccgccctggatctcagcctgtggagcgacgatttctcccactcgcgctggacggatccacaggtcaaggcggcggtcaaggtctggatggacgccaaaatgaagatgcagatcccctcctccctcatggacgtcaccggcgtgggcattttctcggacaagaaaatcgccatggagctgtggggcttctgggaaggctcggtcttcaagcaggacgccaacatcaaggacgatctggacgacgtgatcatggttccctccctctacccggagggcggcaaaaaagccaccgcctccaccttcgccaccggcggcatcatctacagcaagaccaagcatccggacgaggcgttccgggtgttcgaatggtatttcgcgggcgagccggcgaaaatccgggcccagagcggctggggcatgccggtgttcaaatccctgaagcagtatatcccccgggacacggcgtttgaaaaacagatcgccgaggtcgcggaaaaggatctggaaaacctgatttacatccagcccaacccctatctcagcttcaactacgaatcggtcatcacccgcttcctccagcccgccctgtacgaaatcgaaaccctggacgagtcgcttgagaagctgcaaaaggaaaccgacatcctcatccaggagggtatggaaaccgccaaaagcctgaaatgacaagccgcccgcccctcggcaatcaggggggcgggcgcggaaaggcctgactgccatgcgcgtctcacataaggaaaaagtcaaagtatccccgctgaagaagaaggaggagcgcaccttttacgccctcatctcccccttcatgctgtcgtttgtgttcctgtccgttttcccgatgggcatgggcctgtttctgagcttcaccaactattccggcttcaacctggacaccgccaagtgggtgggcctgtccaattaccagaaggtgttcaacgacagcgaggccatgcattccctgctgcgcaccctggagctgagcctcatcatcatccccctgaccatgatcctggccttcatcctggccatgatgctgattcagaacgtcaagttccagggcggcttccgcaccaactactacctgccgtcggtggtgcccttcgtggccgccggcctgatgtggaagatcctgttcagccgggatcgcggcatgctcaacgccgtcctggggatgttcggcatcgagccggtgttctggcttgggccggagatgtgctccgcgtccctgatcatcatgtgcctgtggggggccggcggcggcatcctcatcaacatcgcgggcctcaagaatatcccgaacgagctgtatgaatccgcctctatcgacggggcccgcttcttcaccaagctgttccgcatcaccatcccgctgttcacccccattctgctgttcaacctgctgctggccatcatcggcaacctgcagatgtacgcccagccggtcatgctggccacctccggcaccgggctgctggccgtcccgttcaaggacaactacctgtatctcgtccatatctaccagcaggtgttcggctcccagcggttcggctacgggctggcgctgtcctgggtcatcgtggtcatcatcctggtcttcaccctgctggtgctcaaatccagcaagcggtgggtcaattacgatttataacgggagaggagatactttccatgccaagcggagaatcggccgtgctcaaggaacggcccaaggtaaaaaaacgaatcaaatggaagagcggcctgctccgcgctctcctgtatgtcgtcatcattctgttcggcgtcaccttcgccttcccctttttcctgacgctgatgaattccctcaagcccttgaccgcctcggtggggctcagccagatcatcccctcggagttccactgggaaaactattattacgccgtcaccctgatccccttcttcaagtacctgctcaactccctgatcatcgtggccatcgtggtgcccatgtgcaccatcatcaacatggtcatcggctacgccttcgcccggctgcgggcgcggggcaaggacgtgatgttcgtcatcgtgctgtccaccatgatgatccccggcattgtcaccatgatcccccagtacatcctgtataacgtcctgggcatcaccgacaccttcttcatctacgttctcggcaacatcggcggcggcgcttacaacatctttttgttcaagcagttcttctccgccatgcccaaggagctggaggaggccgccaaaatcgacggcgcgggcaccctgcagaccattttccgcatcttcgccccggcggccaagccggtcatcatcatcgtggccatcggcgcgttccagggggcctggggcgactatatgaccccctttatgtatttctctcccgagaaatatcctctggccatggccctgttcggctcggtgtcctattccatgcccggggcccctcccggcatggtgtacgagccgctgatcaacgccgcggccatcctgatgaccatcccgcccatcatcggcttcttcttcacccagaagcatatcgtgcagggcgtggtcaccaccggcctgaagggataacccaaaaactgacagccttacccggcggctgagactgtcgagaaagtctatcggagggagggggagtgtgagggggaaccgtcagggttccctcctcgcgcaacaatcacccgcccgcaggcgtcaaaagtggagaaaatcgaatgattttctccacttttgttcagcttggcgtaaatggccggcgtatgccggtctttttcgacaagctgcgccgccgaaatccatccggcggctgtcgtttgctgtggaaatatggtacaatgaaggcactacatgggggaggttttttatgtatcgcctggtcattgccgacgacgaattctatatccgggagggcctgtgcaagctggattgggccgcgatgggcatcgaggtggccgccgcctgcaaaaacggcgcggaggccgccaaatatatctatgaaaacccggtggacatcctgctgaccgacatcagcatgcccatcgtgtcggggctggagcttatccaggacgtgggccgccgcttccccgccatcaaaacggtggccctgaccgcctacgacgattttgaatacatccgcacctgcctgcgctgcggcacggtggactacgtgctcaagcccttcaccgaggaggccttaaaaaagacctttgccgccgtgacggacatcctcgacaaggaaaaggccgagcagaagcgggtggccgagctggagcgggtgaaccggatgaaaaccctcgccctgcggcgggaatggacgaccagcctgttccgcgagaacatgagcgacgagcgcatggaggaaatcagcgtgtactgcgagctgttcctcgacagcccctggtacttcctttgcgccgtccgcccggacgacatggatagcctgcccgacgcggacagggagctggcggccttctccttccagaacgccatggaggatttctgcggggacggcgcggcctgcttcgccatcggtgaaaatgccgcctgttattacctgcggggcttcgacgtcccgccctcggaggaggagcagcgtcagctggcggagaccatccgcggccggctgtacaagctgcggggcgtgttccgctgtcccctgtccgcggccgccgccctggtggacgaccggcaccgcatcgcctcctgcacggcgctgctggacggatggctggcccgggccggagacgacgcggtgcggctgttctccgccggggagctgtgcgcctgccccgcggccgccggcgaggaggggccggagccggaggaggagggagcgggcggccacgcccacctcatccgcatggtcaaggaatacatccgggataactaccagaaccccatcaccctccagtcggcggcggaaagcgtgttcgtcagccagtcctatctcagccacgtcttcaaggtggaaaccgggcagaattttgtgaaatatctgaccgattaccggctgcgggaggcctgccgcctgctgcgggagaccaaccgccgcgtctgcgacatcgtcgggatggtggggtacgacagccccaaatacttctccgaggtgttcaagcgggcgttcggcatgacgcccaacgcctaccggcggcagggaggctcggaatgacgcatcgaaaaaaatggatggccgtcaccctggcggccctggcggtgagcagcctggccattgggttggccgggctgtttctgctgcacgcctccctgctgaaaacggcggcggaacagcgggatctggtgcaggaaaacctgtcctcccgcctggaaaagcagctggcatatttcagcggcacggcggacttcctgtgcgggaaagaaaccacccgctatttgacctccctggcccgtctgcgccccgaggaggacacccgggcgctcaaagccgccttcgaggactacctgcacggcacggccctggataccgagagcatccagagcgtctgcttcatcggggaaaacgagaaccaggccggttatctgtacgaaacggcctcccggcgggaaattcccgtggagatccccgccaccgacagctggctgcgctccgggctggcggatctgctgctgggggacggcacgcttgtctatattcaggacgacgcggtggaggaggtgctggcccgcccctatttcgagcggtatccggcgcagaagaaggccgtgaaggagtggctgggctatctgtccggccggtactgctatgttctgccgcgggaacggtacggcgtcatcctcgtgctggacagccaggtcttcgaccgcctccatcaggcgttcccctgggaaaccgacggggcggccctgtgcgccggcgacgggcggatcctctggcaaaccggcgagtggatagcccgggcgcgggccggcgaggaaccggtgctcctggacggcagcctccccctggcggataccaagctgcgcctgtattacgcccgccgggccgagccccgcgcgtacttgctctttgcggcggtctatctcggggcgtcgctgcttctgctcgccgtggccgtggccgcggtcaaccgcatggcgcggcggatcctcgcccccttcgaccggctgaccgaccgcatccgcgcttccatgagcagtgacgatttcgagccgatccctgccgacgatccggcgctgttcaccggccggcccctgtatcggcgcattttccgtctgttcgccgtcgggctgctgctgcccgccgtctgcctggggctgctgtcctccctgctgaccaaccgcatgctggcctcccggctgaccggcgtcgccgccctgcacgccgccgccctgcagggcgcgctggacgacagcctggccatcagcgagagcatccttaagatgatctccggcaagcccgattttgccgaggcggcggccctgtccatcgacagcctggaatccggcgactaccgggagcgggcgctggagctcaattcctatatcaaccgctatcccctggggatgttcaacgtggcgtatctggccctgcaggacgtggagggccacgccaaataccagtccctctacctggacgaggagagcgccgaaagccagctgagccgcttcagcctgctggatcagcccgacgccctggcgcaggtgcgggcgctggagggggacaccggcctgctgctgtgcgccaatttgtacaagcagcccgccgtggcggccgtgcaaaagctgtacgacccgcagggcaaggtggcgggctacctgcaaatggtgtataaccagagctatttccaggagatcagcacccggcagacggtcggcttcctggtgttccggcgaagcgaccgccagctggtgtacaacagcggggccgacggctttgccaaagtcctggaggagaacgccctgcggcccggggaaagcctgtcgctgcatgtcggcgggcgggggtatctcctcaacacccgcgccgtggacaccaccgactggatgctggcggtctttcagcgcaccgacgacctgatgagcgtggcgacggcggcccttttgcaggacgccctgctgctggccgtcctgctggggctgctgctgctcctgtccctgcgtctggcccgctggatgagccagcccctgcgggccatcgagcaggatctgggccgggtcatcgaaaacggctgccgcggcttcgtcccctatacgaaaaaggatgagctcagccgcctggtggatacctacaaccaggtcatcggccagctcaacagcctgatggacagcatggtggagaaaaaaaccatcgagcagcggctgaccaccctgcaaacccaggccgagctggaaagcctgcggcagcaaatcgcctcccactttttccgcaacaccctggaaaacatccacatgcagatccaaaacggggacaaagacagcgcctgccggatgctgatcgccctatcccgcctgttcagctacggcatgaccaaccaggatcgcatcgagttggaaaaggaaatcgactatgtggaaaactacatcaccatccagcgctatcgcctgcacgacgccttcaccgtgcgctggaacatcgacgagaacgcccgcctgacggtggtgcccaagctcattctccagccgctggtggagaactgcatcacccacggcctgtacgaatatcaatcgggcggcctcatcaccatcagcgccgtccgccgggacgaccgcctggagcttcaggttgccgacaacggggtgggcatgtcggccggggagctggaggagctccggcagtccctgcggcagcccgacgacgccgacaagcgcagcgggctggcgctgaaaaacatttacacacggctgcgcctgtacgcgggcgaaggcgcggacatgaccatcgacagccgccccatgcggggcaccacggtccgcatccgcctgccgctgaccccgcccccggcttgaacaacgcctcccgacacggcatacaaaccgcgtcgggaggcgttgtttcttggattactcggcgtcgcgtccctccagccatagctggcgcacccgttcgtatacttcgtcgggaacgtcggcctcaggatacgcggtgaggggcagcagctgatcccccgccacggcggggtcggtgcaggcgttgtcctgccgccacgcgtcccgttcctccgggttgcgcaggttgggcacgtcgatgggaacgccgccgttcaggatggagcggaaagccagtatcccgcaaatccccatgtccaccgcctggtacacgtccaggctgtaagcgccgtccgggcggcccagaatcttttcaatgaaaaagtgggtggcgtaaaaatcgctgccgttatggccgcccacgccgctggccgccaccagatcgggcgaaacgaatttctccgggacataggtgctcaggtcgcccttgcacagctgctcgccctcccggtacacggtcaggcgcgcgccgtcgaaacgctcggtttccatcatgcccttggtgccgtacacctcgtagttgatgctgcccggctcccgcttgaggccgccgtgcacgcttttggctatcgccccgttgtccagcaccagcatctccaccccgccggcctgcccgcccggatgcccgagcgccgtcatctgcgggttgggcggggtctcgtagcccgtcacccgcacaggccgccgcccggtgatggccagcatcggcccgatgctgtgggtgcagta

SEQ ID NO: 3826 - DNA, 2546 bp, Unknown
  16S sequences of unknown bacteria
ccgcgctgggcgggaaacttcacgcagcgcgagctcgaagacgcgctcgtcaagggcgccgacctcgaccgggcgatgaaaagcggcggcgaccaggagctcctgttcgagcaatgggtgctcgggatctgcgcaagacctgcacatggtagggaaattgggtaaaatcgacgcgagaacgcatattgacctgtggtaaaatctcctagtttcgtcgcacccccactgcaacgaacagcaagatccatcgaaaggaaaagccaaaaaatggcgaacatcaaatctcagaagaagcgcatcaagaccaacgagaaggcccgtcagcgcaaccgcgcctacaaggcagagctcaagactgccgtccgccgcgttcgcgaggccgttgaggccaacgacgccgagcaagctcaggccgcagctcgcaaggcatgcaagctcctcgacaaggccgctgcaaagggcatcatccacaagaaccaggctgccaaccgcaagagcggtgtcatgaacctggtcaacaagctctaggtttttgcgttaatttctctgtattttgcgaggccgctcctgtcaggttgggggagcggtctctctttttggcgtaagtggtgaacatggaaccctcccatatcagaaacttctcgatcatcgcccatatcgaccatggcaagtcgacgctggccgaccgcgtgctggagatgacgcatactgtctccgagcgcgatatggtcgaccaggttctagactccatggacatcgagcgcgagcgcggcatcacgatcaaatcgcaggcggtttgcgtcttgtacaaggcagacgacggggagacctaccagttcaacctcatcgacaccccgggccacgtggacttcacctacgaggtcagccgctcgcttgccgcctgcgagggtgcggtgctcgtcgtcgatgccacgcagggcgtcgaggcgcagacggttgccaacgcgctgctcgccatgaacgccaacctcgagatcatccccgccatcaacaaggtcgacctgcccgctgccgaccccgagcgcgtgcgctcggaaatcgaagacggcctgcagattcccgccgacgacgcggtcctcacgtccggcaagtccggcataggcgtccacgagctgctcgaggccgtcgtgaagcgcatcccggcgccgacgggcgatgccagcgctccgctcaaggcgctgatcttcgattcgtacttcgatgcctaccgcggtgtcgtcgccctgatccgcatcgtggacggctcgattcacgccaaggacaaggtccgcttcatgcagacgggcaacgagtgcgaggtcgaggaggtcggcgtacgccgaccggctgagaccccggtcgacgagctgaccattggcgaggtcggctatctggtcacgggtctcaaggacccgcacctggtaaaggtcggcgacacggtcaccttggccaagaagggcgccgaagagccgctgcccggataccgcgacgtcaagccgatggtctacacgggcctgtttcccatcgacgccgaccagtacccggcgttgcgcgacgcgctcgacaagctctcgctcaacgacccggcgctcatctgggagcccgagacctcgcaggccctcggcttcggatttcgcgtcggcttcctcggcctgctccacatggaggtcgtgaaagagcgcctcgagcgcgagttcggcctcgacctcatcgccacggcgccctccgtcgagtaccacgcctatctcaccgacggcaccgacctcatggtgcattcgccgcaggacatgcccgatccgtcctcgctcgaccatatcgacgagccgttcgtcgtcgcggacatcatcgtcccgcccgactacatcggcgcggtcatggagctcaccacctcgcgccgcggcgagttcaagaacatgcagtacctgtccaccacgaccgtcgagctcaagttcgagatgccgctctcggaagtgatcatggactacttcgaccagctcaagagccggacaaaaggctatgcgtcgctcgattacgacgtgtgcggctaccatccctccgaccttgtcaagctcgatatcctgctcgcgggcaaccccgtcgacgcgctttcgaccatcgtccaccgcgatgccgcctacaaccgtggtcgtgcgctggccgagcgcctcaagggcatcatcccgcagcagctgttcgaggtgcccatccaggctgcggtcggcgcccgcatcatcgcgcgccagacggtccgcgcgaagcgcaaggacgtcctcgccaagtgctacggcggcgacatctcgcgcaagcgcaagctgctcgagaagcagaaagagggcaagaagcgcatgaagagcatcggcaacgtcgaggtgccccaagaggccttcatggcaatcctcgccgtcgacgacgagtagcccatgggcccaatcgattcctatctgcagcatcccgtctggctcgccccgatggcgggcgtcacggacaaggcgtttcggaccatctgcctgcgccatggggcggggctcacgtattctgagatggtc

SEQ ID NO: 3827 - DNA, 15842 bp, Unknown
  16S sequences of unknown bacteria
ttgttgtctctgccacatggtctgctgcacatttctgaatggcagttaccacatagtcctttgcttttctgtttgcttcctctttcgccctggcctccatttctttgaccagtttggctgtttcatgttttacatcgtcttcaactgtttttaaaagatattcttttgcttgttcggaggtaaggcctgagattctttccagttcctgcacacgtctgacagacagctcttctacttcagcacgtttttttgccaattgctcttcccgtgctgcaaagcctgcttccttacgctcaattgcctcagtcttcttgtcaagagtttcctcttttgccagaacacgacgctcatagcgctggagctctgccctgcgttctttggtttctttttctaattcatttctggttctcatagactcttcttttgcttccagcatcgcttcacgttttttcgtttcagcggtcttcagcgcttcgtctacgatctctctcgctctgtcctctgcattgccaagcttggtctccacaacctttttccgataaccgattgcgcaaggccaggtgatagctgctgcaacaacaactgcgaccagaactgctatagccgtaaccatatacaggagcacctccttattcaattttcattgtacatacacaacacttaaagtttaatctgtttttacaattatgtcaagtgttgtctgtccgcttttgtatattttgtgcaatcagtcagtttctttcatgacagatatgatatcactcatgcaaaatccttttctggcaagagatgctatcacactccgcttctgacggtcatctgcctccgcattccgataatgctttttttccagatgctttcggatcagctcacactgatccaccggttccagttcttcgtacacctgctggatcagttctggagatactcctttacggaactgcagttcctgttccagctgccttctgctcttgctctgacaccggcactctatgtagttacgcacatagcgttcatcattgatataaccaaaactttttacataggcaatggccttctccaccatttcagggtcaaattccgcctgtaatagcttttctctgagctgtgcctctgtccggtccatccgttccagaagccgtaaagctttaagcttcgcctgtctcagctgttcttccggcatcagctcctgcggacttcgctttatcttcttccggcaccggtaatccataatatgctcttactttcctctcaatttcatcacagatctgacggttctccttcagatactgttttgcgttctcacggccctgaccgatcttagcatcattataggcataccatgcaccgctcttgttcacaatgccacagttagcagccagatccagaatgtctccaatcgtggagattccctgcccgaacataatatcaaattcagcctctttaaatggaggtgcgatcttattctttacaacttttactttcgtatggttaccgatcacttctccgccctgcttgagagcttccgtacgacgtacatccagacgtacagatgcatagaatttcaatgcacgtccaccagttgtggtctccggatttccgaacatcacgccgatcttctcacgaagctgattgataaagatcacgatacagttagtcttgctgacaacagatgtgagctttctcagtgcctgagacataagtctcgcctgcagtcccacatgagaatcacccatatcgccttcgatctctgcctttggaaccagcgctgccacagagtccacgatcacaatatccactgctccagaacgcaccatggtctcagtgatctccagtgcctgttccccattatccggctgggaaatgtagagattatcaatatccacaccaatatttcttgcatagaccggatcaagcgcatgctctgcatcaataaatcccgcaatgcctccatgcttttgtacctcagctaccatatgaagagcaaccgtggtcttaccactggattccggtccgtagatctcaacaattcttcccttcggaacacctcctgctcccagtgcaatatcaaggcttaaagaaccagtcggaacggtctccacctgcatatgggaagtatctcccagcttcatcacagaacctttcccatactgcttctcgatctggcttaaagccgcatccagcgctttcagacggtcatccttttttacatcatcctttttattatcttcctttgccatgaataatctccttcaaatgatctgtttcacgatacgaacttttgttcgatttccatgcattcatcctatcctatttccagacgattgtcaagtaaaagttccctggattaccatggttattctgttgaaattgcaaagaccccgggatactttctcccggggtctgctgccttttgtgtatttgcgatgtgtttgtgcagtatcagctttatatctgatgcttatttcttagcgatatatccttttgctttcaaagtctctgcgcagagcacagctcctcctgctgcaccacggacggtattatgggaaagtcctacaaatttccagtcatagatactgtcttcacggatacgtcctacagaaatgcccattccgttctcatagtttacatccagctgtacctgcggacgattatcttcttccatatagcggatgaactgctttggtgcacttggaagtcctgcttcctgcgggaatcctttgaagttcaccaggcgatcgatcagctgttccttggtcggtttcttgcggaattttacaaatacagctgcggtatgtccattcagaaccggaacacggatacactgacaggtgatctttggttcttctgcttttacgatcacaccatcctcaatgtgtccccagatacgaagcggttcctgctcggatttttcttcctcaccaccgatatacgggataatatttccaaccatttccggccagtctttgaaagtctttcctgctccggagattgcctggtaagtagtagctacgacctcatacggttcgaactctttccatgcagtcaggaccggtgcataactctggatagagcagttcggttttactgcgataaatcctctggtggttcccagacgttttttctgatgttcgatgacttcgaagtgctctggattgatctccggcactaccatcggcacatccggggtccagcgatgtgcactgttattggaaacaaccggtgtctcagtctttgcataagcctcctcgattgctttgatctcatccttggacatatccactgcactgaatacaaaatcaacgcttgcagctactttttctacttcattgacattcataacaatgatcttctttaccgcttccggcatcggagtatccatcttccagcgtcctccgacagcttcctcataagtctttcctgcggaacgtgcactggctgcaatggtcactacctcaaaccacgggtgattctcaagcaatgaaataaatctctgtcctaccataccggtaccgccaaggatacctactcttaacttctcgctcatctctttcattctcctctgttttatgcccgctgcacatgtccgtatgtagcgtacatttgtatgtcctctgaaatattacaggatttttgataaaaatgcaatacttttttcaaaaacatatgaaatatattttaacatatctatatacatacaacaaccggggcaccgacaaaattgccgatgccccggatttatatgggatccaaatataaggtagctgtccttttatttcttttggatcagataatacggcagtgcaacaaagatgctgccaccaataatatttccaagtgttacccacagaagattgtgaaaatatcctgcaatggtaagtcctgccacaccattaggactcatcaatccgattgccatcacactcatgttagcaatactatgctcgaatccgcacaccatgaaaataaagatacaccagaagatcatgatcagttttccggattctgtcttcatcttcgtacagcaccatactgccaggcagaccatcaggttgcacataatacctttcacaaacagctggccggctgctccacccatcttggttgccgctgtatttgcaaaaaattcaccgacagtcccagtcggaacacccgctgccacgaacatgactgcccctaaaagtgctcccaccagattaccaagatagcagactacccatactttcacagtatttgcccaggacacctgtcccataaaggaaccggctgccatcacaaagttatttccagtaaagagttctgctcctgccatgactaccagactcagtgccgaggcaaatgcgaaagccatgatcggcttggtaatcgtacaacctgccgcagtcagatgtgccccaagagtaaatgtcacaaatcctcccagtgcaataaacatgcctgccactatggatgatacaaaatatcccagtggactcttctccagtaatccaagttttccttttgccgcgttgcatacgctctgatactcgtctttgaacatcttcatctctccattctgctcttgttaccctttatcattctgccagatactcagaatctttatggatcgcccccatattaacgacccgggtcaaagattgttattataataacatactttttctcatgtgtgattgtacacattgtaggaaaggttttcctagagtttttcgaaaaaagactttacaatcttctatttatccgatataatatcatttgttgttatgcaacaagcttccgtggctcagtaggtagagcgacgcactcgtaatgcgtaggtcaccggttcgaatccggtcgggagcttcacgtaaaagccttgatttttcaaggtttttttattttacgccagaaagaaaaccgcccgaaaacgggcggtttttcctgttttgtcgaccggttgtcgaccattcttgcatttattccagcatctaccagccaatcagccaagaatagattccttcatatttgtatctggaagcatcccaggagaagtccttctgcataccgcgggccaccatctcgtcccactcttttctatggacaaaataggtatatttcgcatagttgataacttccatcatatcccacggattgtagttggtgaaagagaatccatctccacgaccttcatactcattgtagggttcaactgtatctttcaatccgccagtctctctgacaattggcacggtgccatagcggaaagaaatcaactgtgtcagtccacatggttcaaatgcagacggcatcaggaatgcatctgctgctgcatacagcttatgagacatctcatccgcataatagatattagcagatactttgttcggatatttccatgcatagtgacggaacatattctcataacgctcatcgccagttccgattacaacaaactgcgtattatcatccacgatctgttccatcacttctgcgatcagatccaggcctttctgatctgtcagacgggagataagaccgatcaacatcttattctcatctactgtaagacccagagcttcctgaagtgcccttttattagccgcttttcctttatgaacatccttgatattgtaattggtattgatcttgccatctgtctccggattccagatatcgtaatcgataccattgacgattcctctcagatccatgtgtcttgcagaaagaagtccatccagtccttcgccatactgcggtgtctgaatctcctgtgcataagtttcgctgacagttgtaatataatctgcatataccagaccgcccttcaacatgttggcgtctctcttatactccagcttgtccggggtaaatacataatccggaagtcctgtcagtccctgcatcgtctcaacatcccagattccctggaatctcaggttatgaatcgtcataacagatttgataccgcgataaaattcgcctgctgcgaactccgtcttcagatataccggaatcagccctgtctgccagtcatggcagtggatcagatccgggcggaagcctacgatcggcaggatagagagcactgccttgtcaaagaaagcaaacttctcaatatcggtacggaaatctccgtacggtttagatcccccgaaatagaccagattgtcaataaaataataggtgacgccctcatactcataggtcatgacacctacatgtgcacccggattataagaaccggttcccatataaaaatgcgtgatatacttgaaattatttcggaaataatctggaatacaagtatagttcggaagcactacccggacatcccactcatctttattgaatcccttcggaagagctccacatacgtccgccagtcctcctgttttcacgaacggtacacactccgatgttgcaaacaatatttttctcataaatgagtccccctgtcgccataaagagatatttgataggaatatcataccataaatcagattatttctaaagcacatttttcggaaagatatgtttttatacttacttgcgattttccttgaaaaatcaacacttttatgtataataagaatggtgcgttttaatgtaaaaattctgataaactgaggtgttacaatgattagtgcaaataacgttactcttcggatcggcaaaaaagctcttttcgaagatgtaaacatcaaatttaccgaaggaaactgctacggtctgatcggtgccaatggtgccggcaagtctaccttcctgaagattctctccggagaactggagtctaccagcggtgacgtggtgatcactccgggacagcgcctttccttcctgaaacaggatcatttccagtatgatgagtataccgttatggataccgttatcatgggaaatgcaagactctatgagatcatgaaagaaaaagatgccatctatgccaaagaggacttctctgatgaggatggaatccgcgccagtgagctggaagctgagtttgcagatatggacggatgggaagccgagtctgatgccgctaccctgttaaatggtctgggaatcgagactgatcttcattacagcatgatgaaggatctgatcggtgcacagaaggtcaaagtccttcttgcccaggcattgttcggaaacccggatattctgcttctggacgagccgaccaaccacctggatctggatgccatcgcatggctggaagaatttctgatcaactttgaaaatactgtcatcgttgtatcccatgaccgttacttcctgaacaaggtatgtacccatactgctgatatcgactatggcaagatccagctctatgccggaaactacgatttctggtatgagtccagtcagctgctgatccgtcagatgaaagaagccaacaagaaaaaggaagagaaaatcaaagagctgcaggaattcatctcccgtttctctgcaaatgcttccaaatccaagcaggcaacttccagaaagaaagctctggagaaaattcagctggatgagattcgtccgtccagccgtaaatatccgtacattgacttccgtccgaatcgcgagatcggtaacgaggttctgtccgtagagggactgaccaaaaccatcgatggtgtaaaggttctggacaatgtatcctttatccttggccatgacgacaaggttgcatttgtaggtagcaatgaatttgcgaagactacgctgttccgtatccttgcaggtgaactggaaccggatgaaggaacttacaaatggggtgttactacttctcagtcctattttccgaaggacaataccaaggaattcgataatgatgataccatcgttgactggctgactcagtattccgagatcaaggatgcaacttatgtccgcggattcctgggacgtatgctgttcgccggcgaggacggtgtaaagaaagtccgcgttctgtccggtggtgagaaagtccgctgcatgctcagcaagctgatgatctccggtgcaaatgtacttcttctggatgagccaactgaccatctggatatggaatctatcacagcactgaacaatggtctgatcaaattcccaggtgtactgctgttctcctcacgtgaccaccagatcgtacagacaactgccaatagaatcatcgagatcttgccaaatggttccattattgataagatcacgacttatgatgagtatctggaaagcgatgagatggcgagaaagagaactgtctacagcaacagtcgtgaagatgaagatgataactaaataaaatgtttgaccgaaatcctcgagggtccacacagaccgacaggcaggaacgctcgtatggagtgtatcggagcatttagatgaaaaagagtccacccagagtgtacatgcaagcatgttcattctgggtggactcttttcactaaatgtccgctccaatccatagcagcgctgttccttgtctgccggtctgtgtgaaccgggaagttttcggctactcgggaatggatgcaaacttttattctataaaatttttcagcggcacgcttcgatccaccggactcatgtcaccccgaagaaaggcttcgatatccttcttatcggtccagcgtccaagagcgatcatagtccgcacaaccagagcttctgtggtcagatcccctgctgggatcacaccaagtttcagagctcgaactcctacttcatactgactcaaatcacaaccgtcaaagatgctctgtgtggtagctgccacaaccatccctttgtggatcattttttcaatagcaggaagaagattccggcgataattggtgattcctccacatccataaacttccagaaccacaccatgatatcccagatccaccactgtctccaatagcaccggatcaaaccccggtattaacttgaatactgccactttagagtccaatcgcacatcaacagctgattctactgttgcagctgcgacagttttttcttttgcagtttcctgcatcatcaatttcccatctgcaatttttcctgcataaggacagttcacactgacaaaggcatcgaatcccatggttcggattttagttgcccataatccatgaatcactctgccatcaaaagtaagataaactcccgccggtgctccgcaggccgtcaggaatgcatcataaatattatgcgccgcatcactgtcctcttctcccgctggaagctgagatcccgtcagaaccacaggcactttaggatggattaacattgtatccagtgccgctgcactgtaggcacaagtatctgttccatgagtaatcacaattccatcatggttcttcattccttcaaatgctgcttttgccatcacagcccactcttctggctgcatattagtgctatcgagattcagaagatcgacacagtcgatttcacacagaccctgaagttccggaatcagatccagcatctgctgtccggtcgtcttcggttccagaccgtcttctccttcctgagaagcgatggttccacctgtcgttatcattagaatccgtttcatattacatagacacccgttctgcaatctctgccatcttcgctttattcagcctggtatctccctttactctggaataggacagatagccgttcatacggtcgatcttggtcagatttttgctgccacatttagggcatacatccatatccagttcctgatatccacaatcatcgcagtatgccaatgacagattcacgccttcgtaaaatccttttttcatagcacgacgtaccagagtgcggacagcctctttgttatatcctaccggataacgcacatactgaatctttccaccgttacacagttcccagaagcggccttccttatcctgcttttcaattggagtcatttcctcagtcacatgacagtggaagctgttgctcacatacggtctgtcagatacattttccacgattccatatttcttgcggaactgctcgatctgaagtccacacaggctctctgccggagtaccatagatggcatagaggataccatcctcttctttatattcgttaatctttttattgatgtatcgcattacttccagtgcgaactcgccgtcttccctgatagattttccattgtaaagctcctgcagctcattaagggccgtgattccaaaggaagctgtcataggtttcaacagtggtttgatcttatcctgaggcttcagatgtcctccatagaaaccaccttcacagtaagccagcggattggtagacgctctcatctcgcccaaatagtcaaaggtacggatatgaaggttacggatcatctccagatagtaatccagcacctcatagaagtcccggttctctgctctggactgtgccagaatcataggaagatgcagacttacagctccgatattaaaacgccctacaaataccggcttgtcattctcatctgccggtctcatgcctcctcgctcataccaggggctcagaaacgcacggcatcccatggggctgatgactctcttgtattttttatacatttcagagatatatccttctccgctcatggacagccaatctggatacatggttttggaagagcactcgatccctgcttcaaatacatcctcgcagacaccgccttttccatgaatttcttcgtcataaagaaatacaatcttcggaaacagtaccggctttttgttccccggtttaccctgtccgccctgatgcacatgcagcagagaaatattgcacatctttgcaaaccgttcctgtccaagtccaagggttactgtcacaaacggataatctccacgggaagatcctaccgtatttaacttatactcaattccctgccatccctgatcaaaatctctgcggactttgttcatggcataggtctctgccttctcttccactccctgccattcaggatccatataagataaaaattcggttttgtattttttgtagctcttctctgcataaggtgccagcaccttatccacttccggcactgtaaatccaccgtactgctgggctgcagtacttaagataatgtctcccataacgtcaaatgctgtatccaatgtcttcggctcgttgtaccacacgttacccatctcaaaaccaccgttcagaacactggcaatatcaaacagacagcagttcatggtatccagacgtgctgactgatcatgaatgtagatatatccatccctgcaggcctgcagctcattgcgattcataaagaacttgcggtacaattccttgttcagctcattaaagatcaggcttcgtttggtggctaccagagcactgtctgtattagcgttgctcttatcaccaatgtaacggatagactggctcttagtatagacgtcatccatcatgtgtacaaaatcttttttatagttccgatagtcacgatagctctttgccaccgccggattcacatgatccagagctccctccacaatattatgcatatcctggatatcgatattttcttttcccagggactctgcacgctcctgcgcgaagttacagataaatcgaatctcatcctccgagaatttgtacaaaattcttgcagccgacttattgactgcattaatgatcttttctacattaaatatctctcttgttccgtcctttttgactacgtacaatttcattcacctctactatatcttgtgttttatgtttaattttattccaaatattgattaaaagtatataccaaccacatttaatatgcaagacataatgacgctgaaaacttaccaagaaatttttctgaaattctactatatttcacaaacttcaaaaaaacaggtttatccacttgacaaatgggtaaacctgctcttcataattttcatcttttgttacttcatgaagcgatcaatggcctctgccagttctttcactgattccatatctccgcactctactgcatctaccagacagtgttcaatatgttccttaagaatcacttttccggtattattgatagccgactttacagctgacagctgtatcagcacctcactgcagtctcttccttcttccaccatgcgacggatagattccagatgtccaatcgctctggaaagacgattcagcactgcttttgtattcgtatgagtatgcgtgtgtccatgtccatggctgtggcagcactcatcatggtcatgatcatgggtatgcccctcatcatgactgtgcacatgctcatgatcgtgatgtacgtgctcataaatcgttccatcaggagccacatgcacatgtcttccctcttctgacatatcattcctccgactgaagtcctagactccagtttctctttctgtattttccaaaaatctctgttttaccagcaaaaattcttccaggttcatccatacctgttcgccctccggctttttggcttccaactgcaattatcttccgttatatacgattccctgttctgcatccatagtcacaaatgttccagacttgaggattctggtcgcatttcttgcagatgtgatgaccgggatttccaaagtcattcccacaactgctgcatgagaatagcgatcaccagtctctgtgatgataccggctgcatccttcagcttgtgaaccatctcattggtagtctgctccacaactacaatatctcctgcacggaattttttctccagatcttcatcattgctgcatacgcagacattcccggaggctttcagtttattggcaccttttccagtcaccagtgcattacctgcgatctgcaccttcatcatattagtagttccggacaatccaaccggcacacctgctgcaataacaaccagttctcctctggcgatcaggcctttctgctctgccagttccaccgcatgatcaaacagctcatctgcagtatttgcttcttccatcacgaccggagtcacaccccaaagcagatttaactgacgatatacacgctcatctgtggtacagccaatgatcggacataccggcagatattttgcgattctggacacggtacggccagatttggatactgccacgatagctgctgctttcagatcggctgctgtcgtacaagtcgcatgagagatagcgctggtcacatctggtgcttcagccagctttctcggcttaaattccctgctataatcaatatcctgttctgtacgttccgcaatcttcgccatagtctgtactgcttctatcggataagcacctgcagcagtctctccagacagcatgatcgcactggttccctgatagatcgcattggcaacatccgaggtctccgctctcgtcggtcttggattcttcatcatggaatccagcatctgtgtagctgtgatcaccggttttcccatatgcattgccttgcggatcaattctttctggattaccggaacttcctccagcggaatctctacacccatatcacctctggcgatcataattccatctgccactctgagaatatcctcacaattttttacaccctgcttattttccaatttggcgataatatgaatcttctcgccaccatgctcctgcagaatcttgcgaatctccataatatcctctgcagttctggtgaaagatgctgcaataaaatcataatcctgctctacagcaaatacaatgtcagcaagatccttctgactgacaaatggcatattcagttctacacctggaacatttactcctttatgatttgaaataaatcctccatttttcacacgacaaacaatatctgattcatcaatgcgcactacttccatgccgatcagtccatcgtcgatcagaatagaatctcccggttccacgtctttgtacaattctttatatgtgatcgtgactttcttctcggttcccagcatctcttcagtggtcagcgtgaactcctggcccggctttaattccagttttcctccttctacatcaccgatccggatctccggtccctttgtatcaagaagtgctgccactggcagattcagctcttcccggagtttctttatcatatccagtcttgctttctgctcctcgtgagttccatgagagaaattcattctggctacattcatgccatttttcatcagatttcttaatacgtcctctttatctgtagatggtcctaatgtacatacgattttggttcttctcattctttatatcctttcctgcatatagtattctatggttatgacagacctattcatcaggttttactttttttacagtatccacttatggtcagacagacaaaggctgtctgcccatgtttctaatttaccatctgttcttcccttttgcaactaaaaaggaagttaagatcatgaaaagaatttatgagctgacagccttttatctatcaatcactttattcgtttacactatagttcggtgcttcttttgtaatatgaatgtcatggggatgactttctttaagagaagctgcagaaatcttcacaaatctgcctgtagtcttcagtgtctcaatgtctttagctccgcacagacccataccagaacgaagtcctccaagaagctggaaaatggtgtcttccacataacccttgtaagctacgcggccttccaccccttccggtaccagctttttggcatcactctggaaataacggtctttggaaccattctccatagcagagatggatcccattccacggtatactttatattttcttccctgatacagttcgaaagatcccggactctcatcacaaccagcaaagatacttcccatcatgcagacattcgcacctgctgcgattgccttggtaatatctcctgaatatttaataccgccatctgcaatgaccggaataccatattcttttgccacttcgtaacaatccattaccgcactgacctgtggaacacctacaccagataccactcgggtagtacagatagatccaggtccgataccaacttttacagcatctgctcctgcttcgatcagcgctctggtaccttctccagtagccacattacctgcaataaccggaacatctggatatgcttccttcagcatacgcaggcaacggatcacatttgcagaatgaccatgagaggaatccagaaccagtacatctacatgcgcatccaccagtgcttttgctctctccagtacgttggcagtaataccaataccggcaccacacagaagacgtccctgtgcatcctttgctgccagcgggtatttaatctgtttttcaatatctttaatcgtaataagacccttcagattgaaatctttatcaacaatcggaagtttctccttgcgagccttgccaagaatcacttttgcttcttccagtgtaataccttcctgtgcagttaccagattctcagaagtcatggactctttgatctttttcgtgaaatctgtctcaaacttcagatcacggttagtgatgatacctaccagcttctttccttccgtgatcggtacaccggagatcctgtattttgccataagttcattggcatctgccagtgtatgctccggtgacagagaaaacggatctgtgataacaccgttctcagaacgttttaccatatccacttcttctgcctgctgttcgattgacatatttttatgaataataccgataccaccctgtcttgccatagcgattgccattctgtgttcggtaaccgtgtccattcctgcactcatcataggaatattcagcttgacagtctttgtcagccatgtctccaggttgacctggttcgggatcacctctgaataggagggaaccagcagtacatcatcaaacgtaatgctttcaccgataatt

SEQ ID NO: 3828 - DNA, 6628 bp, Unknown
  16S sequences of unknown bacteria
agcagcagtcccgccataaaatcgctttgaacgaagtgaattgtcagtatcacctttccgcctattcttcctatgactgtgtcaagctgagtcaataggatatccgggttgtcgtctctaaacgcaagaaagtccttgaaagtgcgtccctcacgagtctgtttcggcacaaagtcgctttttttaggttttctcggtttgaatttgacagcccgcggaagatcaagaggggtgattgagtaatacctctttttgatgtggcggtacacggtggctgatgataccggtaagttgtttgaccggataatgtggtagatgtgctgtcctctccgtacggcttcagagataatcctctccgtctcgtagaagctttccttgttcagcggtattccggttcttgactccacgagcatggcttcatactccgcctgagctttctttgcggtgtacagttgacgtctgtaagggcagctgccgcggcttttcttttcgcatccgctaaacacaaacggcgccttcagaagctttgggcatacctcttctgtgcgtacaaatgagtttgagtacgggtgcatatggagcttcacctcacgggatatcgtggttcggcttttgcctattttttcactgatcgccttaaaggtcattcctttggtaaggcactcctgaatttcgattcggtcatcgagcgtcatgtgtttgtttttctttgtctgagcctccatttctcagactaaattgtaccacataatccttctcagacttaatgcaaccgcaaatgctactgttgcatttactttgagaagtttcatttttaataaaaattcaaatttaagtaaaaatctattgcaaattattttacactgtgatataattacattatcatgagatgttaactaacaaaatgtctctgaaaacgcttagaaatccataaggagctttataccgcaatgaaaaagaaactttgcctgatgcttgtagccgcaatgcttgtttcctcattgacgtcatgttccgaaagcaaggtcaacgaagaaaaagaaacgaccgcagcttccgaaacagtcgcaaatgtatccgtaagcgaagaaaccgaggaagaaacgaagaaatatcttgacgatctgccggaaaagatggacttcggaggaacatcaatgagattcatcgttgaagaaggcggaaacggaaacctttccgagctttccatcatggctgaagaagataccggcgaagttgtcgattctgctattttcacacgaaacgcttccgttcaggaaagacttaacatcaatatagatcttgttgacaccattatgttctccggtcttccggcagttgttcgtccctccattacagcaggctcagacgactatgatatcatcggtacatatcagtattacggaatctcaatgggtcccgagggtcttttcttaaacctcagcaatgtccagaaccttgatttctcccgcgaatactggggcacaaactacataaataatatgtcgtacaagggaatcacatactgggcaacgggcgacatcgcgctcagatacaccggcggtatgtacgttacctacgttaaccaggaaatctggaacgaccacctctccgaccaagacatctatgacatagtaaatgaaggcaagtggactctcgacaagctctacgaagtttccgacgcgatttatgaagacgttaacggcaacggcaagcttgacgctaaggactcatacggctttgtattcgacattgaagacccgacagaaggcatggcagccggctcgctcataaagttctcagagcttgacgaaaacggcacgccttatatatcgctcaacaacgaaagaactcttacgttctacgaaaagatgtacaacatcatcgcaaacaactccggcttctggcataccgaagacgacaacaaaactgttatgaaatgttctccgaaagcagagctatgattaccgttaacaagctcttccagtccggtatttacctcagagagatggaacaggaattcagaatcgttcccgtaccgaagctcaacgaagagcaggaacactacaacacaatgctccacgacggcgtaacacttttcggtattccgattaccaaccagaagctcgaagaaaccagcattactcttgagtgcatggcatccgaaagccttaagaccgtaactccggcttactacgaagttgcgctgaaggttaagtacgcacgcgataacgaatccggcatgatgatcgaccttatcagagaaaacgtttccgctgactttgcagctctttactcgaacaatatcgcaaacgttgtacacttcttcaggacaaacctttcaagcaaaaaagacaacattgcttccacactcgaaaagagccaaaagctttggaacaagtctatgagcaagcttctcgacaacatcgagtcgaacgccaacaaataaaattttatcaagttaaatttaaaggaatgagtagggatatctcccgctcgttccttttttgttttggtgaaatacagtatttacggctttatccacagtcatgcatttgtacagtacagagattttactctcacgctattgcactgccgcggttttgtgctataattgttgtacctacaacgatgtatatacaatcttttacagaggcatattatggatataaccaagcgaaaaattacaaaaatcgcacgggaagcggaaaaactggttcttgtttccctgcgtgaggaaggagtaggcacggcggaaatcgacctgatacatgcactgcgccacaatcccggatgcactcaggcaaagctcgcggaaatactgcacgctgacaaagctgcaatcgcgagaaggacgaaaaatcttgaagcaaagggctatctcatccgcacagacgctccgaacgaccgccgaagccagctcctctacccaacagaaaaagccgagaaattgaagtcatcaaaagaggaaatcgagtcgtcattttacgaatatctgacctcggctctcacagaaagtgaagctgatacatttgcagaactgctcgacaagctgtacaatgtctctaaaaccgagagccgcgcgggatttccgcattttatgaagcagtaacgggggagctcacatgaaagagaaaaaagcgttttacccggataaaatcggctcgtatttccgcatggagtggctttcgctgacatttgttacgctcttcggaattttctacaacgtcggactgcttgcttctccgtggttcgagggtcatcttgcgcagtgtctcgctgacattctcggcggaaacgaaaaagcgggtaatatggcgatgcttgttcttgcatacatagtggtcacgttagcggtacaggcggcaagattcgtcaagagattctacgtccgccgctttgccaacaacatcaaccgcaagatgaaaggcattctttacgccaatcttgttcgcaaaagccgtgcttctctcgaaaaagaaggtgcgggcgagcttatgacgaaagcgatatccgacgttgacgactgcgttgaaggaatgagaaaattcaccaccgaagtctttgacacgggtatcgcaatggtcggatacgccgtcatgctgtttgtttacgaccaacggcttgctctgctcagccttatgttcactccgatttcgtatttctgcgcggcaaagatgaaaaagccggttcagcgtgcaggttcggcatacaaaaaagccgcaggagcactcagcgccgctactctcgaccgtgccgaaaacgctgtaacctatcgtacatacggctgtgaaaacgcgagagtcgaacgctacgaagctacactgaaaaattacgaaaataccgcagttaagaacaatgtttggcagtccgctctccctcctctctatcttgcggcgtcggaagctggcgtgctgttcatcatctggttcggcgcgaagaacgttctcggaacaggatggaacacatgggacattgcggcaatcacgacattcctctcctgcttcaccaagctgacggtaaaatcctcaaaagttgcaaaactattcaactccgtgcagaaagccgaggtttcgtggaagcgaatcaagcctatgatgaatatgccggagcagcttgagacgctcgatattccgaaatccgaagacgttacgataaacaacctctcctttgcttacggagacactcacattttctcgggtcttaatctgacggtgcgtcccggagaaatcgtcggaattaccggtcctgttgcctgcggaaagtccactctcggtcgcgtattcctttgcgaagctccgtacagcggctcggttcggttcggcagtaaggagatatcaagcctgacttcgcgtgagattgcgggtactgtgggatatctcggacatgatcccgagctgagcacagacaccgttcaaaacaacgtactctgcggcagtgactgcgacctcatgaagtacctgactgcggtagctctgaaagacgaggttttgtcaatggaagatggggtcaacactgtagtcggcaacaacggtgtgcgtctctcaggcggtcaggctcagcgtcttgctcttgcgaggaccttagctcatccgcgtcccgttatggttttagacgacccgttctccgcgctcgacagaaggacagaggacacagttttcggggctcttcaggactacgcaaaggacaaggttgtgttcctgatttcgcacaggctttaccatttcccgaaaatgcagaaaattatctttatggaagacggaaaaacaactgtcggtacgcatgacgagcttatgaatacatctccggcgtaccgcagactttacgaaagccagacaggaggcgaaggtcatgaaaaagaaaactaatgaaggcgtatttaccgctatcaacaccgctgcacgtacacacaagctcctgacaataggtacaattttgtgtgtagctgcttcggtcggagcttcgctgattcctccgcttcttcttgctaaaatcatcgaccgtttgacaggcggaatttcgctgacatttgcggcagtgctactgtatttcggaagccttgttctcgagagcttgttgtcttccgttcaggaaactcttctcgtgctgttcggtcagaaaatgacgcacgcgctccgctctgaaatgtcgcacaagctcaccagacttccggcaagcactctcgtttcgcaaaagcccggtgaggtcgccgctcgtttctcgggagatgttgacactgtggaagccctgttcacctcgggaataatcagcatggttgcggacgcctgccgtataatctcgattttcgctgtaatcgcggtgaaaaacactggtcttgcgcttgttctgcttgtggttcttcccttctttgcaatattcacatgccacatccagaagaagatgctgtcagctcagcttgaaaaccgtcgtgctgttgcggcagtatcgggacaggtgcctgaaactctgcacaacatacgtacaatacgcgctctcggaatggaaagctacatggaacgccgctacgacgaacgaatcggagaaagctatgccgcggttgaaaaaaccaacttctacgacgctatctattctcctgtggtgcttcttttgaacgcggcggttgtcggtatcgttatgctgctctccgcatctggcaacgcaaaggttttgactttattcggaatgtcggtcggtacgtctgtcgcggtcatcaactacatatcacgtattttcgcgcctatcgaaagccttggcatggaaattcagacaattcagtcggctatggcaggcgttaaacgaattgacgcttttctcgcggaagaagaacgcactatccccgaagaaagggaaaacgaagcgcgtggagacgttgtgctgtcccatgtaacgttcggctacagtgacaagctcgtgctgaatgacttttcgatggaggtcaaggaaggcgagcagataactcttgtcggaagaaccggagccggaaaaagcacgattttcaagctgctgctcggactatacaagcctgaaagcggaaaaatcacaatcggcggtgtggatgtatcggatataaccgacagtgagcgccgcgcctgcataggttgtgtggaacagcacttttcacgggttcccggcaatgtcctcgaccagattaccctctccgatccgagcataaccgaagaaatggcgcaaaatgccgcaaagctcgcgggaatagatgaaacgatacgctctttccccgaaggatatgcggctgtatgcacggacggaatgttctcgcagggtgaatggcagcttttgtcaatagctcgtgcggctgcggctgatccggctgtgctcctgctcgacgaaataacagcaaacctcgacgcggaaactgaggcgagagttctggaggcactcagaagagcatcggcaggacgcactgtgctttcgatatctcacagaatctacgaaaacctcggcggaaggactatcgagattaaggcgtgagggttgggacttaagctgaatatgagataaaaactccaatgcggtgtgatgctgcaaaggagttttttgttgtggaaacaggtgcgcacatacacccgtcagaatccaaaaaccgcatagggatagaattatcggacaa

SEQ ID NO: 3829 - DNA, 13047 bp, Unknown
  16S sequences of unknown bacteria
ccgggtgtcggcggtctcatggattcagcggcagagacgattgccggttctgcgctggttatcaaaaatgcagtcggggtggcagggatgatcgtggtgcttctgatttgcttactgccatttcttaagctcggactcagtgtactgttattccggctgctctgtgcgctgctgcagccgatcagtgaaaagcgaatggtggactgcatcaggagcttttcagacggagtgatgctcctgatgaaaacaatgctggcgggacttgcggtgtttctcgtatcactagcgatgatcaccgcgtccgtgcggggaggataaggatgcagaactggataaaaactcttgtggtgggcagttgcctgcttacgatgctgctccatatgattccaaatggaaaatttgtaaaatatgtacgtttttacgccggacttatctttgtcctgctggcgatgcagccggttattcagctgttttccgggggcactcttgaggagctgctgcagtttgcgcttctgcgggaagattcggcagagcttgctactgcagtggagagtatgagagagctgaaggactcgcagatcatggaagcctgtcagaaggagctggtcagccagctggaggatctgtcatgtgcctgcggcgctgatacggcgcatgtgacggtccggttttcggattcatcggaaggaatagcggatgcggtgtccatttctatcagtattttgggcggaacaaccgggcagtacagggacactgcagcggcgatccgggagaaggcagagacattgtatggcattgctccgaaggcgatccatatcagcgatgaaggaggcgcatggctttgaaatggctggaaaaactcggaggagacaaaaaggagcgaattctgattttattgcttgcgggggtgctgctgcttgtaattgtcattccgaccgggcaggaagggggtgagatgacggagacgggcgattcggtgcaggtcgtatcggatgacaccggaaggacgaaggaagaagcacttgaacagcgactggcagccgtacttgcacaggtggtcggaatcggaaaagtagaggtcatgattaccctgaaatcaaatggcagacagattgtggaaaaggatatggagcagcagcaggacattactgatacggagacaccggcaggaagcagcagtcgccgggagacgacggtactgcaaaaaaatgcaaagggagacgaaagtccgtttgtatcggaggtcgaagcgcccaagatcgggggtgtgctcgtcctggcgcagggaatggacgcggcgatggcgaacgagattacagaggcggcgatggcattatttggaattgaggcgcataaaatcaaagtaatgaagatggagtaaggagagaaaaagtgaaacgattatttaaaaagaatcagatcatcattacgacactggcaatcatgattgcgattgccggatatctgaattactcagggagaatcctgagggaaaaatccaaagaggcgagctctgatgataatacggtactccttacggatgaagcgccgcaggcggtaaatacatatacggattcctatgaggatattgtgagcctggacggggatggaagcgagacggcatacgcaaagccggatgagggaagcacggtcggagaagccgtgctggcgagcagcaccggaacgaatcttctcgcagccgccaggctgaatcgtgagcaggtgcgggcaaagagcagagaaaatctgcaggccatcattgacaatgaacagatcaccgagaatgaaaaggcagaagccatttcagctatgaccacaatggaagagatggcgcaaaaggaggcggcggcagagctgcttttagaggccaagggctatgagaactgtgtcgtgagcatcgcagacggagaagcggatgtagtcgtaaacgaagcctctctggatgaggcacagcgtgcacagattgaggatattgtaaaacgtaaaacagatatttccggtgagcatatcgtgatcacaccgggagcggcacagagctaaagacaagcggatatatctgcaagtcctctgcttattgctttgcgcaattgaagcaggggacttgcctgatttggttaaatatcctgcccggaacaggagccttatcagatcatacattgacaatattgccatagaaatttataatgaattaattgcctgtatcatttactacagtatttgttccgaagtacaatgatacggcagtacatacgggtcatgtatgtattattcatttcgggacaggaagtgacagaagatgaaaagagacacaaatgcactggatcaggctttgcagagcctgtttgaaaaaagagggtaccctggaatagctgtgacaatccgtggaccagaaggcattctatttgaaaagggatacggttaccgggatgtagagcatcagcttccggcagatacacatacgatttttggtattgcctcaatgagcaaatcaattacggcactttgctgtgcaatccttgcaacagaaggaaagctcagcttggaagatccgatcacaaaatattttccaacgctgcatattccgggaatcccggatgagtgtgtgactctgagaatgcttgcgatgcaccgggccggccttccgccgatggagcctctggaatggtcgattgcgaaaaacagccgggaacgcgatgacgactggttccggcggatggctgcggaagcgccaaatcagatggatcagatcggacagatcgtagattatatctccgccgggaattatgaaccgcttggcatgccgggtgagtatatgagttactcaaacgagggctatgcattgctgtcttatgttgtagatcaggcagcgggaattccgcttgagcagttcatgaaggagagaatctttgatcctctcggaatgacgcgtacggtgctcgacctggatggaagtgaggctcgagagctatcgggtggaaatataacgagtctgtttgaacgggataaggatgggcatttgacgcaggatgacagctggtcggtgcttccgccgttccgcggctgtgcctgtgtaaaatcaactgcgagcgatatcagccgttattataagatgctcagtgatggcggtgtgtgggaaggatgccaggtgataccggcggaagcggtcgacctgctgattggcagaagctttccgacagaggagcgtccatactactgtctcggactggagaagcggctgattgccgggaaaatcgtctgcgaccattccggcggactgcatggtgtatcaacaaaaggtggctttattgaaggcggctacggtattgcagttctttgcaacgagggcgatgtatcaatggaagagtttcagtggatctgttacaattatattctgggacttccgcttgagacgacacaccggtgggcagagccaaacggcagtacatttagtatgcccgaagcgatacagggagattatcttgccaaagagggaattccggcacattgtactgtatggcaggaaaacgggaagcttgttggcatttatggcgaaacagaggttgagttccgttattgcggaaagaccgtgtttgcggcctacagccgaaaggatccggcaaagcggtgcagcacaatggaattttatattcgcaatggacaggcatgggcggtacggtgctatacgagaatctatcagaggattgacgggtagcgcaaagctcttacctgcggaaagctgacagttaacgaaattgagaaaagaaaattacgaaaagatagcgggtgaaaaacatgaatatcatagatatgcactgtgatacaatgtatcagatttatgaacggaaaagagaaggaaaaacgattgcggttcgcgatgatgccaatctgcatgtgactttagagaaaatgaagcagggtggttatcttctgcagaactttgccgcatttgtagagctggaggagtccaaagagcagctggcaaacgaagtagaggatataaagcttgcgccgtaccagtttgccaggcatctgatcgatacatttaagacgcaaacagaggcaaaccaggatctgatcggcgttgtccgctcctttgcagatattcagagcaatgaaaaggaaggacggatgtctgcgctgctcaccattgaggaggggggcgtctgcttaggagagatcgagaagcttcgtgaattttatgaagcgggtgcgcggatgctcacattgacgtggaactatgaaaatgagcttggccatccggcggcaatgcagggagatcactggaagaactaccgggcgaatgagaagcgcccgctcggattaaaagagcgtggttttgagtttgtcgcagagatggagcggctcggcatgatcgttgatgtgtctcatttatccgacgatggtttttttgatctgtgtgagcatgcgagaaagccatttgttgcgagccattccaattctcgcgcgatgtgtggccacaggagaaatctgacggatgagatgctgcgcatgcttggcgaccgtggcggcgtatccgggctgaacttctgcccgggatttgtcatcgcagaaaaagatgaaaatggacagcgcatgcatgacgggaagaatcttctcgaatatctggcggagcacgcagtacatatgatgaacgtcggtggaactgcctgcgtcggacttggcagcgattttgacggctttagcgaaaacggaatgccgggcgatgcctctgctatgcaggactttgcatgggcgttgcacaaggcacacgtatcatatgaccagattgacaatattctttatagaaatgtgtaccgactgtaccgtgaactgctttaaccgagccggacaagtcccaatccaccgcttagtgcttctcgcacttgaacgcagataagcattcccccgcttcaagtgcgcggagcgactgcgttcatgagcaagtagcgaagccagaccctgtcagcagagctgcagggatggattgcgaatgtccgctttacgaggggaatattcattcgagaacatcttagtatacacaaaaaggagaatacctatgtcaaacaatacggattttaatcaaccatacgccggccggctgacggagctgcacctgcatctggacggatctctgcgcccggccagcgtcgtagagcttgcaaagcagcagaatatccagctcccgacagaggagcttgaggagctgaccagcgaatatttgcaggtatcggaggactgtacagatctggtggcatgtctgaagcgctttgaactgccggttcggattcttggcacaccggaagcgatccgccgtgcagcctttgatctgaccgaggatctggcaggcgagaactatgaatatgcagagattcgctttgcaccgcagtacgcaaataagaccggctacagtcaggaggaatatgtgcaggctgcgatcgacggcatgcaggatgcacttgcgaaatatccttctatgaaagccggactgatcctttgctgtatgagaggtgctgacctgcgcgaagagaatatggagacgatccgccagacggcaaaatatcttggtagcggcgtgtgcgcggcagatcttgccggtgctgagagtctgttcccgacggagattttcgaggatgtatttgcacttgcaaagcagctggatatcccgtatacgattcacgcaggagaggcagcaggcccggacagcattcgctgtgcattaaagatgggcgcataccggatcggtcacggcgttcatgcgattgatgatccggatctggtaaaagagctggccaggaccgggacctgtctggaggtcagtctgacgagcaatcttcagattcaggcatatccgactgccgagtcgcacccgcttggcgtgctgtatcgcgccggtgtccacacgacagtgaattctgataaccgcacactctccaacgttactttaaagagtgagatcgagaaagtaaaacgtgcatttcaccttaccaatgaagatattcagatcatgcagcagtacgcaagagaagcagcgtttgaccgactggtctgaaatgtcataagggggcaggggctagcgggagcccgaagctttatgtccctccacgcagatccagtccttgccatcctttagatgaatctgaatatcggagaaaccggcctgttcaaataaggtgcggaactcttccggtgtcggattaaacagatgaaaattccggatattttccagtgtcttgtcgcttaagccttccttctggtaaacatcagcgacaagcaggaaggtgccggaattttttaatacccgaagcacttcttttaaattcttctgcggtgatggccagaaataaaaactctcgacagtaatgattttgtcaaacgtatcatctgcaaacggaagctgttccacagaggcttccagaatgtccatcttgtgtgtattgatggcatccgagttcgtttcgcgggccgtagcaacggataccggagagtagtcgacaccgatcaggtggccggtcgtgacctgagtcgcgattcgtttcagagcggcacctccgccacagccgatatccaggacagtatcggtttcatttaccgtccagaatccgagcgcccagcctgtgaccggtgtatggctctcattcatacggaggagcattttactgccgtcctcgccttccggatggcgtggattgccggagattgtgatttcttcctgtgttcttatcatatctgacatgtttcagatccctcattccttttattatagtttgtattattacagttcgtattgttgcgcttcgtaataagtttgaagcatctaatgccatattataatgaatccatcccgggatgtaaagctccatatgtcagacatttttatctgaaatgtaagtaaaatccgttttatccggatttcatcatttttttctgcgctttacaatcttttactgactcatgatagtccctccttttagaatccgctataatggcaccatccaatgaaggaggagaaaagaaaatgttcaaaaagacgatggcaatggcacttgcaggattaatgctgacaagtatggcaggaacaacagcattgacggcaaaggcagaaaatgacgatgtaatggaactgacgatgtacttcccggtatccgtcggaggcggaccggatacactgattgatgcactttgcgaagaatatcataaggaaaatccaaatgtaaaggtgaccccggtctacgccggaagctatgcagatacaagaacaaaggtacaggctgcgatcaagggtggcaatacgcctgatctggcgattatgttttccatcgacctgtattccctgctttcaatggatgcgattgcagacattgacagcttctgtacgactgatgcagacaaggagtggctgaacggattttatgatggctttatgatgaacagccgtgacggtgagacgacttacggtattccgtggcagagaagtacgatcgtcctttactataataaggatgcttttgaggcagcaggcttggatccggaacagccgccaaagacctgggatgagctgaaagaagatgcaaagaagctgaccatcacggaaaacggacagacaacccagtatggtatccagattccatcagacggctatgcatactggatgctgcagactttctgtgtcgagcagaacgggtttaatctgatgaacgaaaccggcactgagacatactacgatgatgaacgcaccgcaaagggactggagttctggaagagcctggcggatgatggttctatgccggagggtattgtcgcatgggcaacgactccgtctgacttccttgagggtaagactgcgatgatgtatcatacgaccggtaacctgacaaatgtgaaaaacaatgcaagcttcaatttcggagttgcgatgctcccggcaaatgaatcctacggatctccgacaggcggtggtaacttctacattttcaagggcgtttctgaggagcgtcagcaggcagctttcgatttcatcaaatggatgacagacgatgagcgtgtggcacagtggagcattgataccggatatgttgcaacccggccgagtgcttacgataccgagcgcatgcaggaatatgcaaaagaattcccgtactgccttgtagcaagagatcagctggagtacggctatgcggagctttccacttataatcaggcagaggtacagaaagccattgatgatgcgatctcctatgtgatgaccgatcagcaggatgtcgagagtgcgcttgcgactgcacagcagacagccgacggaatccttcaggcatatcgctaaagaaagcgaaaagagaatccggacgggctgcagaatgaccggcaggttatcctcagcccgttcttattgagtttaaccaaatcaagcagcgaagttaggccctgtcagcagagctgcagggatggattgcgaatatccgcttgacgaagaaaggaatgagtacatgagtacagcagaacaggtgctgcgccgtcctgtggcggctgaacacgattacagtgtatcccttgagtacatcagagaaaaggcaaagcgaaaaaaatggagaacgagcatccatgcatgggtattacttttcccgtctctgattttcctcggtatttttacagtctaccctatcgtacagagtgcgttttccagcctgtataaggacgacctgacgacaattacgccggtattttccggtctggagaattaccgcgcacttgcattggatccgatcttcagggaatgcattcgcaataatcttctgattgccgtggtgacggtgcctgcaagcattgcactcggtgtagcgatggcctcattttctcattcccttgggaaaaaggggaagactattacgcggattggtttcatttatccgacgtttatccctctggtcgcagctgcaaatatctggatgttcatctacacgccgatatacggacttctgggatatatcaatcctgagtggcggctgctggcaaatggcaggacagcgatatgggcaatcattgtcatgctgatctggaagcaggccggctatctgatgttgttttacattgcgggactgaacggaatatccagggaagtatttgaagcggcagagctggatggtgcgtgcggatttcagaaattccgcacgatcacatggccgctgctgaagccaacgacgatgtatgtctttatcattgcgctgaccagtgcgtttaagacggtcgaccacctgtatattatgacaaagggaggtccgggaaatgcgacaaatatgctgctgttttatatttatcagacaggctttgactactggaataatggcaaagcatctgcgatgacggtcattcttgtcggtctgctcctgattattacggcagtaaaatttttctatgacgacagaaaggcatattacaatgattaaaaaccggaagcttggaactatctgttatcaaaccatcatgtggcttttgctggtgctttgtatgattccgctcatatgggtcgtgcgtacggcgttcatgccgacggcaaaagcgctggatctgtttgcggtcgcaattccgaccatggacaacatccgccatgtctttgagacggtaccgtttttgcagtactatggaaataccatttttatcacggttctggtgcttggcgtacagcttgtgctggtgacatttgcaggctatgcatttgcccggctggacttttatggcagccgcgtcttattcgtaatctttctggcgcagatgatgattgcgccggaggtgctgattctgccgaactacagtctgatggtaaaactcgggctgaatgacacacggcttggcattgcgttgccgttttttgcttccgcgatgggaacactgatcgtccgacagacgatcaagacgattccgatagagctggaggaggctgcgcaggtagagggtgcatcctttttacagatcatctggcatgtgtatgtcccacttttaaaaccggcgtttgtttcctttggcatgatttcggtctcctaccagtggaacaatttcctctggccgctcgttatgacggattctgtcggcaaacgtccgctgtccctcggacttgcgatgtttgcgatgtcctttgagaccggagcgcagtggagcgatgtaagtgccgcgacctttcttgtgtgcgcaccgctgcttattttgtttatcatattccagagacagttcatcgagagctttgttcattccgggatcaagtaggaggggccatgcagaaaaagctgtttattatggatattgacgggacactggcgatcggcggaagcctgataccgggtgctgcggagctgatcagggaaatacgcatgcagggcggtcaatgttgcttttttacaaataattcctcgcgtggaatccgagaatatcaggagcagtttgaaagctggggaattgaaacggaagaacgggaatttctgaccgcaggaacctttgcaatttactggatgaaacagaaattcggagagcagaaaatctatgtagaagggacaaacgcatttcttcaggaatgtctgcggaatgggctgtatgtgaccgaggagccaaaggcagatgcggtagcagttctcagtacctacgaccgggagctgacctatgagaaaatcacaaaaacgtgtcagatactggaacagggggtcccatggtatgcgacgaatgccgatgcgggatgcccatgtgaatttggtatggtaccggactgtgctgctatttgtgcgatgatctcccaggctgtcggccgcagaccggaatatcttggcaagccggatgcagggatggcggagtatgcgctgaaacggtttggatgtgcaaaagaggaagcgctggtcattggtgaccgcatttacacggacatcgcctgcggggaaaatgccggaattgatacatgtctggtgctgaccggagaggaaaaggaatattctgaccagccgacgtactgtctggcttccgtgcagagtctggctaaaattctgaagcggatacggatatccggggagacgtgctttccgccgtcaccctttgccgatacattaaatacgtatgtggaaagtgattctgctaatatatgcacttctctgtgtgacacgactgcccgctggtacaaaggcgatctgcacatgcacacgacccgctccgacggacatgatacaccagagcagctaaacctgcgcgccgggcaaaacggactggactactatgtcgtgacggatcataattactggcatgagacatggcctctttccggctgcatggtgatcccgggaatggagatcacgatggatgccggacatatgaatgtattcggacatggtccgtttcttctgagtctgaatcatccatttctctccagatggagctggaagctgccggatctcgtactggccgcgcttgactgcctggaaattgataacaatccgacctttgagtacgagccgggaatttatgcaaaagaagccaatcggcgtgccgtgcagctctcggacttattgtgggcagatggttatcggatctgtgccgtcggcgggagcgatgtacatctgaaggagacggagcgctacggagacagcccggagcctgccagaccgggagaaccatcgacgtatctgtatatggagggactgtctgcagccggttttcgcgatgccttaaagtcctgccatgcgtatgtggccagacactgctcactggacttttcctgtatgctctacgatgcggagcatcagaagctggaaggtgggtggctgtttggagaccagcttccaaaagagtgccgctatctggaatacgatttatacactgatcgcaaatccgccggggagagagagcttcaaccgtgtattccttatgtgatcatcaacggcaaaaagcaattgcttcagaaagaaagtgctgagcatgctcagtctgaaatccgttatcacggagtgctcatgctgccggatgctccctatgtctggattcgttttggtgcggaggacgaggatggaggacttgtgttttatgcaaatccgtttacgcaaggaggcagggaacagcatcaatatcagacctttggggatgtgctaccgtcactgtccctgtaaatgtcttatcccccaatatactctgtgatgacagacgtaagtgcaggaagtatctgctgctttctggagagcaggttttcctgaaaggagtgctctttgtcatctgcatttggaaatgcttctgccgcccatggtgcacggctgccgcctgcatagatcacagaaccgttttcgagaatgctggtaaagacaagcaccgccagatcaattcgctttttctgcgcaaagcgatccagtgcagcggaaatttctctggaatcccggcaggtatcccgtgcagaagagacgatcacctgagagatcgagagtttacacgaatgaatgtcgtaaatcttcagatcctgattgatcatatcggaaaagctgaccttgtcctggtttgaggtgatcgtaaacatctcctccgcaaactgttcgatatcaaggtctgcgatcgcggcgagaatatttgcagtgctgatatcccggtccgtcgttgtcggagagtggaaattcattgtgtctgagagcaccgcacctaagagcagaccggccagattcgtcgggatcggaatctgattttcacggaagatcgtcgctacaatcgtagcggtggagcctacgatctcattgcggaaagccaccggctgcgaagtagaaaaatcgttgatccgatgatggtcgatgacctccagcacctccgatttttcgatggcattgacagattgggagaattcattatggtcgacgaggatcagcttgcgcttcggtgcatccataatatggtagcgggaaatgtagccgacaagctgctcatttgcatcaagcaccgggtaggtgcgataccggttccgcagcattttgacaccgacgtcttccgtcagctcattcgtatgaaaacaaaccggattttttttcatgatccgttctaccgacg

SEQ ID NO: 3830 - DNA, 1578 bp, Unknown
  16S sequences of unknown bacteria
cccgccgagaccgagcacccactcatagacgagacccgcgatatagatcgggtagcagggcggggtgttgtacatcgagtcgttgtcagccatcagcttccagtcgagcatggatggcgtatcctggcgggcgtttccgagaagatcctcgcggacgatgacgacggtcagtccggcgggagccatgttcttctgcgcgccggcgtagatgacgccgaacttagtcacgtcgatcggctcggacatgatgcaggaggacatatcagcgacgagcggtatgtcgccggtgtccggaatgtacgggaacttcgttccgtagatcgtgttgttgaagcagatatgtacgtagtccgcgtcgggtctgaaggactcgcgggtggtctccggcacgaacgagaagttcgcgtctttcgaggatgcggccgccttcgcgtcgccgtacttgagagcttccttgtatgccttggtcgagaactgaccggagaggatatagtccgccttgccggtcttcatgaggttcagcggaacggccgcgaactgggtcgaggcgccgccctgaagaaagagcaccttataattgtccggaatattcatgacctttcggaaatcagcctctgccttcttgatgatcgcgtcgtacgcgggggagcggtggctcatctccataacggacataccggtgccgtgataatccaccatctcggcggcggctctctcaagaacgggcagcggaagcatcgagggtcccgcggagaaattgtatactctttccatgatataataacctccagaaaaatcaacttgaagttgacaataattttttattcggtactgattattatacgccggtttgcgggagttgtcaatagggttttataatttttgtgatttccggcaattattttcttgtatagttataaaattctctgctttccacatagtgtttttccacccatgcgataaaatggtattcatagctgtcgtgatttgtgagataataatagcggatatcaactgaaaggagatatttctatgtctgataaaatgataggtgtgacgaaggcggcgattgccggggcgtttttcgggagcgcggtcggtatggtcgcggtgccgaagacgaggaaggggaagagacacacgctgataagtgacgtcaccggaactctcggaataatcggaacggcgatgaaggatgtttctgagtatctgaagaaataacgccggaaaagaaaaccgcgtcgatattccggcgcggtttttatcgggtttattttttcagtgtctggtagtatacacagatgttttcgtagtgcccgtctttcattctgaagccttcggggattatgccgaggagggtgaagccgaggcgttcgtagaggtggcgggcgtgggtgttggattctactaccgcgttgaactgcaattgtaccatacttttggagtttacacaatatattttacatgatcttcgcagaccctggtatcgcgtttttcgataccggagctgcccctttatgacagcaaatacgtgctctacttttgccctgacagatgatttttgatgctccgccttct

SEQ ID NO: 3831 - DNA, 14501 bp, Unknown
  16S sequences of unknown bacteria
actggtcagagaagcaaaaagctttttaagctccggactgatatcagcctttgcgagcagcttctccactccgaatgtatttttattcttgatcaatgtcttcagctccagagcggtctgctcatccagccccgcttcttttacaagcgcccggaaaaacccgacatgtccgaggctgatctgaaattctgaaagcccgcaggactgcagcatttcaccgaccagtgcgatgatctcagcatctgcatctgcgctgtcatctccgatcagttctccgccgatctgagtcgtctccttcaggcgtccctggtagcttgagctgttgatataggtattgcccagataggtcagtcgcaccgcagcagggctgttccgaaaatacttcgatgccgcacgcgcgatcgacggcgtaaaatccggtcggagtacaagcgtattgccatcgcggtcaaaaaacttgtatagctctctggatggcgtcgtaccgatctccttgctgaatacatcaaagtactcaaaggtcggcgtctcgatatcctgatagccatatgatcggatcatagcatgcagcttttcctgcagcacaagcttctgctcgcattctttgctgtaaatgtcacgcacgccctccggtgtatgtaaaattttctgcatctgtgaatcccctttcactttatcgtagtacagtgataattctctactacgcgaaatagttcactaaattatatgaaaaaaagaaacaattgtcaatccctaagcgaaagatcccgctgcaatccgtctaaatatgggaccagcagaccgttttttggctccagataataatgctgatccagctccacatagcggaagctctttcttccgccctccttcgcccggttccagaagcgcatcatatcccgataaggcagataaaacagttcgttgcgcatactgaaaaacagcacgagaaatgccactccgccctgcttttcaaaatctgtcataaactgtacctgatgcgcatgaatgttctgcagggcaaacgtatcggacgtgcattctttcgcatcaaagcagaccggcactccctgcacagccccaatataatcgaccgtacttttctgttcaaaataggccaatgtaatatggcgatgctctttgtcgatcttaagaggagtgatcggcgtcggaatcttctggatcagggcaagtcccttttccagataaatctcattcgtgcggttgagcagctcctctaaggtcgatccccgcaagcccctcgtattccatgtcgccatagccgtcatccgtcctttctgcgtgtcagaagccgctgctgttctgccgcaatcatgcccggaaaaagctggtcaaacagctttggcggctgtgcgaaaaaggtctgtccgctgtacgctgccgtcccgtccggaaactccagccgccaggcatgcaatagctgaccgcgcagccccggctgcgttttattataggaagcggaaccatattttggatctccgagaatcggatgcccgattgaggccagatgagcacggatctgatggctgcgtcccgtcacaagcagtacctccagtaaggtctgtcctttctggctcgcaacagcccggtatactgtctcgatcggctgcgcatcctgggactttgcagctttctctggcagctggttcagaatagtcacgcggttcgatgcacggtccttcacaagatagcccttcagatgctttgtaccgcgcatcgtcccattgacaatgcagcaataatatttgtgcagggatcggtcacgcagcaattcgctcatctgctgcagacccggcagactctttcctgcaatcaatattccgcttgtattccggtccagacgattgcagaccgacgggtgaaagcgctgaagctcctccccggtaagctgcccgctctccagtaagtaggagatgagatattccaccgctgaaacatcctgcggctgtgctttctgtgaaagcattccgaccggcttattcagcaataaaatatcagcatcctcatagatgatatccagcttctgcctttgctgattcggcagcattcggggcgatggactgtgtgcctgtgctttcgcggcactctcctccccctgaaatttttgtatcgtttcttcggccagaaacagccggagcacatcgccttcggatagctgctcgtttccctgtatcttttttccgttcagcgtgatattcttcttccgcatcattttgtaaagaaagcttttcggggcttccttcagatatttgacaagcagtttgtctgcgcgctgaccggcctcgtttctggtgataataaattctttcatagcttttccttataaaattggcaatacagtctttgccaaataaatttggcaatgcctgcctttgcaggttgctgctgcacagaactgttagaggcatatcgctagcagggtctggtagattccttcctcatatgtccatgtcggatggttcggatccatttcggtgccgcgcagctgctcctgcttccggttcagatctgcgacgcgctgcaggtaggtcttttcatcctttagtacttttacctgcgcatcagaaaatccattcgcggccagcagcctggaaatatgtttttcaaggctggccggatccatcttgtcatccatcgtatggcagacgacatgcgcgccacagatgaccagtgccgtgaccagcgtcgtgtgctcataagctgtaaagatcatctcatagcctgccaacagacttcctgccgctttctgttcccgttcatactgctcctgtccgaccggcttttgcataaaaatcataatcaggcctaccatcgaccggctcgccggaagacagcctaaaattgcaacaaatgtaaacaaattcaaccgtgtttttgtctgaatatagccggttacatagatgacaagcggaatcgcaaacatcatcagtgtcacaagcagacgcttcttccgctcataccggatatagccgtaattgcccttttttacttttttcatcctgatctcctttgtagatgctattttttcttatgcacattccggatcgttttcttttttccggaagtcgggcgatttccctgtccggaatgtgtttcgcccctgcgatgatccgctcctgcaatgcgccctccgttatggctgcttcgtccgcttgcggcctttttatagctgccggaaggcttctgggtgcccgtccatcccctgccattcccggcaaactgccgtggccggatcagacattccgggccaaatccgatcagatccgtacgtcctgcaatgcggagcgcttcctgtaccagctcgtaattttcaggacgccggtactggatcaatgccctctgaagcgccttgcgatgcggatttttctccacatagaccggctgcatcgtccgcggatccagtccggtatagtacatacaggtcgataccgttgccggagtcggataaaagtcctgcacctgctccggcatatagccaagatcacgtaaaaaacaggccagctccactgcatcctccatggtacatcccggatgcgacgacatgagatacggcaccagaaactggttttgcccacaggcttcattcatcttcttgtaacgttccgaaaatttcatatacacggcatgctccggtttccccatcatcgccagcacccgattcgagacatgctccggtgcgaccttcagctgtccgctcacatggtactttactagctcacgaaaaaaaacatctgacggatcggccagcagataatcaaaccggatgccggaacggatgaataccttcttcacttttggcagcttcctcaggctgcgcagcagttccacataatccctgtggtctgcgttcagattcggacacggcttcggaaacaggcactgccggttctggcaaacccctttcgtcagctgtttttcacaggacggatgacggaaattggccgtcggtccgccgacatcatgaatatagcctttaaactccggatcctcagtcatctgcctggcctccgccaggatggatgcatgacttctcgtctggacaatccggccctggtgcattgtcagcgcgcagaaattgcagccgccaaagcagccacggttactcacaagactgaattttacctctgagattgccggaatgcctcctgccgcatcatacatcggatgccatgtcctgcaatacggaagtgcatagacgtcatccatttcctgctgggtcagtggctttgcaggcggattctgcacaacatacaccgttccgtacggttccgccagcctttttccggaaaacggatccgtattgcggtattgcaccgcaaagctctccgcgtagatctgcttctcgcttcgcacctgctcataatccggaagaaagactgcgtcataaatctcctccggacgctttgtcttatagcatgtcccgttgacaaaggtgatatccttcactgcgatccccgcctgcagagcgtctgcaatctctacgatcgaatgctcgcccatgccgtaagaaatcagatctgctccgcagtccatgagcacagaacgtttgaccgaatccgaccagtaatcatagtgtgacagtctgcgcagactcgcctcaataccaccggcaatgatcggcacatccttataagcctgccggatcagattgcagtaaacgacgaccgcatagtccggacgacgtcccatctctccgcccggcgtataagaatctttctgccggtgctttttggatacggaataatgatttaccatcgaatccatattgccgccgctcacaaggaacccgagtctcggacgcccaagcgccatcacactctcttttgtcttccagtccggctgcggtatcataccgacggtataccctcttgactccagaagccgaccgataatcgcatgtccgaatgaaggatgatccacataggcatctccagtcacatacacaaaatccagctgctctattttccgttctttcatatcttcttttgataccggaagaaaacggttcttcatctcatatctcctcatctgtcacctctgcggcgtcccagttcccagaatgccactgcactggctgacgccacattcagagaatccacgccatgggacatcgggatccgcacagtataatcacaatccgcgattgtcccatctgccagtccgtcaccttcagtcccgagtacgattgcaagcttctcctcttttgcaagatccggatcatcaattcccaccgagtcctctttcagcgccatcgcggctgtacaaaatccatgttcatgcaatatctccattccgcgccccggccatgctccgtgctcaaaaaaagcccacggaatctgaaaaaccgtccccatgctcacgcggatcgcccgacggtaaagtgggttgctgcatcctgtgctcagaagcaccgcatccatagacagggctgccgcagaacggaagatcgcccctacattcgtcggattcacaatattttcgagcacggcaatccggcgtgcactccggcagagctcttccgggcttttcggaacggggcgccgcattgcgcagagcatcccccgcgtcatcggaaaaccggtcaatttggaaatcactgcatgatccgctgcatataccggcgtctgcggacagcgccgtaaaatatctgctccctcaccctgaagctgccccatctccgcaagaatggataccggcaggcatccggcatccagcgcacgcgcaatgaccttcggactctctgcgataaaaatccccttcaacggatccgcacgatttaaaagctgcacttccgtgcagcgcgcataaatatccagctcctttgctgaaaagtcggtaatttcaactacgttcgccatgatgcttcagctcctcatacctgtgctccggaatctcatcataagactggatatagtaatccgcaagggcgcggatcttctctgtctgatcaagacagtactcatcacgcactgcgcacacctgcatccccgcattttttccggacagaatccccatcgggacatcttcaaacacaaggcaattctccggctccacatcaagcctccttgcaacctccagataaacatccggtgcaggctttccttttgcaacatcacacgctgtcacaatgcagtcaaagcagtcttctacgccattggatgtgagacaggcctgaatcagttcccggctgttgctgctcgcaatgccgattctacgcccctgtgcacgcagcatccgcaaaaaggcggctgcaccggtcttcagccggacctcatgtgcatacttctctcctgccataacaagccagtcttcttttatcttctcaaccggatccggaagttcaaaccgtttcttaaaatattctgccgtctctgtaaagcccatcccttcaataatgacatccagcccttccggcggacacaggccataacgtcccagatattctatatcaatatccttccacatccacatggaatccatcagggttccatccaagtcaaaaattaccgcatgtattccttctaacataatttttgcaatctctccatttcttcgtttgtcagctcgcgccattgtccgggcgcgagtgtctcatccaacgtaatccctgccatctttacccgtttcagatacacgaccttcttgccgcgtgcctcaaacatccgctttacctgatgaaattttccctcacagattgtaagataaatttctgagattaccgcatgctccgccggcgactcctgatctgaatccgtctccgaaaatggctgctccacttccttcacgctttggatttccagcttcgccggaagcgtttgcgccttttctccgatgtcgatccccttcgcaaaggcttccacatcctgtgcatcaacggttccaagcacctttgcataataggtcttgtccacatggtgccgcggcgaaagcatccgatgggccagtgcaccgtcattcatcaaaagaagcaatccttctgtatcaatatccaggcgtcctaccggaaagagctctttccggcgcggatgatcaatcccgcccatcaccgtcttctggcgcctgtcctccgtcgctgtgacaacccctgccggcttattcagcatcagcgccacaaacggctgccagcaaaccggctttcctgcaagcacaacgcaatcctgctgcggatcgatctgacgttccggatgcgtttccactgccccatttaccagtaccattcctttttttaactgctttttcacctcactgcgcgtgcttcccgcacaggtggcaagaaatttgtccagtcgcatgtctctcatcctctcactgcatccgccatccgggataatatttgtttttcagcactccacccgcatatttggcccatccaagcgccatgccgtccacgcagatcagtacccagccctttttcagcggctcgtcctctgtatgctcgatcgtctcccctttcagatagcgcaagatacgcggatcatctgccaaaagatcaagcgtatccggataggaatgcgcagaaagcgccattgcaagcgcctgagacggctcgaaccgttcctttttgcaagtgccgagcagcagtcccgtgcgcaaataccgcagaccgtccggcaaatccacgccttctggaagaagcagacactgatcgtcgacctgccggaaggcgcgtcccttccagagctgctctgggagcttctgcagaaagtcccgcacctcctgcggcagcttttcattcctgactgtgtgcatctttttggaagctgcagccggtgccttccccgtcttgtgcagcagcgcaagaaaatgtccctctccttctgcatgatgcggccatacacgaagtgccttttcacacggcggatacccggcagaaagcccgtctgccccttccgcctgtacaagctccagatccggatggcgcatcaatgcatctgcgatgacgtcctcatcctcttcttttgcaaatgtacaggtcgaatacagcagcatgccgccgggtcttagcatcgccagtgcacagtccaggatttgcttttgcaggaccgcatactctttcggtccacgttccagccagccggaaatcagtccgctgtccttccgaaacatgccctctccggagcatggtgcgtctaccagaattttatcaaaaaagcacccaaaccgtgccagcagcttctccggagtctctgcagtcacacaaaaatttgtgcagccccacatggtcagatttttcaaaagtgcttttgcacggcttgcgctcacatcatttgccacaagaagcccacgcccttccagacgggaagccagctccgtagcctttccccccggagctgcacacagatccagtacccgatcccccggctgtaccggaagtctggatgccggaagcatcgcactcggctcctgtatgtaatacagacctgcataataatacggatgctttgtggcctgctccgtcttttcgatataaaatcctttcccggtccacgggatcggcctaagtgcaaatggcaccagtgtctgaaatttctccacggtgagctttccggtattcacccgcaacccggcatagctttccttttcatagcttgccagaaacgcctcatactcgtcacccagctgttctttcatccgatccagaaactgttccggtaattttgccatctttttggcctccctgtatttattctgctcttctgtttcatttcctgacgaatcatttcattctaacatacctgcgcacaagatgcaattgagcattttacctacggtatgacatctggctattccagaaatcggagtatccagtatggattgaccgagagctcttctgtatgttccgtccggatataaatacccaagtgcagatgtaccgcaaatttcccgcttgtgccttcctcaccgtagccggtatcgcccatcattccgagtgtttccccagcggtaacacgctcacctaccgaaaaagcacggctgtaggaagacagatgggcataataaaaatagccaccggaagggctgcggatcccgatgcgccagccgccaagcggaagccagcccacctgctccacgactccgtccgtcatgctcacgacctcatagtagtcggaaatatccgtcggcggcataaggtcacagccttcatgcccgcgcgctccgccataagtgcgctcaaacatccacgagttctcatatcgcacccctgcatcacataccggcacgcagcccagatcatcccatatcgctgcataggcatcccgcagcttctcatatcccggacggttttcacagagcagatactccttccacgtccggtattcccctgccgaaagccctttccggttccggaacgaataaccgtcaaacggataagcggccgcgagcagctctcctcttgagagtccgctttcctctgtcagtttcttcagacatgcaagcacttccgcattcagacacatttcccgaaactgtgtacgctcaggcatcgcttccgataatgaccgtgcaagcgtctgtgccatcaaagtgtccttcagactgccgcacagcagcggaagcagtatcatcagacagacagataatacagaactttttctcatattggtaatctatgcaaatgtaaaattattcagaaccgctgccttaatcggaagtctatcctgccttcccggcacataaaataggataacccttcccttatatccggaggcgccatgcggtcaaaaaaattccttctgattcttctctttgcctgtgcgtttctctatctgctctgcaggccgcaggccgcgccagcttccgtgcgcagcggactgcttttgtggtatcgctcagtcgtcccgaccctgcttccattcatgctgctcaccggccttcttcttcgcctgcgtctgcttgagccgctgcttccgtttctgcagcgatgccttgcaccgatctttggctgctccggttatggagttttcgcaattctctgcggcttcacggccggctttccaatgggggcaaagctcactcgcacacttttggatcagaaaaaaatatcacataaagaagcctgccatctcatcggctttgtcaataatccgagtccggcctttttgctttcctacgtcgccgctgaccagtggcaacacccggagcttggcatcctgctcatcggaaacgtgttcggctctgcgttgctctacggaattctttcctcttttcgctttcgttccgttcgcacagatactctttcccggtccggctctgtccgtgccacagctatccacgagtcgccgcaggactgctttgccctcatagacagctgtatcgaagatgctgtatccgccaccgtacggatcggtgtttacctcatagtcttttccatgctggtggatgccgcagcttctgttccactcgcatctactcccgtcggtttggttctgttcgcggctctggagcttacaaacggcattcacctgattgcgcattctgctctttcttttccggtccagctcgcgctcatcccggcgctcgcggcctttagcggatgctccgtcatcgcccagtccatcggaatcgcctccatggaccatgatatgcttcgctcctatctaaaaagcagacccggagtcgtgatgatctcctgcctgctctcttttctcatcctgctgaccggtaattataagtaaagcgcagccaatactgactgcgctcacgctttctggtctgaattctactcttcggatgctgtctcagccggagcctcatcttccggcacctgcgtgtagctggacggtgccgcctgcggagaaagctccatacggttcttatttacaatatcgtagcaggactgaatggaattaatgaaattgctgtatttcgtaccggctgcatcaatcgtatggctcataatcttttccagattctccagcatctcatcagtgtaacgaatcgcgctcatacggatctcgttggaatcctgcgtcgccttatcaatgatgtcctgcgcctgtgcgttcgtctcatcgatcagctgctgggactgctgcatcgctgcctgcatgacttcgctctcactgacaatcttctgtgcctgcgtgttcgcgtctgcaataatcgcgtctgcctttgtctgtgcatcctcaaggatcgcatccttattgctgatgatcttctgatagcgcttgatctcgtccggagtcttcatacgaagctcgcggagcatctcttccagttcttccttatttacaacgatttttgtagatgacagcggctggaacttgcagctgtcgacatactcttcgatctcttcaataatctgttcaattctgctgctcataatatctctccttatatgttatttatacatttccctctttgtcctttaaggacgcaatcttgtcatatacctgatcagcaatcaacggtggtacaaacccggaaatatctcccccatatgacgccacctctttcacgatcgtagaactgatatacgcataattcagctctgtcgcaaaaaacagggtatcaatctccggctgaaggcttcggttcgtctgtgccatctgaagctcatactcaaagtctgtaaccgcacgcagcccccgcaccagtgccttggcgccacgttgtcttgcaaactctactgataatccgcagaaggattcaacacggacatttggaatatgtctggttacatcctctaacatcttaacacgttcttccacagaaaacaacggtgtttttgcattattcttcagtaccgctacgatcagctcatctaccagtgccgccgaacgttcgattacatcaagatgtccttttgtcaccgggtcaaagctgcccggatataccgctctcgtcatttatgtcccatccggtttccatgccggagttatcctttccagagtcttgcagttggcatactctaacatttctatattttcagtttcacccgtaaaggcctgactaatcgcctgccagctgcagaaatacatgcatgtttgtcttatattctttcacacgtgtgatctcaaagccaagctcctccgcataggaaaaatcagtatccagacatgcctccacaatcagtacggtatcctcattgacaaaagaaggacgatggctgctgatataagtcagtacctcctgctccagcccttttccatatggaggatccatgaaaatgatctgaaacggccgctggccctccagacgcgccagcgctgccagcacatcaaacggaagtacggtagcctgctgctccagatgcgtgaatttaagattgtcctgaatgcagcgtactgctgcgcgattgttctctacaaaaacagcctccttcgcaccacggctgagcgcctcgatgccaatcccgccacttccactgaaaatgtccagaaaacggatgtcatacaaatcattctgtaaaatattaaaaagggtctccttgatccggtccgtagtcggacgggtatccagcccttcgattgtcttaagcggaagcctccgcgcttttcccgcaattactctcatgctgttacttcctttttcttttctgatcagacccataccagatccgatttggatttattatatcgtctgatgattccaccgtcaacttaaatttgttcgaatttttggttgtatcattatgaccttatattctacaaacatttgaacgcagataagcattcccccgcttcaagtgcgcggagcactaagcggcgggtgagggggatgcttatgtcagtgggagttgaaagctcccactgacagatcgcgaagcgactgtgttcatgagcaagtagcgaagcggattgcgaatgtccgctttacgtccgccgattccctacgcaaatcgccaccttctcatatttggcatatttgaattttgtacaattttgtgatagcttttccacagattctgccgtataataaattgattatgcccaccatcggcattatgaacaacgaaaggataagaccatgaaaacaggatttgataaccagaaatatctttctatgcagtcagaaaaaatccgcgaacggatcgccagcttcgataataagctgtatctggagttcggcggaaagctctttgatgactaccacgcatcccgcgtgcttccgggcttcgagccgtccagcaagctgcagatgctgctgcagctcgccgaccaggccgaggtgatcatcgtcatcaactccgaggatatcgaaaaaaataagatccgcgccgatcttggtatcacctacgatctggatgttctccgcctgatcgatgtataccgcagcaaaggactctatgtcggcagtgtcgtgctgacccgctacgaggagcagaccagtgcaaaggcattccgtcagcgtctggaagctcagggcattccggtctactgtcattaccgcatcgagggctatccgaaaaatatcccgctgatcgtcagtgacgagggctacggtaaaaatgattacattgaaacgacccgcccgctcgtcgttgtcaccgctccaggacctggaagtggaaaaatggcgacctgcctttctcagctctaccatgagcacaagcgtggcgtgcgcgccggttatgcaaagttcgagacattcccgatctggaatcttccgctcgaccatccggtcaacctcgcttacgaagcagctactgctgatctgaatgacgtaaacatgatcgattccttccacctgagtgcttacggtgtagaaacggtcaactacaatcgcgacattgagattttcccggtactgcgtgaaatgttccgccagatttacggagagagcccgtaccagtcccctacggatatgggtgtcaatatggccggctactgtatcgtagacgatgaggtgtgccgtgaggcctcccgtcaggagattatccgccgttattacgagtcactgatccgtcgtgcagatcagaatgccagcgcggatgagctgttcaagatcgaatttctcatgcagcagctcggtatcactccccgctccagacgctgtgctgcagctgcctgtgatgctgccgctgcccgtggtgtctcctgcgccgcgatcgagctctccgacgacggctccatcgtaattggcaagacatctgacctgcttggcccgtgcgcagccgttattctgaatgcgttaaaagagctggccggcatcgaccatgagcttccgctcatctccccgtccgcacttgagccgattcaaaagctcaagaccatgtattttggcagccgcaatccgcgtcttcacaccgatgagacgctgatcgcactttccatcagtgcatccacgaatccagccgcgcagaaagctctcgatgcaatgccgaagctgcgtgactgtcagctgcactgctctaaccgcctgtccaaggtcgatctcgtcacacttcgcaagctcgggcttcaggtgacgatggaaccggtgcacgagcgctgatcagcaatttcgtttgacaaaaatcagtaccaccggctatg

SEQ ID NO: 3832 - DNA, 4070 bp, Unknown
  16S sequences of unknown bacteria
tggttctacaccgctgttgagtatctctacaacgaaggaatcatgaacggaacaagcgaaacagagttctctcccgaatacgaactcaacagagctacagtagtaacaatactttacagactcgaaggcgaacccgaagttgaaacagcaggcacattctccgacgtagaagaaggcgaatggtacacagcagctgttgaatgggcagcatccgtaggcatagtaaagggttacgaagacggcacattcgcacctaagaaggctgttacaagagagcagctcgcagctatcatttacagatatgctgaattcaagggcatcaccatcgctgaaacaaccgcagagctcggcgaagaagcagtagtttccgactgggcaaaggcaaacgttgaatgggcagtttccgaaggactcctcgttgagggcgaaaacgtaaacgctacagaaaacgcaaaccgcgcagaagttgcagctatgatctacaccttccttacaaaaaccgtcggctgatattgttcggcttgaaccgtacgagataaacagccgacccgagaattcctctgaagagtaattctccaaggtttagtttaagtaaatatagaaagaaccgatacagagtaaataccctgaaccggttctttttttatttcagcccaaaatcaataattatatcctatgctgagcgcctttttgttcttctcaatcagcgcagattttgtctcgggaatgcttgacacaagataatgctcgaagtcctcgtaggtgaaaattcccgtttccttgaggatgtttccgagaattattacgttcgcgaagcctttgaggtcgttttcctcggcaagctccgtcgcgggaatgtagactgccttgatgtcgcttctttcggatttcttgtcgataagcgtggaatcgcagaaaatcgttcctccgggagcggtcttcggctcgaatttgtcaaaggaaggcttgttcatcacaacgagaatgtcgggggaagatacgctgggagagcctatttcctcgtccgcgataacaacggtgcagttcgatgttccgccgcgcatttcgggaccgtaggagggaaggaacgtcacgtttttgtccatgtacattcctgttttagccatctgcttgccggagaactgaattccctgaccgccgcttcctgcaaaaattatacgagttgtcatttgcctgcctcctgtgtttcttcgggatcgcgtatagccgcggaatccttgtaaatgccgagcggatagtacggaatcatgttgtctctgagccactggagagcgtcgcgcggagtcataccccagtttgtagggcaggtggagagaacttcaacaatggaaaatccctttccgtcaagttgattctggaacgctttctttatcatagcctttgcgttcattacgttcttcgggcagtcaaccgaaactcttgccgcgagagccacaccgtcgagagtggacagcatctcacatactcttaccggacttccctgaatgttgcgctttcttccgtagggcgtggtggttgtcacttgaccggggagagtagtcggagccatctgaccgcctgtcatgccgtagatacagttgtttatgaagattatggtaatgttttcgccgcgtgtggcagagtgaacggtttcggctgtgcctatcgctgcaaggtcgccgtctccttgatatgtgaacactacgcattcgggatgagttctttttacgcctgtagcaactgcgggagcgcgtccgtgagcagcctctatcatatcgcagttaaaataattatatgcaaataccgcacagcctacaggagcaattccgacggtttttccttcaactccaagctcgtcaatgacctctgcgacaagtctgtgaactatgccgtgagtacatccggggcagtagtggagcggtacatccgtaagagcggcgggtctgtcaaatacagttttcatcatgatatataaataatcctttcagcctgtcaggaagactctgattaaaaacgattaattcagaatatcctaaaaattcattaaatgacttcggagagctttttgatttctgcgtaaacttcgtcaacggaggggataattccgcccgttctgccgaagaagtgtacgggacgctttccgtttaccgcaagtcttacatcgtctaccatctgacccatcgacatttcaacggacaggaacacttttgcggtatctgcaagctcgttcagctcctttttcgggaacggccagagggtgataggtctgagaagtcccgccttaatgccgctctttcttgcttccgctattgcgctctttgcgatacgggaggtaattccaaacgcggtgataatgatatctgcgtcgtccgtcatgtacttttcgcatcttacctcggtttcttcaaccttgtcgtatctcttgtagcgcgcgataacggagtcttcaagctctttcggatctatgtaaagcgaatttatgatgtttttctttctcttgaagccgtgaccgttcgtcgcccatgtcttttcgggaagctctctcttctcaaacgcaccgaaatctaccggctccatcatctgaccgagagcaccgtcggcaagaagcatagcgggcatacggtatgtgtcggcaagatcgaacgcgagggaagtaagagacgccatttcctgaactgacgagggagcgacaacgataagtctgaggtctccgtgaccgactccgcgtgttgcctgatagtagtcggactgagacggctgaattcctccgagacccggacctccgcgctgtacgtttacgacaagacaggggagatcacttccggcgatataggaaatgccttcgctcttaagtgaaattccgggggaggaagaggacgtcatagctctcgaacctgcggacgctgcaccgaggagcatgtttacagccgcgatttcactctccgcctgaagacaaagaccgccgaccttgggcattctttttgcgagatattccgaaatctctgtctgaggggttatcggataaccgaagtaatacaggcatcccgacgctatagccgcttccgctattgcttcgttgcctttcataagtaccttttttgccatatttaaaaaatcctttccgtcgctcagacttctttttcgactttgattacacagtccggacacatcgtagcacacatagcgcaggcaatgcattttgacatatccgtgcagtaaacggggtgatacccctttgcgttgagctttgagaggtccagcgcaagtatctttttcgggcaaacgtcggtacatagcccgcagcttttgcaccgctccgtgttgaatgtgagtttattcatcatgttctccttaaaacagtttttttgttatatcatgtatcggcataagcggctcgttcccgtctgttgatatctctcccgtgtattccagggcatatgtgtgagccgcaaggggaagagctgcaagagaggcgcattcgcgtgcgtattccatgctgtcaagcaccgccgccgcgtcagtttccgcaccgagggatgagttatttatgatttttgtcacacgcagtccggatacctcttctatctcccgcatacactcaattgcgtcggagggagaggcgataagagggcggtacatattcaccacaaagtacacgtcgtgcggaacattttttatcatgccgcgatacataccgagcgcaaccgctccttcatccccgcccacgtcaataaacgaatacccgtctccgtcaaaaagagtagtcatcttcggcgggagagcgggaatgtcgacgttggtgttggcaaattcgggaactaaaacctctataccgtgttcggctaagagagcggcggagtctgcggtgcgaaaatacgggtttactatgtcaaggtcggctatctttacccgtgtctcgggatgttcctttttcgcgagcagggcaagattcacggcgacatttgtctttccgcttccgtaatgaccgacgataatattcagctgattgtattcgtgcatgacaccaccgtatattgaatagttttaaatatattatagcatatatagca

SEQ ID NO: 3833 - DNA, 16550 bp, Unknown
  16S sequences of unknown bacteria
ccgcgagcacgtcgccgctgccgcccttggcgagggcgggagaacccgcgctgctgaccgccgcgcggctttgatcgcttatcagcgtcgcgttgcttttgagcatgagcgtcacgccgtatctttttgcgaacgcgcgggcgagcgccgcgccgttttcgcaaacctcctgcaccgtcgtttggcacagcctggaaaattccttgacgtgcggcgtcagaatgaccgtgcagcgcttgttttcgagcgcgttcacgccgaactccgccagcgaattgagcgcgtccgcgtcgagtacgagcgtacccgtaaaatgttcgagaagatagcggacgatgcgataaatttcccgatccttgcagcagcccataccgacggcgatgctgtccgactgcgcggcgatttccgaaagcgccgcctcatcataggcgagcacgccgtttgcggaaggcattttttgcagaatggcttcgggatattttccgatgagcggggaaaagatacagtcgggcacgcacaggcgcacatagcccgcccccgctttgaacgcgctcatgcccaaaaggggcgcgcccgaatagcgctcgctgccgcctaaaatcgcaacgcggccgtaatcgcccttattcgaacggctcttccgtttgggaaaaagcgcgcaaagatccttcggggcgtacatccgcatataatctttttcgggcagaacgatgccgatatcgcacacgcgcaattcgccgcagagatcgggcccgtcattgaataggtgccccgccttgaactcgccgatgaccgccgtcatatcggcgcgcaccgcctcgcccgcacataagccgttgtcgccggcaagcccgctcggaatatccgccgccagcacgaacgcgccgctttcgttgatctctttgacgatctgcgccgcccgttcgttcagcgttccgtgaaaacccgttccgtacagacagtctatgacaagcccgtaaccttttttcagagtattgatccgcggcgtcctgcatcgcgcattttccagttgacattccaccgttttggggggaaacgcctcgaacacgacgacggagaacccttttttcgccaaaatacgcgcggcgcaatacccgtcgccgccgttgttcccgctgccgcagactactgcgacgctcttttcggaaagataagaaagcgccttttcggcaagtttggcgaccgcctttcccgcgcgctccatcagcgtgcgggaagatacgccgctttccatggtaaactcgtccgctgcgcgcatttccgcgttcgtcagcacgtatctcatcgctattcctcctccgtttccgcgccgaggcgttcgagcgcggccctcgcgtcgtcgtaatcgaaccccttgcccatcaggtatttaaaacctctggacagattttcccgcgaaaattcgcggtttttcatgtacttggaaaggactgcgaacgcggaatccgcgcccccttccagcgaggcgagcgcctcctcgacgcactccgctttcgcgccccgctttttcagttccgcttccagaagcctgcgccccttggtcttggaggcggaggcgagataggcgcggcagtattcggcgtcgtccacatatccgtagccttccagccgttcgcgcacgtattcgcacacggcgggcacgtaacccttctttttaagatagtccgtcacctgccgccccgtcttcatgctcgcggacaaaaaattgagcgcgcggtccattgcctcggacttttcgttttccaactggatctcgtctaaaaacgctttttccacgtgctgcccgactttcaggcggctcctgactgccgtttccagtttcatgccgcagtaaaaactgccgtccacgtagatattgcagcggtttttatccttgacctgcggcgaaatttcggtgatttcggacatagtttctcctcaatagaaataccgcaccgaagatcggtgcgataataaaatttattccgctgtcagaaacagcattttttctttgagcgatgcggggtactgttttgcaaggctctcccccacgcgctttaaatacgcatcgttcgcgtgatgaaacacgaaccgcatgggctcgctctcggtatcgaaagaaaaatcgtaggcgacttcggcatcgatgcagcaccgtttcagcccgtccttgatacaggagcggacgaaaatataatcgtcggtgtcctcgtcgtccttcacgatgacgtccagataaaaatcgctgcgcgtctgaaattcgttccagaacttggcgatcgtcttttcattcggttttttctcgaataattttgcgaagatcaaagttttaccacccagttatgcgtatcggcaagccgtcccgtctgaatgcccgttatggtgtcgtacagccatttggtgatcttgcccatctcgttattattcacgacgtaatctctgcccttgtattccatcatgcccacgggcgagatgaccgccgcggtgcccgtgccgaacgcctcgtccagttttcccgcagcctgcgcctcaatgacttcgtcaatggaaattttgcgctcgctcactttatagccgttggctttcaacaactcgatgcaactctttctcgtaatgccggggagaatggagccggtcagcatgggagtgatcacttctccgtcgatgacgaagaacatattcatggagccgacttcctccacgtattttttctcgttggcgtccagccacagcacctggtcgaagccctttttcgcagcctcttcgcccgccctcaaagaaacggcgtagttggcgatacacttcgcctcgcccgtaccgcccacggtcgcacgggtgtagaaatcctccaccaaaaggcgcgtgggcgccagtccgtgcgcgtagtaactgcctacgggcgacaggatgataaagaacaggtattcggtgcccgcgtgcacgccgagcgccacgttggtcgcaacgatgctgggacggatatagagcgccgtgccgggcgaggtgggtatccagtccttttcgatcttcaaaagttcgaaaagcccttcgagcacgagtttttcgtcgatctcgggaatgcacatgcgaaccgccgaacggttcattctcttgaaattctcttcgggacggaatacgcggatctcgcccttctcgtttttaaaggctttcagaccttcgaaaatgccctgcgcgtaatggaacacggtggtggcgagatcgaaggcgatgggacggtgcggttcgatctgcgcatcgtaccagccctgtccgactttgtatttcatcgtgaacatatagtcggtaaaaattttgccgaaaccgagtttgctttcgtccgtcggtttttgtttcaacacgtctgcctgaatgaatttcataccgtttatctctccgtaaatttaaggcgttttcacgcgcctttatttttttatcctattataccacgcccgcccgcttttgtaaacaatttataaaattgataattttaatcgtatccatcgattttttcgatcagaatttcataaaaccgcaaagccaatcgatatcgtcgatttctttgcgtatatccgcgcgttccggcgcgctcagatagcgcttgcttttccgctcttcacccgcgcccgccgcaaaggaagagttctgcgtggcctgttttttcttatagtcgtaggcgatgcccacgctcgcaatgatgatgaatacgataacgacaagaaaaaaaacgattcccgtcgccacatttaccatagaagatgtttccgacaatatggcaaagacaataaaaaagacgacgacgatcgggatcagcgcccacagccatgtatgcttcttcttcgtttccttttcgccgctttctatgtacgaaacatccgcgtccgcggctttgatgcggtttacgagcgtttctctccgctctgcgagcgtcttgccgtgcgttttatagagttgcgcgcgctccgaggcgctcatcttttgaaacgcctctttcgcgtcgccgcgcacggagtcgaattgcgaaaggtcggtcagtcccttggtcctttgcaaaactttccgccacggcgcacgccagttttcttcttccgcttgtagatccgcggctttcggctccgcggcggtttccgtcaaaggcgcgtcggtcttttcgctttgctccgattggtccgttacgggcgccgaaagcgctttttcttcctcttcgagcgccgctttcgcctgcgctacgtcgataaaggacatgcactcgggacagatatccgtcgtcgcgtaatcgtacacggagatccgcttgccgcacttgtaacacttcacttccgttttcatattctctctcccccgatcattcggacgcaaacgcgaaaataaattcgtcctgtttttcgacgcggaccctgcccgccgtaaaatcgacgatttttgcggcgaaagcctcttcttcgcgcgaacgcaccgcaacggtcaggcgcacgcagtcggaatactgcgcgtcggcgagcgtccagccgttcgccgaaatatattttctgacggcgtccgaaagttcgtaacccaacgtcagcatatagcgcgcgcacggctcgaaaaaccgcttttccgctccgtccaggcactcggacgcggcgcccgaataggcgcgcacaagaccgcccgcgcccagtttcacgccgccgaaatagcgggtgacgacgacggccgtctgatagagttttttgccgcgcagagcgtccagaatgggcatgcccgccgtgccctgcggctccccgtcgtcggaaaaccgcatgagagtgccgagcgtatccgcgacgaacgcataacaatggtgcgtcgcgtcgggaaactccgttctgacgcgcgcgagaaatgcgcgcgcctcctcttcgctttcgacgtgcgaacacgtcgaaataaagcgcgaacgctcgatcactttttccgaacggtactcggtaaagacgctataaacgcccttcatttcatgagtatgcggatatgcacttttttgcccttatgcaggacgaattcgcctttttcgcgggcatttcgggggatctgcgcgttcacgtcggatattttttcgtcgtctatgcgcacgccgccgccctcgatgagccttctcgcctcgctcttggactttgcggcgtttgcgagcaccatcgcgtcgcacacgctttcggtatctgcggggatctccgccgagggcatattctccgcgtcgcccccgaatgcggctttcgcctgtttcgccgcgtcctccgccttttcttcgccgtgcaccattttcgtaagttccatggcgaggcgctctttcgccgcgttgatgcgctcgtcctgatgcgcgcacaactccgcgatctcttcgagcggcaaaaaggtgagaagtttcaggcatttttccacgtccgcgtcgtccacgtttctccaatactgatagaattcgtaagggctcgttttgttctcgtccagccagacggcgcccttcgccgttttacccattttacgaccgtccgaggttgtgagaagcgtgaacgtcatcgcgaacgcgggctgctgctccttgcggcggatgaggtccgcgcccgcgaggatattgctccactggtcgtcgccgcccagttcgagtttacagccgtattttttatagagcacgagaaaatcgtacgcctgcatgagcatatagttgaattcgaagaaggaaagccctctctcgtaacgcgacttgaaacattccgccgaaagcatcttgttcacggaaaaatgcacgccgatgtcgcgcaaaaactctatatagttgagattcatcagccagtcggcgttgttgaccatcaacgcgccgttttcgccctcgaaatcgataaacttcgacatttgctttttgaaacattcgcagtgaaagtcgacggtctcgcgcgtcatcatcgagcgcatatccgttcgccccgaagggtcgccgatcatgcccgtgccgccgccgatgagcgcgatgggccgatgccccgcgtcctgcatgtgtttcatggcgatcagttgcaaaaagtgccccacgtgcaggctgtccgcagtggggtcgaacccgatataaaatggaacgctctcgctgccgaggagtttataaagatcctcctcgaaaaccgtctgcttgataaagccgcgctcgcgcagcgtgtccatgacattctttttcattgctcaaaactccgatatatttactttaattaccttaattttagcacattacgcgccgtttgtaaacccaatgcgcgatgattcgcccaaatcttcttttgaaaacagcaaaaagcaccgcgcaaaatattgaaaaatttccccgactatggtataatttaactcggttatgcttaaaaagcaaattctgtaggttattaaatgtatcggaggaataaaaatgcaatattcacgcgaagttgaagagatgatttgcgttgccaagggccccaaccacggccccgcccccattcccgaagagggaaaatggatccaggcaaaagagatcaaagacatttccggcttgacgcacggcgtcggctggtgcgcgccgcagcagggagcgtgcaaacttaccctgaacgtcaaacagggcgtcattcaggaagcgctcgtggagaccatcggctgctcgggcatgacgcacagcgcggcgatggcggcggaagttctccccaataagaccattctggaagcgctcaacaccgatcttgtgtgcgacgccatcaacaccgcgatgagagagttgttcctccagatcgtgtacggcagaagccagtccgccttttccgacgacggcctcgtgatcggcgcgggcctcgaagatctgggcaaaggcaaccgttcgcaggtgggcaccatgtactccaccgcgaaaaagggcgtacgctatctcgaaatgaccgacggctacgtgacccgcctcgcgctcgacaaggacgatcaggtgatcggctacgaatttatcaatttcggcaagatgatggatttcatcaaaggcggcatgtccacggacgacgcgttcaagaaagcgcagggacattacggcagattcgagaaagcggacggggcggtcaagtatatcgatccccgcaaacagtaaggaggtacacggaatatgagtatcacgttcgaaggttacgagagaaggatcaaacagatccgtcccgtcatggataaatacggcatcaaagatttcgaagacgcgaaaaagatctgcaacgacaagggtttcgacccctacgagatcgtaaagagcgtacagcccatcgcctttgaaaacgcgggctgggcatacacgctcggcgcggcgatcgccatcaagaaaggctgtacgaaagcagcagacgcggcggaggccgtcggcgaaggcttgcaggcgttctgcatccccggttcggtcgccgaccagagaaaggtgggcgtgggccacggtaacctcgccgccatgctgctgcgcgaagagaccaaatgtttctgcttcctcgcgggccacgaatcgttcgcggcggcggaaggcgccatcggcatcgcgaaaaacgcgaacaaagtgcgcaaacagcccctgaaagtcattttgaacggtctcggcaaagacgcggcgttcatcatttccaggatcaacggcttcacctacgtgcagaccaaatacgattactatacgggcaaagtgaccatcgtgagcgaaacgccgtattcggacggcgagcgcgccaaagtgcgctgctacggcgcggacgacgtgaacgagggcgtggcgatcatgcgcctcgaagacgtggacgtttccatcacgggcaactccaccaaccccacccgcttccagcaccccgtcgcgggcacctataaaaagtggacggtcgaaaacggcaagaaatatttctccgttgcctcgggcggcggcacaggcagaacgctgcaccccgacaacatggcggcgggccccgcgagttacggtctgaccgacacgatgggcagaatgcactccgacgcgcagttcgccggttcctcttccgttcccgcgcacgtggaaatgatgggactgatcggcatgggcaacaacccgatggtcggcgcttccgtcgcagtcgcggtcgccgtgcaagaggctatgacaaagtaaccgatatttaagatttttgtgggatttgcggattttttccgcaaatccccttttttttacgacgaaaaagagggatacggaaattccgtatccctcttttcctaatcgctgagaatgcttaaagtaccgaatcgaaccgcgatccgataatttttcgtgacgtctttgcctgcggtgttgacgatcctgacgtcgctcatgctgttgggaatttctccgatgtcggtgatggaagacgtcattttcaaggatagcgtatgattttccgcaagactgccttccgagatccagtactcgccgcaagtcaagggcgtgccgtcgtacactttgctttcagacatgctcgaaagcgcgaccttgcggcggctcaccatcatcagggtttccgtatcgaaacatacgtaaaaaccgcccgtgcattcgacgcccgctccgtctacgatctgcagcggcaaagcgtacagcgtatcttcgctcaaaatccccgcatcggtcatgcccacgcccgcaaggttcagtcggagcgtgtatcccgtcggaagtcccgtcacatagtattcgtctttttgatagacgagcggcgtgccgtcgtagtacttttgcaggctgtacgggtgcaccgtgacgacctgctcctccacgacgcgcagcatgccctgccgaaagacgaatttgattttttcctctttctgcccgttcggccgatacagcgaaaaggatacgatcgacgatctgctctgtccgatctccgtccggcttccatcgaattccgcactgtaagaatagccttcgaagagaagttcccgaagcgtcaatctgtctttccctgcgccctcggccgcgtccgcatacagcggactcccgtcgtattgtttcacggcgtcgacaggcttgatctcaatcgtccgcggtaaaaaaccgatgttggcgtcttcgccgctgccgccgaacacaggccccgcgccggtcacttcgacctgcacccagcccaaaccgtcgatatacacctccacccaggcatgcgcgttcgcgccgtagatatccgtccactgtcccgcgctgacgtcccctgcgtaaccgatggtatatctcgcgggaatgcccagcgcgcggtacagcatggtcgccgcgctcgcaaagtgacgacacacgccctccttgtaatcgcgcaaaaaactgacgacctgatcgctctcgccgttcatgagcctattgtacgataagttgtactgcgcggcgttctgaatgtaatcggcaacgtcttttataatatcgtcgtcgttcctgtcaaacccttcttttgcaatgacttttttcagatacgccagcgtggaaccggggatctgcaaataattttgcttcacatagaatcgatacgccatttccgcgtcgcggtattccccgagatcgacgttcaatctgccctgcgaaacgtaatcgtagggataatattgcaattcgtatatcgctctcgaatcgccctggtaccacacgtcgctcgcctggatcgtatagtcgtattcgcccaaccccatataatagggcaagaaatagtcgttactcttcgcgtcgatacggatgagcgaacttacataccccgccttttccagagcgacgcccgtgagataattgagattgtaatcgttgtccagacggccttcgtaactggacgctctgttccagcggatcccggtataatccccgtaactcatcacacgcagatatattttaccgccgaattccgaatagaccttggcggctatacgctcttcgccgcctccgccatcgtttccgccatcgccgccagagccgccttgtccgccccagtcgccgatattcccgtccttatcgagttctgagccgccctggccctcataatccgattcgacgatctctaaaaagccataatcgtactcgatgagataattttcggaaacgtcaaaaccattcgcgaccacgccgatatccaaaacgttggtttttacgccgacgtcgaaaatatacgtatagccgtaaactctggtttcgtgcccttgcgcgagcgtataatcgctcttgtcggaaatccgatgtccgcggtcagaatgcaacctgccgtcatacggccaggaattgctgttcgtttcgaccaagatcgggcgcggcgtaacggccaatatcccgtattcatattcgacgcggatgtaatcggaaacattttcgcccgtaggaccgagcacggtgacggaaacggtatttaaaaccttgttcacgtttgtgacacttccgtcacaggagatctccacgctgtacgtatcgggaagagtgttttcgcattcatagagcgcgcaggtcaagggcgtgccgtcgtacaccttttcggcggcgtgcgtcttgatatacagcatgccgtcgggaatctgcacgacgagcaaaccgctctccgtgacgatattgtaattcgcggtcacgtcgcggctgcccgagaagatctgtactttatcaacgacattgggaattttgccgatctcggtgatcgaaccgcgcatggacactttcgcccgctcgccctctgctacggcgggcgtcaaactttccaaaggcgaagtaatactgtaatccgcacaggtaagaggcgtgccgtcgtactgtttctccgcgctgcccgccgtgattatgatgggacgcgcgatcacttcgataacgccgtcggcaaactccaacgcataattaaaggtaacgttccgcccgtcttccaggatacggacgcggtcctcgacgaccgtattggcttgcgtgcctacatccgttcggctgccgagcgtgtccgcatacagcgcgtgccaattcagcataccgcgctccggatcgtaagaaacttcttccgcagtcgcataacggttggactgcggtctgccgttgtaataatcgcgcaggctcgccgctgtgatgaggacggggcggggcgtaatgatcagaacgcccgtcaggaaagtgacttcgtaatcaaaagtcacgtccctgccgttcccgtcgaagatcgcgaactccgaaacaaagcccacgcccgtgcccacgtccgtctgtgagccctccgtcaaatacatgggcgtgtgtccctcgacgatcggcggttcacaggaagaagtcacggttatgccgaacgtgctgagcggacggccgtcgtacaccttttcgttatcctgcaccttgaccgtgatcgggcggggcgtcacttccagcgtgccccatatgtaagagatcagatagttgaaggtcacctccctgccgccgtcgtatattgcgacgagtacggagttctccgtttcccccacgtcggtgatctcgttcgcccagaccgcagtcgaaacgtgcccttccacgagcggatactcgctgtccttggatagggaatgttccccgttgctgtgcggcgcgccgtcatatacgaacgtatggctgcccgacgcgatctcgatcggacggcgcttgacagtcagagttccgttcaaaagtctgatcttataattgaacgtgacgtcgcgctcgccgtcgaacacttgatactgatctatgcggttgataccgagacccgcgtccgtctgtgagccgcggtaatgcgcaacgccgcggtgattcaacacgagcgccgctccgtattcgcacgtaacttcgcactcttccacgacgaggggcttgccgtcgtaaattttttccgcgctgcccgccgtgaccgtaacgggacggggtttcaccgtcagcgcgccctccgcaaaggatatcaggtaattgaacgtcacgtcgcggtttccgtcggtaacggtaaattctttgacgcggttcgtgcccgttcccgcgtccgtctgcgcgccctcgttcacggctacgcccgtctgattttctacgattgcggcgccgtattcgctgcgcgcggtaaatttgtctgtcgtaagcggcgtgccgtcgtatattttttcatcgctgcccgccgtgacctctatgggacggggcgtcaccgtcagcgtgcccgtcacgtaagatatatcgtaactttcggtcacttcccgcccgtctttggcaaagacgcgcacgtcgagcgcgttatcggccgaaccgcaatcgctcagtcccgcgccccattcgacgcgcgtttcatccccgtccgcaagcgcgtatgcgctcagatcggacagaaaatgcgcgaagtccgtatgtaatttgccgtcgtacacccaggaatttcccgcggtttcgatgacgacgggacgccgcgtcaccgtcagtgtgcccttacggtaagcaacggcgtaattgcccgtgacgtcttttcccgtttcgtcaaagatacaaatgctcgtcgcgttctctttcgtccccgcttctacgatctcgtcgggtacgcccaaagcatggctgtgccccgcaagcagaccgctttgctcgttttcgccgtcgcaaacggtatacgcgggattccgatgcgccgccccgtcgtacatccagatgccgctgcccgtcgaaacggagagcgggcgcggctggacggtgagttgcccgcattcgtaaaagatttgataattttcggaaacgtcttttcccgcgtcgtcgcgcacgagaaagccgaggtaattgtcagccgttttcgcatcggtgacttcgcagagttccgaaacggatatagagtgccccgataaaagccccgaatcttctttgggttcctgaatttcaaaaccgtcgcaggacaggggcgtgccgtcgtacaccttttcggcgccgtaagtcgttacgtacagcggacgcgcctgcaccgtcagtttcccgggtacgaggtcgatattataatttcccgtgacgtccagaccttccgcctcttttacgatcctgatctcgggaatattttcgctctcgccctcgtccgtacggcccgcgcggaaggtagcgacgatcttatcgccctcggcgagcggcgtcgatcggctcagttcgtagccgtcgaaggtcagttcgctcccgtcgtaaattttgtcggcattttgcaccgtcacggtgatatcgcgcggaatgaaaccgatcgtcgaagtcagagcatgaaagacgtagcaatccgtcacgtccgtaccgtccgcgctcgtgaccgtaatggaagaaacgtcggcggtcacagtggaatcgggtttagacgggtcgccgtacacaaagcgcgcgcaatggatctcgtcctcgtacgcgagcggcgcaaaaacagagggaacttcgccgtatccgacttttttctgagaaacggaaacttccgcttctttgggcgcgacggtaaatccgtgcgcagttccgtagcgttttgtgccgaacggtccctttgcgaccgcacgcacgcggtaatctcccgcgcgcagcgccatatcctgcgaccactcgtccgagccttcggcgctgaattcgtacttgacgccgccgaacacagcgtccgcccgataaccgagttcttccccgtaagcgatcgttgcagggcatgcggctacttcgtacacgatcccctgaatggaaacgagcacggtgatcacagtgaggatcaatgctaaaacggcaatgatcggcacgcggaagcgcttgatgaaatcaagcacgttcgcaagtttaacgactttgcgtcggtaatcgtcgtaaagcatatattcctccttgtttttttacgcggggtgcacgatcagcgtacccgtgcggaatccgatcgaataattgcccgtcacgtcgttcccgttttcatcgaaaatgacgatggaactgacgacgttgtcacaccttcccacattcgtctgcgatcctgtcacggtgacagccgctctatgcccatgcgcgagcgcggtatcgtattccgattggatatagtaagaacgattggtcaacggagcgccgtcgtacgccttttccgcgctgcccgcagacacgacgatgctgcgcggcgtcacttccagaacgccgtaatcggcgttgatcttatagaactgcgtcacgtccttaccgttttcgtcggtgatgcgaacctccgtttcgttcaggctgcgcccgacgtcggtgcggctgccgaccgttttgacggaagcggcatgcccgaataagagttcgccgcgcagatcccacgcagggttttcaaggggcgtcccgtcgtacagtttggagccgccctccgtggaaacggaaatctccacgagatatacctgtaatttccccttttcgcagatgacggtaaagaggtctgtcacgtcttttcccgaagagttgaaaagacggaacgaaacgatggtactctctccgatgcccgcatcccgcctcgatcccgtcacgattgcggagtaggtgtagccgtgcgcaagatagtcgctgataccctgcactttgcccgacggaacgagggtgtttaccccgtcgaatttcatatattcgttgacgggcttgatgcgcaggatcccgttgtttcctcccgagcccgcgcctccgccgtcctcgaaatctccgccagcgccgtccagagcgggccccgcgcccgtcacttccacctgcacccagcccgtgccgtcgatatagacctccgtccaggcatgcgcgttggaaatgctgacaggcgtccacacccccgccgcggcatttgccgtatatccgatcgtataacgcgcgggaatgcccagcgcgcggtatatgagcgttgcggcgctcgcgtagtgctggcagatgccttcccgataatcctttaaaaaactcacgacgatatcgctctcgccgtccagcgttttgtcgtaatccgcattgtacttcgcggctttccgaacgaaatccgccactttttgcacgatatctttgtcgtttttgctgaatccttcgcgcctgacgagcgtttgcagatattcgttggtggacgcgggtacgaaaagatactgcccgcgcacgaaatcagcgtacgcgttctccgcgcccgcatacgagccgagccccgccgcaagcgggccgttctcgatataatcgtaacgataatagtacagttcgtagataccgtccacattgccccgatacgccacgtcgctcgtctgtatcgcataatttaggggcgcggcttccatataatacggcaatagataatccccgcccatggtatcgacgcgcatgcgtccgctttcgaaaccgctcgctttcagcgcgacgcccgtcagataattgaaactgtatttgccgtctaaaagtttggaatattcttccgcttcactccatcggttgccgttgtaatccccgaaactcatcaatcgaagatatatttgcccgcccatatcggacagaacgcgaagggccgccttgtcgttatcctgattcgggtcgccgccgtcgatcttgccgtccgtatccagtttttcgccgtcgccgccgggcacagcgggcgtatcgtccgttacgaccaatacgccctcctgttttgtgaccgcatagttattcgtaacgtcttttgcgccgtcgtacacgacgacttcggcaatggtattggcgctttccccgaccgcctgccgctcgcccgaaacgctgaccgaaagtttgtgcccgccgacgggctgcgtgagggaaacgagttcccactcgtcgcaaatgaggggcagtccgtcgtacgctttttccgcgctgccggaacggatggtgagattgcgcggcgtaatcgtcagttcgccgtaatgatatgcgaatgtatagttggaagtcacatctctcgtcccgtcggatacgacgatctcggaaatataattttcgctcacgccgacgtctaccctttccgctggcatttcgacgcgcgtaaatttatgccccgccaacagccccgttttggaagttattttatattcgggacaggcgagcgccgtgccgtcgtacactttcgtgcccgagagcgtggatacggtaatgccgatcggcttgacggtgagcgtgccgaacaggtattcgatcgagtaatcggacgaaacgtccgatccgttcccgtcgacgacttttgcggaaaaggtattcttgcccgtgcccgcgtccgtgcggctgcccgtcatatcgacgagaatgcgctgtccgtcggacaattcgccgctcacgagttcccaatggtcgtcggtgtgcgccgtaccgtcgtagacgaattcctgcgaaccggacatgatcacgagcgaaggttttttcgaacccgtccccccgcccgcgaacagcgccagcagaacgatcgcggccaggatcacgccaatcgcgatcgaaccgaggatatatatatatttcgttcttttcgtcacaggcggcctccttgtttacgcgcttctgcccaaacggcgcactatctctttacattgcgataagttttcttccccgaacagttcgtccatgtatctgcacaggttttccgcgttgttgcgaagatatacgggat

SEQ ID NO: 3834 - DNA, 32759 bp, Unknown
  16S sequences of unknown bacteria
cttagcaataatggggtgtgataatatggaaaatcaagtcctgataggaagagttatcggtaagctttcaaatcaaatatacaggaatatagcaatatcttgttcttccacaaatatgagcggtacacaaggaagggttttacattttattttatctaataatggggatgtatttcaaaaagatattgaatcagaatttaacttgcgcccgtcaacagccacaggcattttaaaattaatggagaaaaacggtgttatacgcagagaaagtactccttacgatgccaggttaaaaaggattgttataacagaaaagggtgcagggctaaaagagcagattgctaaggatgttgtccatttagaagaaacattgatgcttggaatttctcaagatgatttaaatgtttttctaaaggtcttaaatcaaatgttaaaaaatttagaggaagaagcctcattttagatatatcttaattgatatattgaaagagttgtattttattgctatatataagaaaataacaatgaactgaaagaatagatgattttatcttttttgaaaaagaatatttttaattttctgcctataaaaaaagtccgtttcaaacggactttttttagctctaagattattcagcactgtacatagtgcttgtaaaataaattatttcacccattttgtaattattttaatcaagaattttccctaccggaaacagccatctgaataaaaggcgcatcaaagggttacagaccaaaatcattaatggtaaggctatacaccagttaataggaatgtgatgaatccaagtggtccaaatttcactgctaaatcctactgtaagcaatgcgccataaaaggattctaaaattaccataagtgatactgtgaaaagttggaacaatactgtaaacatccaaggtttcatccaaggtctgcctatttttttcatcagcattttcacaaagggacaaccaacgaaatattcaagacaaaaaacaacaactaaggttaatggctccaaaagccaggcttgttttaccgcatcccatgatatccccatactaaggaacatgttaaatataagcatacatgtacacatgaatactacattcaatacggtaaatataagatcttccctcttattttgaggcatcatcatttttttcgatatatttgacattcaagaacctccatatacttagctacctaactattctagcattttatttttttattgtcaactgctttttatttttcataacaataggtactatgtgaaatagcaggtgaaaatttgttatgggtaaacaagaaaatcgcgaaataaaaatcttcgcatcagatagtttgaaatagaaaacatatgtaaatttgtttcaaatgcacgtagttttatagacaaacatcgagtataatgttactataaataaatcaaaactaagtttgtaaggggtaatataaatggacgcaaaaaaacgtagtacaattctatcgggtgcttctattggtgttgctttgggagcaattgcaggcggtttgattggttactatggctttcagaatttgccaatcggtttggcaattggtgtggctgtaggcgtagtgctgggttctgcatttgatttctgcatggtgatgttggctcgtaaaaagaagcaaaaactggaacagcgtgaattgatgcacgaaattgaaaaagaagaacatccgcatcaaaaaaagaaacatcataaataataaagcacgtgagaagcaaatcaatcagctctcacgtgctttatttacatttcaggagtttgcatatcataagagcaggtatggtaatcaatccccagatgactgtaaatggaagacatacttgtcctttgatattgaaaggcaaattggaatagtcccaaacttttttcttcatcatcacattgaccaccaaacctgtggcaagttctacacctgtaataataaaagagcctgcaacgcattttaccggtaaacttttttgttttaaaagaccattgcatactttattgataaaacataggctggttcctcctgctaccgccatggatacatgtgtctttttgcggtacaatagttctaatgcaggataaatggaacttccggctaaaaataatcgtgcggtttgtaccataaaaatctccttaaaattttgtaataaacaaattatttgcagaataaagaaaattatccttcatacagtacaaattttcatggtaattttagcttgttattattctataaaaatagggtatttctaaaataaagttcatataaacgtaataattttgtgtgtttatacattttatagaaaattatttgagtgttttacacaaaacttatggagtgtagccttattttttgcagtcgacattatttgttgattatgataaaataaaaatgaaaattacagtaaatatgaaatttaaaagaggttgcatatatgaaaattttggttacaggtggtgcaggttatattggtagccatacctgtgtagaattgttacagacaggttatgaagttgttgtagtagataattttgataacagtaaacctgaagcaattcatcgtattgaagagcttgccaatcaatcaatttcattttatgaagctgatgtacgcgatgaagaaacattaagagggatttttgcgaaagaacacattgacgctgtgattcactttgcaggactaaaagcagttggtgaatctgtgcgggtgccgttgaagtattataataataatcttatttctactttggttttgctggatgttatgaacgaatttggtgtaaagaattttgtgtttagttcttccgcaaccgtgtatggaaatccatccaaaatgccgattacagaggattttcctttgtctactaccaacccatacggcaccacaaaactaatgctggaacaaattttaaaagatgctgcaaaagcagataccgcatttaatcctgtgattttacgctattttaatccggtaggcgcacatgaaagcggtcgtattggtgaagacccaaatggaattccaaacaatttgatgccgtatatctctcaagttgccattggaaaattagaaaaattaaatgtattcggcggtgattatgacactaaagatggcacaggagtgcgtgactttattcatgtagtcgacttagcaaaaggtcacgttgctgcactgaaaaaatttgagacaccatgtggtttgcaaatttataacttaggaaccggccaaggatactctgtattggaaatgttgcatgcttttgaaaaagcagtaggtaagaagattccttacgaagtcgttgcacgaaggccgggtgatattccggtatgctatgctgaccctgaaaaagcagcgaaggaactaaattggcatgcaacaaaaaatataaatgatatgtgtgcagatacgtggcgttggcaaacgatgaatccaaatggatatgattcataatatgaaattttgtaattgtgtataaaggtaaaaggagttttcttgttgcaaagaaaactccttttgtattttatatggtgttgtatgaaaggcatatggataaaatgtcatctttttatgtatgaatgttataaattatggtataacaacttcataacagggttaaaatgtttcattttgactcttgactggaatattttaacgtttataggttagaaattgtttcgcaatttcttttatgttataacaaccttgtaacagtaacaaaactaaagttttgactgttagcaagaacgttttagcgttttatggctaaaaattgcaaagcaatttttttaatgctataacaaccttgtaacagtaacaaaactaaagttttgactgttaacaagaacgttttaacatttataggttagaaattgtttcacaatttcttttatgttataattttcacagaaaggggcggtgtccatgcattttggttctcgcatttatcaatatgaaaatgcatttatagatgatttggcaaagttggtttctattccatctgtgtgtacaacagcaacaggggaatatccgtttggagaacagtcggccaaggcattgaattggatattaaaacgagcagaggaaatgggttttgaggtggcgaatgtagataattatgccggtcatgccgaatttggtataggagaacatatgtctgcggtattggcacatgtagatgtggttccggcaggggatggctgggatagtgatccgttcactttgacacaaaaaggagatttattatttggaagaggtgtgctggacgacaaaggtgctgccctgatggcgctttactgtctaaaggcattaaaagatgcagatgttattccaaaacgccgactcagagtgatttttggtgcaggagaagaggtgggaatggatgatttacgtgtctatttccgtcatgagccattgccggataaagcctttacccctgattccgattatggtatttgcaacagagaaaagggaattttacagttttcgttacatgcagcagaaaacaatgcaaaaattgtaagacaatttcagggcggtaccgtgataaatgcagtaccaagcagtgcacaagctgatatttgctgtaccaagcaagaaatagcattattgaaacaagcttgtgaacatgtaaagggtcaatttacttttacagaaaatgaaggcggcgttgtgatacattcacagggaaaagcttcccatgcaatgcagccggaagaaggattcaatgcagtaacacatttgacagctctgttatttcaagtattcactccggagcaattgggagatatactcacatttatccatgagcagattcacacacaatgcaatggtgagttgcttggtattgcacaaacagatggaccttccggtgcgctcacctgcaatgtgggaaaagttgaaatttttcagcaaaaagcggtggtcagtattgatattcgttatcctgttacgtcagatggaaatggcatcatggagcatatccaatccaaagcatcaaaatatcatttatctttccatttgcaccatttaaatttaccgttatatatggaagaacatgctccgttcatttcgttattaaagcaggcatatcaaacaacaacgggaaaagaggcgaatctttatgcgacagggggaggtacgtatgcacgtacagtccagggacgctgtgttgcattcggtccgttgtttgaagatgagccaaaccgcaacatgcatgacgccaacgagcatattgacatcaaacgttttatgaaacatggagaaatatgtctgcaggctatgtatgatatgattatggaaccttgataggagataggtcacgtggaaaacaacaatcaaaaacaagtcacatttgaagacattgaaaacaacgaagaaatcaatgagtatatcacaaaaggcaatgaatacctgggcgttatgaattatacggaacacgggtttgcccatttaaagagaagcgctgtgtatgcacgccgtattttagaagatttgggatacgatgagcgtacgtgcgagcttgcagcgattgcaggctatatgcatgacatcggcaatgtggtcaatcgtgtagaccacgcgcagtcaggtgcgattatggcatttcaaattttgacaagaatgggaatgccaccaagtgaaatcagtcaaattattgctgcaatcggtaatcatgatgagggaactgcaacagcagtcaatccaattgcagcagcgttgattttggctgataaaagcgatgttcgccgtacaagagtgcgaaacaaagaaactgtagccatagatattcatgacagagtaaattacgcagtagaacattccagcatagaagtaaacaaagaacaaaaggtggcattactgaaattaaccattgataccaccatttgtcctgtgatagaatattttgaaatatttctaacacgtatggtactttgccgaaaagccgcagattttttaggtttaacctttcaaattgttgtaaacgatgctcgcattttataaataaataaaaaaacgcagctgcctctcttaaaacagctgcgtttttttatttggatttattattttttatcggcttccgcttcaattgcttttaaacattctttacaaatgttgcggcccatatattgcaccatatcgtttgtgttattgcaaaacatgcatgctggttcatatttttgcaatatgatagaggagttgtccacaaaaatctcaattggatccctctcgttaatattcagtgtttgtcttagttcttttggaagtacaattcttcccaattcatcaacttttcttacaatacctgtagatttcataaaaattgctcctttttttagattttgtttttctttttactacaattactttgtttatgtcaatatcatacctttttttaccataaatgtcaatagatttaaatttctgtcgaacagaattttcaaaaaattcataaactagtccaattgtacatacttattgcagaggtgtaaagcatgttaaatgtaatatgggcagttatgattttaatcagttttgtgtgcgccattttcacaggcagaatgccgcagctttcagaagcagtaatgaaaggcgcaggcagtgcagtggaattggtaataggtacattaggtatgatgtgtgcatggacaggatttatgaaaattgcagatgccggcggactaactgctgtattatgtaaagtattcaatccgctgttaaaacgtctgtttcccgattaccgggcaggcagcagtgcgttaaaagcaatttccatgaatatggcagccaattttttaggtttaggtaatgcggcaactccgcttggcattgccgctatgaaggaaatgcagaaagaaaatcccaatccttcggttgccaataacagtatggttatgtttgtagtgattaatactgcatccatacaattgattcctacatttatgggggctttgcgagcgcaatacggcgcgcagtttccgtttgatatactgcccgctgtatggcttgcttccgtagtatcgttaattgtgggagtaattgtggcaaagttgctacaaggacgcaaaaaagaacacagattacgttaaaggagtgatccatatggaaagtttcagtgtttacattattcctgttgtaatctgtatcattattgtatttggtcttttcaaacgtgtccctctatttgatacgtttattgcaggtgcgaaggaagggttccaatcttccatctctattttgccttccttggtaggcttgattatggcagttactatgctgagtgcttccggggcgttagaattattcaccaactggattgcaccggttgccgattttttaggtttcccggcacaggtacttccgcttgccttgcttcgcccaatttccggcagcggttccactgcggttttaacagaaatcttccaaaattacggcgcagatggatttatcggacgtgttgcttctgtcatgatgggttctacggaaaccacattttatgccattgctgtgtactttggttcggtgggcatcaaaaagacacgccatgcaattcccgcagcgctgatggcagacacaacaggatatattatgtccgtattggcagtaaatctattttttcgttaatacgccattatttggaatatttgcacggtatattttaacggatttatacgacagaaaacatcgtgcgtgaaattttatcacaaatctatctactggaaatatttacatattgcagtactttttataactctttattccaatatttgcggtcaagactgcggtactgtattgcttccgcaatatgctgtgcgtgtatttgcgcgctatggtctaaatctgcaatggttcgtgctacttttagcactctgtcgtaggcgcgtgcggaaagtcctaatttttcaaaagcggcttttagcaaacgattggcactttggtccagttgacaatgtttctgtaacagtgtaggcgtcattttagcattgcaggtaatgcctgttcctttcaatcgttcattttgaattgctctggcagcatccacacgtttttttatggtctcggaggattctgccgatgctttggaagaaagctcgtcaaaatggactgcgggaacttcaatatgcaaatccaatctgtctaacagagggccggaaacacgggaaagatatttgttcaccatggacgcggtgcaagtgcaagggtgaccggtatgcccaaaatagccgcatggacatggattcatcgcagcaacaaacataaccgtgcaaggatacgtatagtttccgtttacccgtgaaatggttacggtaccgtcttccagaggctggcgcaatacttccatagcatttttggaaaactcgggcagttcatccaggaacaaaacaccattgtgagccaatgagatttcaccaggttttggaatgtttccgccaccggagaggcctgcagcggaaactgtgtgatggggcgcacggaaaggacgtgtatgaatcaaagaggtatttggaggcataatacccgcaatggaatgtagttttgttgtttcgatggtttcttcaaatgtcataggaggtaaaatagagggtaagcgttttgcaagcatactttttcctgagccgggaggtccaatcagcagtacattatgacctccgctggcagcaatctctaatgcgcgctttgcttgggtctgccctcgtacatcagcaaaatcaggcaaagcgggagacgcaaaatcaatattgctttggggaatctgaggcaatatggtcagattacctgtgaggtggtcaatcagctgttttacatttgtcacaggatatacttccaatccttccacaacagctccttcggcagcattgacagcaggtacaaacaaacggtgatatcccaattctttagcgtgaattgccataggcagtacgcctcgaattccgtgaatttctcctgacaaggacaattcaccaatcattgcacaatcggaaaggtcacaggaaagttgccctgatgccgttaaaattgcaagcagtatgggaaggtcataaatagggccttcctttcttttgtcagcaggcgcaaggttaacggtaatacggctcatgggaaatgcaaatccgcagttttttaaagcagagcgcactctgtcacgagactctttcacagcggtatcaggcaagccaacaacgtcaaatccgggtagtccgtttgaaatatccgcctctacattgacttcaaatgcatccattccgtaaagaccgatactgtttaaatgggcaaacatgagaatatctccttttgtgtcattatcgttagaatttatttattataaaacctgacatgttgcattacaagaaattgtttacatttttcaacaaggcctttacttatttttgttttagggatataatagaacaaatgttcgatttttaaaaactggaagggattatatggaacgggctattttacattgtgacctgaacaatttttacgcttcggtagaatgcagagattttccccacttaaaaggaaaagcagtagctgtttgcggcagacaagaggaaaggcatggcattgtgcttgcaaaaaatgaattggccaaaaagtatggggtgagcacaggagaacctatctttcaggctaagaaaaaatgtccgcatttggtcattacaccgcctcattatgatagatatttatatttttccaacttagccaaagagatttatttatcgtttaccaaccaaattgaaccgtttggtattgacgaatgctggctggatgtgacgggaagtcaaactttattcggaactccctatgaaattgccgaaaccatccgccagcagttttacagtcaactgggtctgacggtttctgtaggagtcagctttaataagatatttgccaaactggccagcgacttaaaaaagccgaatgccacaaccgtgattacaaaagaagattttcaggagacaatatggaaattgcctgtggaaagtatgctgggagtaggaagagccaccttaaagaaactgcatgaatcaggtgtatttaccataggggaattggcgcaaagcaatgaaaactatctttatgccatgtttggcaaaaacggaagtgaactttggcaaaatgccaatggcagaaacgaatctcccgtatcttatgtgcaggagcaggaacagcctaaaagtataggaaacagtattacttgtccaaaagatttggaacaggaggaacaagctcaaaaagtattattgtacttatcagaaaaagtggcaggtcgtatgcttcgtcatggagtggtggcttgcggcatccacttgatgataaaagactgcttgtttcagacaaggcaatatcagcagaccattgaaattccaacacgtcaagtgaaagatatttatgccgtggcatgtcgtatgctgaaacagcattataaatggaagcagcccatacgtgcattgggtatcagcggatttttattggtaccccaggcgcaaaaagagcaagtatcgtttttcacaaatacggaagaattgataaaggaagaaaagctggaggagaagattgcaaatttaaaagacaaatatggtaaacaaattattacttatggagcattactgtctaaagattttgacttatataaagaagatatcaataatcaaataccatatcgtccttttcaaaaataaatagggtaatttttatttttctattgacctgttcagagaaatccattataattcaagatataaacattaatgtaaaaataaggtaaatattttctcgtagcacacaaggattgcttggaaaaaacagaaattttttaacatatttcataaatttttattgacttaaataaaagaatagagtatgatataggcagataaaagtgggtgcaagaggtgttttggattgcctgaacaaatggaaaactatacagacaatcagctggtatctttcattcaaaaagggaattcagacgcctttgtggaactgactgccaggtacctgtctttcattcgggcaaaggcacatccgtttcgcagttctgtattggaagcggatgacctatgtcaggaaggcttgcttggtttattcagtgcagccaggagctacaatccgaataaagatgccagctttaaaacatatgcgggtatttgtattcaaaaccgtatggtagcgacgtatcgtgcctgtgcacgcaaaaagaacattcctctgggtcaattggtatcactcaatgatgaagaagcttctcagctcaatatacatggtaccagtcaagcattgtctaatcctgagactttattgatagacagggaaaatttagaaatggttcaccaaagaattcggcagagtttgtcaaaactggagcaacaggttctctttctttacttaagcggccaaagttacagtgagattgctgccaaattagcaattcctgctaagtctgtagataacgcaattcagcgtgtgcgtagaaaactacaatcatgcagtctcaatatgccccggtagcttaagttagagcgttgatctatcaaaggcggcggtgcaaatccgtctaagggcaaaatatctattaatccaaagcgaggtaaatcacatgtacgaagacaaaactctcatctgtaaagattgcggcgctgaatttgtattcactgctggcgaacaagaattctatgcatccaaaggctttgtaaacgagccacaaagatgtaaaccatgccgtgatgcacgtaaaaacgctgcaaaaccggagcgcgaaatgtacacagcacaatgcgctgcttgcggatgcgaagcaaaagttccatttaaaccacgtgaagaccgtcctgtatactgcagcgagtgctttgctaagatgagagaagaataagaagtcgttcttattccgctgattctgaggttcacaaaaagcgatgctcaaatttgagcatcgctttttgttttttgtagtttatttgtcataatgtgcatcaaaaatgcagcggccttctttaaaggtatacagcacttgaatatctttgattgccatagggtctgctttgcaggggttttcgctcaataccaccaaatctgccagcttgccttctttgatggttccttttctgtcttcttcaaaatactgataagcagcatactttgttacagcatagatggcttctttcacaggaatacattcttcttttcccagacatactccgttttttgtcatacgattgactgcgcaccaaatggtttccaacatattgggcacaatcacaggggtatcttgatgaaacgtaaatggaatgttcatttccatagcagaatgtgcgcaggaaatatgtttggcacgttccattccaaagttttcaatgtgtatatcaccccaatagtaggtgtgagctacaaaaaagctgggaatcatcgaaacagacttcacatcaggcaattggtccggacgcagcaattgtgcatgaatcatcacaggacggacgttttgttgttttcccttcaaacaatccagcagttgttgtgcagcagcatctccgttgcaatgagtaataaattgtgttttctcttctaatgcgcggtcaaccatactttgtacctgctcgtcagagtatcgagcataaccgcagtaatctttgctgtttgcgtatggcttgctcatccatgcggttcttccttggggagaaccgtctaaaaacaatttatatccgccaagcctcagccgattgtggtagctgcgatattgaggattttgttttatcaaatctgcatgatgttccaaatcaacatatcctacaatatctaatatcagggcgttttgttctgccatgctgtgcagcaggttccattctccgtcctttacaaagccgtcttgtgcggttgtaattccataggatgcataaattttttgtgctttttcaaactgttttgcaattttatgaatgtcagggtgtgtaatttggttgcctgctttgataaatgcgctttcttccgcatatccggttaggtttccgttttcatctctcccgtattttccgcccgccgggtcaggggtgtttttatccaaatgcatttgttccattgcttttgtattcatgacacccatatgtcccgatttatgagcaatcagcaacgggtgtccctgacaaaccgcatccaattcttttgccgttggatgacgatgctctttgagaaaattatggtcataaccaaagccaaaaatcatttctcccggctctatcttgttttcatcaatatattgttctatttgctgaccgatttctccaatgctggtaatatggttcaaatccaacaatccaagtgtattggaaaactgggtgatatgagaatgcgggtcgataaaagacggcattaagcaatgcccatgcagattgatttcatcgcagttgggtgtcgttttttcttttgctgcttgcaaactgccgcagtacacaatgattccgtcctcaaccagtattgcttccggttgggaatcctccaaggttaaaatgtcaccgttataaaatagctgctgcataaatatccttctctcgtaatcgtttgtgtttagtataagcatgaattatgaaaaaattatggctcatttatagaaggaatgaaaatgtttggaacaaaattttatacgaatgtattgatattgagcatacgtttctatttttaaacatcaaaagactttgccttgcataaccgaagcgatgatgttataatttttcgtaagaaaatcaataaggaggaggctgtatgttagggttaaaaaaaggaaccatatcttttattgaacggaatgaagaatgggataccattgctcaaagagaaatagagcatttaaaagttttatttggccctgttgcaaaagatgtacagcaaataggcagcggagctattagcaatccctctttccgcgtgaaatttatgcctattttggatattgcggttgctgtttcatcctttgatgatgttactgatatggaatataagctgaaagcgcaccatatctaccatgtatatcacaaagatgacaatgaacagttgttttttgaatgccgtgacatggacgcaggtgtttgcacggcgcatatttatgttgtattggaaaacagcgacagatggaatcattttttgcaatttaaagattatttatccattaatacggacagattaaaaaaatacaatacgctgaaacaagaattggcggaacggtatgcaaccgatcggcgtgcgtaccatcagggaaagacgaggtttatgcaaaatattatggtagaagctacagattatttcacactgggtcacgagattacagtggtactggacgaagaacaacgcagcgccgaatatttgcgcggctacaataaagaacactttgaaaaaacaaataaaaaacaaattgtatacgtgtttgatgcagaaaacccgggaaaagagtttcatggcatggtgactgcaatgatagagtatgaaggttccggcgaaatgaagctgattgcaacaccgtgtgaggctgttgtgtatgagccgcaaattgcacatgcgcttacaaaggcagaaggaaataaaaaaccgatttataaatgtttgtatgaaaaatcctgcggtgcggttgtatatcatgaagacgacggagaacgcaaatatttgctgattcgcaatcgttctcaaaatgtaggatttccaaaaggacacatcgaatatggcgaaaccgaattgcagaccgtggaaagagaaattttggaggaaacaggtctgcatgtagatgtttgcgaagcattcagacgcttgtatgattacaaagtaaaattttccgtgaataagcgtgcggtttattatttggcaaaatatacaggacaacgcgtatttcctcaagaaggagaagtgctggaatattgggttgtaccgtatgatgaagccgttgatttattgacatttgatgctgaccgtgaaattttggaagaagcggaagcatttttaaaacaaaactaagaaagcataggtggacaggctgtattgcggtactgtatcttccacgctttgaaaggcaggacgttatctgtgatatcagtcctgccttttttgtgtttatgtttcttttaaattctgaaaaatcagggatactattgatagatgtttaaaaaaacatttgctccacaaaaattttaatgccaatacaaattaaaacaattccgcccaatatactggatttattgtgcagcaagcagccgaatttttttcctaaaaaaacgccgatgagacagagaataaatgtaatgacagagatggcggaaatggaacatatcatttggattaaggtttctgcgccgactgctgaaggcaagataacgccggttgccaatgcgtcaatactggttgccaccgccattgcaagcaatgtttttgtttttagggtgcttttttcgcagaaagcggcttcgtctttttttcgagaatcccaaatcattttgattccaagatagcagagcagaatcagagcaatccaatggtctactgtatgtatcagttgttctcctacttttccgatggaccagccaattaaaggcattgctccttgaaatataccaaaacatgccgctatcctgagtgccgtcaacaaatttacttttttcaatacagcgccgttggtaatcgaaacggcaaacgcgtccatagataaaccgacggctatgccgaataatgatatgtaatccatacagtcctcctgcatcttttttgttttagaaagtgacaggaattactgtgaatacagcaactcctgtcgcaattcctgttgcaattatttgatgttatagtctacccattcttttgcacgtatgacgttttcttcagacggaatggcaacttgtgcttttttagaacgtctgtcaggatacgtaatcggaatggtaatcccattggtatcctcaaatttgtggggatccaactcaatttctccaaagtgttgttttgtcttcatgcgcattttcatctccttttgcggaaaaaaccgctgatgttattgttgctgcagaaagacaaatcatacaaaaatatatttgccaacattggggaaaaatgataaaataacaattatcatataaacggttcatagttgtagcaatgaaaagaaacgtttatttatttatattttaataatgagggaaatagtagtatgattgcgttaattgattatggcgccggaaatttacatagcgtacaacatgcgttggattacattggctgtgaaagttgtattaccagtgatgcaaaagtactcatggaagcagacgccgcaattttgccgggcgtgggctcctttggacatgctatggagtgcttacaaaatgcaaatttggtacagccggttttggattttattcacagtgggaaaccatttttaggaatttgtcttggacttcagttgttatttgaagaaagtgaggagagtccgggggtaaaaggacttggtgtatttcaaggcaaaattcagctgattcccggcggttgggatttaaaagtgcctcacattggctggaattcattggatatcaaacaaaatgacggactgttccaaaacattgcgccggaaccttatgtttattttgtacattcgtattatttgaaagcacaagacagagagattgtttccgctaccaccacatacggaattgaactggatgtagccatacataaagacaacgtgcatgcggtgcaatttcatcctgaaaaaagtggtgtaagaggcattgaaatgctggaaaattttgcatcacttatcaaataaaaggaggtacccagccatgcatgcaaaaagaattattccgtgtttggatgtaaataacggaagagtagtcaaaggaaccagttttgtaaatttaagagatgcaggagaccccgtagaagcggcaattgcttatgacaaacagggtgccgatgaattggtattattggatattaccgcttctcatgaaggccgtggtaccatgctgcatattgtgcaggaggttgcaaaacatatttttattccgtttaccgtaggcggcggagtgcgtaccgtagaggatatcaatgcattactgcgtgcaggtgcggataaagtttctgtgaatactgcggcatggaaaaatccgcagctcattcgtgaagctgccaatcaatttggaagccaatgcattgtttgcgccattgatgcaaaacgcagagcagaaggcggctggacagttgtcatcaacggtggacgtgaagatacgggaaaagatgccgttgcatgggcaatccaggcagccaaattaggagcgggagaaatcttgctgaccagtatggattgtgacggacaaaagacaggatatgatttggaattaacaagagctgtatcctgcagagtaaatattcctgtcattgcgtcgggcggtgcaggaactatggagcatttttctgatgctttcgaattgggcgaagcagatgcagtgttggcagcttccttattccattttggtgaagtcaccattcctgaattaaaagattatttgcaaaaaaaagacattacagtcagaaaatcataaaaatacccgggaatcatattcccggtttttttattgatagaaaagaacatttctttttagtaaatgatattggtgaatatatcctatggcaacagcctgccgaattttgctttgctttcagcgttgaaagtctagtgtgttccgtcttcttaggggagcgcaaaaacttttcaagagttccatattcatgatttatttttgcaatttttgtttttcaaaagtaatcaaatgcttttatctttattgttcttttatgtttttgtaaagaccatacatggaagcgtatttatgggaattttcatatcaggggttgttcatattttgtactagctgcgcataccaatggtaacaagcgtaaaagcgcaattttggaggtgcagaatcagtatgaggtggaaaacaagagcaattgcaatggttgtgatcgtggtgttaatggctgtttcgtttgtaataccggtatccgctatttcagatggggaagtggctgctccgtctgctattttaatggaaccgaatacaggcaaaattttatatgaaaagaatgcaaatgaattgcgtccgtgtgcttctattaccaaagtaatgactttgttattggtgatggaagccatagattcgggtaaaatctctttggatgaccaggtaactgcaagtgcgcatgcggcttccatgggcggttcggatatttggttaaaagaaggagaaaccatgtctgtgaacgacttaatcaaagcaacagtcatcatgagtgcaaacgatgctgctgttgtgttggcagaacatgtatacggaacagaagatgaatttgtaaaacagatgaatattcgtgcaaaacaattgggtatgaatgataccacatttaaaaattgcaacggtctggatgaagacggtcatttgacaactgcccatgatgtggcactgatgtcagcagagttaatcaaacacgaaaaaatctttgattacacattaacttggatggattacgtcagagacggagaaactcaattggtaaataccaataaattaattcgcagttacaaaggtatcacaggattaaaaacaggtaccaccagtcaggcgggcagttgtatttcagctacggctaagagagataatttgagtcttgtggcagtggtattgggctgttccacaacggacgaacggtttacctccgcatctactttgcttgattatggatttgctaatttttcctttgcatcactgcaaatgccggagttgggaaccgtccccgtaacaaacggaatacagggagaagtgcaggccgaatgtactgcaactgctgaagtattaattccaaaggggaaagaatccgcaattaaaagtgaagtggaactgagtgaaggggttcaggcgccggtcgaacagggacagttgcttggtaaagtgaagtatgaactggatggagaagtaattgcagagtatgatattacagcaaaaaacagtgtgaaagagcttgattttggtgcttcttttatgattttattaagaagtttgttccattggtaaatcatgatattttaaaaggaatggaagtataaatttataaaaagtgttgaaattctattgcaaacaatatcggtttattgtaaaataataacgaaagaatgggaacgcataggaggataaaagatgtccatacaagtagatttgaaacatttaaacgggtttgtacgaaatgaggagatggaaggaattgctcctcaggttaagacggcacatcatatgctgcataacggtacaggtatggggaatgattatatcggctggctggctttgccgacaaactatgataaagaagagtttgaaaggattcagaaagcggcaaaacaaattcaatctgatacggatattttgattgtcattggaatcggcggttcttatttgggggcaagggcagcaatagaatttttaaaatcacaaaattacaatgttcttccaaaacaaactcccgatatttattttgcaggcaataccatcagttctgcatctttaactgaattattgacaatctgtaaaggcaaacgcgtttccattaacatgatttcaaagtccggtaccacaacagaaccggccattgcctttcgtgtattcaaagattttttggaaaaagaatatgggaaagaagaagcccaaaaacgtatttattgcacaacagataaagcaaaaggtacgttgaaacaacttgcagatacagaaggctatcaaacatttgtggttcccgacgatgtcggaggacgtttttccgtattaacagcagtagggttattacccattgctgtttgcggagcagacatcacagcgttaatgcaaggcgctgcagatgcacagaaggaatattgcaatgagaatcttgcggaaaatccttgttaccaatatgcggctgccagaaatgtattgtatcgaaaagggaaagagattgaactgctggtcagttatgagccttgttataccatgatgtgcgagtggtggaaacaattgtacggagaaagtgaaggcaaggatcaaaaaggaatttttccggcatccgtaacgttttccacagatttacactctatgggccaatacatacaagatggaaaacgcacactttttgaaactgttgtattgtttgataagccaaagtatgatatattaatagagaacagtcccgaagatgtggatggattgaattttctacaaggcaaatcggtttcttatgtcaaccgaaaagcatttgaaggaacagtattggcgcatcatgacggcggtgttcccaatattgtggttcatgttccggatttttcagagtactctttgggatatctgatttatttctttgaaaaagcatgcgcaatttccggttatttactgggtgtaaatccatttaatcagccgggtgtggaaagctataaaaagaatatgtttgctttgcttggcaagcccgggtatgaacaggaaaaagagcagctggaagccagattaaagcaataagaagttcaatatgccggtcgtatccactttttgtggaaaaatataaaatgttttggggaggagtttcatcatgataactctaattattggtaaaaaaggttcaggaaaaacaaaaaaattaattgacgctgcaaacaatgccattgaaaacacaaacggaaacgttgttgtaatcgagaaggaatctcatcttactttggatatctcccatcaagcaagattagttgctcttgagccatacggcattcatggctgtactgcattctacggttttgtaagcggtatttgtgcaggcaactatgatgtaaaagaaatttttattgattctactttaaaagcagttgacgtacaagatttagaatgctttattaaaaatttggataaattggctgcttttgccgagaccaagattacattgtctgtttccatggatgagtctgaacttcctgcaggcgtaaaagatattgtaacttgtatctaattcagatagatatataaaagctgctgccgctgcatttacggcggcagctttcttatatacggtatgaatatgccatatagggaaagtataaaaagtgaacggctttgtactgcatcatttcgtataaaatttcttgttgacaaagctgctgcaaatggctataatattttagtaaagcgcaagaggtgttaactatgctgcttgatttaaaaaaattgtttgaaaatgaagaggagtgcattccttttcagtttgagctggatttatcggacacggaaataagcggtgtatatccgtttgtttctccggtgcaaatccgtggtagtgtgcaaaatacagcacaaaccgtttatatgacggcagaagctgattttgatttttccattccttgtgaccgttgtgccgaggatattcaaacacattatcacaattcgttcagtcatcctcttgtcatggagatgaatgaagaagaccaagatacctacattctggcagaagatggtaagttggatttggacgagcttttcagagcagatattttattggctttacctacaaaatatctatgtaaagaagattgcaaaggtttatgcccagtttgcggcatgaatctaaacaacagcagttgtcaatgtaataagcgtcagattgatcctcgtttggaggttctgaaacaactgatagattagttttaatttatataaggaggtgctgaacatggcggtaccaaagagcaaattatccagtgcaagaaaaaatagcagacgttccagcgtttggaaaatgagtgctccaactcttgttcattgcccaaaatgcggtgagtacaaaacacctcacgttgtttgcggcagttgtggtttttacaacggcagagaagtaattaaaaaagaggcttaatcagaaaattagtgtcttttttatttctaaaaatttaagagaaggagaaatccttctcttatttttttgcttaaaatacattgtcatccatgggaggtgattcaaaatgtcagttgtaatcaaaggaatagaacccgacagtcctgctcagcatgcaggaattcaggcaggcgaaattctggtttctttaaatgggcatgatattattgatattttggattaccgtttttatgaaaccaatgcccatttggaaattaagctttccgatgttacaggtcaaacacgtattgtttccatgaaaaagggccaatatcaatccattggtttggaatttgaaacatatttgatggataagcaacattcctgccgctgcaaatgtgtgttttgttttattgaccaaatgccaaagggtatgagagaaagcttatactttaaagatgatgattcccgtctgtcgtttttatttggtaattatgtgacgctaaccaatttgaaagaaaaagatgtacagcgtatcattgatatgaaaatcagtcccattaatgtgtctgtacatacaaccaatccggaattaagggtaaaaatgatgggaaaccgatttgcaggtcaggtacttgaaatcttgcccagactggcaaatgcgggtatccagctcaactgtcagctggtgttgtgtccaggtatcaatgacggggcagagttggagcgcagtttgactgacctaggcaaattagcgcctgcactgcaaagtattgccttggtacctgttggcgttaccaaatacagagaagggttataccctttacgtccttatacaaaagaagaggcaggtcaaaccattgatatcattgaccgttttggaaatcagtttgaacaggaatatggcagtcgtattgcatatgcttccgatgaattttatttaacagcggaaagaccgattccgaatccggaattttacggagatttttctcaaatagaaagtggagtcggtgcaatggcatgcttgaaagatgagtttttatatgcattggaagagcgtttggacggtcaggaaaccattgaaattccgaaaaggcatattacattggccacaggtgttgcggcttatccgtttctgaatgaattacttgacgaagtgcggataaaatgtaataatttaacttgtaatgtagtgccgattatcaaccatttttttggagaaactataacagtagcaggacttatgaccggcacagatattttatctcagctaaaagaaaaaacgctgggagacgagttattactgccggaagtaattttgcggcataatacaaatatactgttagatgacattacccttgatgatatcagtaatcaactgcagatacccattaagacggttatgaatgacggacagcatttgttacatgctgttctgggggagtgaaacaatgtctaaaccgattgttgccatagtaggcagaccaaatgtaggcaagtctaccttatttaataaattaattgggcagagactttctattgtagatgatacgcccggtgttacaagagaccgcatttacggagaatgcgagtgggaaaacagagtaatatccttggtagataccggcggtattgagccgatgtctcaagatgttattttatctcaaatgagaacacaggcacaaatagccattgacggagccgatgtcattattatggtaacagacgtacgcagcggagtggttgcaacggacgaagaagttgccattatgttgaaaaaaagcggcagacctgtcatattggctgtgaataaatgtgacaatgttggcgatgttccgcccgaattttatgaattttataatttgggtttgggtgacccgattgcagtttcttctgtccatggacatggaacgggagatttgttggacagagttatggaattggttccgcaggagcaggaagaggaagacgacggagaagaaattaaggttgctattataggtaaaccaaatgtaggtaaatcttctttggtgaataaaatatcaggtcagcagcgctgtatcgtttccaatattgcgggaacaacacgcgacgccattgatacggctgtggaaaatcagcatggcaagttcattttgattgatacagcaggattgcgccgtcaaagtaaagtccataaaatggatgataacattgaacgttacagtattatacgggcgcaaatggccattgaacgttctgatgtttgtgttattatgatagacgctacagaaggatttacggaacaagattccaaagtagccggattggcgcatgaggccgggaaaggctgcgttattgtagtaaataaatgggatgccgtagaaaaagacgataaaaccatgcaagaataccgtaaaaaacttgaagtggatttttcttttatgtcttatgctccgtttgtatttatatcagcccatacaggtcaaagaattgaccgattgtttgagttgattaaacttgtggcaaattccaatgcaatgcggattactacaggtacgttaaatgatattttggcacaagcgaccgcacgtgtacagccgcctacagataagggaaaacgtctaaagatttactatatgacgcaagcaagtaccaaaccgccgacctttatttgttttgtaaacgatgcggagttatttcatttttcctatcaacgttatttggaaaacagaattagggaaacctttggtttggaaggtacccctgttcgatttatcatccgcgaacgcggcgataaataggagggcacaatgctggaattgtttcaaacgtttgcgttgcctgtgttagcaattatgattgtatcgtatttgttgggcagcatcagtttttccattatctttacaaaaatgttcagtaaagaagatatccgtaccatgggaagcggcaatgcgggtactacaaatgtactgcgctctgttggtaagcgtgcggccatattaacctttgtttttgatatacttaagtgtgttatttctgtattgttagccaaatatatactggaatatatttgtgcagccagcaatgcacctttctacatagtaaattacggcatttatttggctggattttgctgttctattggtcacatgtatccaatctttttcaaatttaagggcggcaaaggggtcgttacggtggcaaccatggcagccttggctgactggcgtgtctttttggcagtcataggtttgtttattgttgtgtttgctatttggagaatggtatcgcttggttctgtaatagcggccggtacttatccgattgctacattttttgttaccttttttaccgattactatcatggtggaattgtgtccttaaaatatgtgctgattgttactgcaattactgcattgatgggcggcattgttatttttaaacacagaggcaatattgttcgtattatgaacggtactgaaaaaaaattatttggaaataaagaaaaagtttaaatatgaaaaaaacatccaatgcttagcattggatgtttttatttctgaataataataaaaaaagaagccgtaaggcttctcttttgttctcgtttcgcttttatgtgtcaatcagacattaaactgctgcggaaccggatactgcacgagtaactttgccggaacgcaagcaacgggtgcaggcataaatacgcttattggaaccgttaacaactgctcttacacgtttaatgtttggtttccatgttctgttggaacgtctgtgagagtgggaaaccttaataccgaaagctacatctttgccgcaaatttcacattttgccatgtatctgcacctcctttaaaagggctatttttcattacaacgttagtattctatcaaattcacgcaaaaattgcaagtgtttttcctatattctttcctataggttctgctgtcattaaaaaagtgtcataaaatagtgagtaatctttacattttatgtaagatgtaaagagcaccagtattgtgtttttgtcaataatatattataatactatgatacaaaggagtgtgtacaaatttgatcataagtgtattattgaatcactcgttaagttcatccgacaaattaagtctgattattccgcaaattattgcagtattaatcattctgtttttaattttgcctttgcatgagctggcccatggatgggttgcttacaaatttggggaccgcaccgcaaaaaatgcaggaagattaacttttaacccattggttagcattgacccgtggggtgcgctcatgattttattgtttggtttcggctgggcacgtccggttccggtgaatccaaataatttcaaaaacccgagggtaggtatggcggttacagccgcggcaggccctatttctaactttttggcggccttgataggtgcatttatttatgtatctgttttggtgggttcaggattcagtgtatctcagttgagttttggtatggaattgctatggacatttattgctattaatatttccttggctgtgtttaacttaatcccaattccgccgctggacggttctaaaattttagcatcttttttaccgcagagacttatggaacaattttaccgttatcaaggtgtatttatcttagttttatatgcacttatgtttacaggcgcgttaagcggtccgttaaactacattcaaaatgcctgtgctgacggaattctgtggcttgcacaattgccgttccatttagccggcgcgttataattggagaaattatggaaaaactatcctataaactgccctcttttgaagggccgctggatttattattatatttactttccaaacataaactggatatttgtgacattccgattgcagaattgttggaacaatacatgatgcatatggaagaaatgaagcagcaggatatggagatagaaagtgagtttttaacgatggcggccagattggttcatatgaaaaccatatctttgcttccgaaacatgaagagttagaagagttgcaggatgagctggtaacgcaattgctggattatcagcaatgtaaacggatggctcagatagtaaaagaccgtttggagttaggaacatttgtcagagcgcaaatgaagctgaaaaaagatttaacctaccgtggacatcacgatacgggggaattgttgacagcatatcaaactgcagtaggaaagggaaaacgttttttgccgccgcctatggaatctttttcagccattgttgcaacgcctactgtgtccgtagcctctggaatgattcatgtgctgcgctgtttatggaaagagcatgaagtaccttatacaaaagtatttgaacaagcggagagcaagtctcaaatggtggcaacctttttggcagtgctggagctggtaaaaggaaaacgagttcgtgtagaggacgaaaacggaagctctaaattagtgttattggacggtggtgaacggaattggaaacgcaaacacaaaaaggtgcaatagaagcgattatttttgcaagcggggaaccaattccgctggagaaaattgccgcagctatggagctgggtaaaacagaaacaaaagcactggtagcggctgttatggaagagtttaatcaaatgcatagcggcatacaaatcattcaaatcaatgacagttaccagatgtgtaccaaagccgaatttgaatctcacattcgtttggctttagaattaaaaaataacacaccgctgtctgcagcagcattggaagtattggctattgttgcataccaccaaccggtaaccaaagcttttttggaacaagtacgcggtgtggacagttccagtgtattaaacggtttatttgcaaaaggtctggtagaagaaagaggcagactggaattgcccggacgtccgcttttatatggtaccacgcaaaatttcttaaggtgcatggggctttcttctttggaagagctgcctgaggtgcccgacccaaaggatactgacgaacaggcaaatgaaaacgatgctgctgatgcggcagatgacaagcaattaaaactggaagatgtataaactgtaagaagaaaagggggtgaggccacatatgattgcactcattgtttcgctttcggtcatcggaggtatttttctgatttttgcaattgtattggcttgccctgtaattgtagatatacagtttaaagacagctttgttgtaaaaataaaaatattgggtatcccgattacggtttttcctcaaaaagaaaagacgcagtcggaagaacaaaaggtgaaaaaaaagaaaaagaaaaaacctgaagaagaaaaagaaaaaacaggtaaattttctaaaattaagggtatactagaaagtaaaggtctgtcgggattactggattttttcaaagagctggcgggcgttgcggcaggaacagggaagaagctgttttcgcatttggtgatttatcagctcttggttgatattgcaatttccaacgaagatgcagccaaaactgccattcaatacggacaggcttgtgcggttgtatatcctgccatgagtatgataacgactgtggcaaaatgcaagcaatctcatgtctgcgtcatagcagactttgatgataaaaaaacgaaagcagattttcgcttaaaagcaggtatgcgtccgatttttgtgttaacagcgggaatcagcgggctaattcgattgataaaagtataccgcaggcatacggcggacttaccaaaaacaacatctaaaggagcgtaatgattatgggaaatcatccaattgacggcatgcttggaacaactatggaaaaaattaaagaaatggtagacgtagattccgtaatcggaaaaccgattacaacaccggacggtactaccgtgattccaatttcaaaagtcagctacggatttgcgtccggaggttcagactttccggcaaaatctcagccggcaaaagatttcttcggcggtggcgcaggcgcgggtattaccattactccaattgcatttttatctatttgcaacggtgatgtaaaactcattcaagtagaaccgtttgaaggttctgctgaccgtatcattcagatggtaccggatgtggtggataaaatctctgaaacgttcagcaagaaaaaagaagagagagctgcaaaaaaggaagagaaaaaagcagcaaaagaacttgaaaaattaaaagaaaaagaagaataaaaatacgttgactcatactcggttaaccgcttgcatatagttatgctattggcaggtggttttctttgtttaaaaaatgtgttagtgtattatgtgttgcattgattgcggcagcaagttttgtgttgccggttcatgcacaagaaggctctgtttccgtgtcagcgcaggctgcggttgtcataaatgcggacaatggtcaggtgctgtatgccaaaaatgcagagaatcagcaggcaatggcaagcaccacaaaaattatgacggcgcttttgaccttagaagaggctgcgaaagagaataaaattgtaaccataagcgaacaggttgctgcggtagaaggttcttccatgtatttaaatgcgggtgaccggctatctttaaaggatttggcaatcggcatgttaacggtttcaggtaatgatgctgcatacggcgccgctgttgccatcggcggttcggaagaagaatttgcaaaattgatgaatgccagagcaaaagaattgggtatggaacataccaattttgtgacggcgtccgggttagatgcagatgagcattattccaccgcgttggatatggcaaagctgggagcagctgccattcaaaatgaggattttttagctatttgctccaaaacgcaaagtacggctacatttgtaaatcctcctcggacacagagttactccaatcataataaattactcaaactatatcagggttgtattggcattaaaacagggtttaccaaaaaggcgggaagatgtttggtttccgcagcagagcgcgacggtgtccgtttggtagctgtaaccttaaatgcgcctgacgattggaacgaccatatcaaactattcgactatggtttttctcagttatccagcatccgtatggatgagtccaatacaacctttacggtcgatgtggttggcggtacgtcggaccaaatagaagtaacaggcagtgacggaggcagtgttgtggtaagtgctgctgataaagataaagtggaacgtattgtattgctgccaaactttacgtatgctccgtttccgcaaggaacacaattgggaaaaatctcttatcagctcaatggcgaagagattggctcggttccgttggttacaacggcagcggtagagcaacagacagtggagcaggggatatttcaaaaaataggagatttctttagaaatctgtttggataagaaagaaaaaggtgaaagaaaatggcaaaagatgttaggctgcaaaaaatgcttgcggactgcggggttgcctcacgcagaaaagcagaggaaatgattgcaaacggtcgtgtgaaagtaaacggaagagttgctaaaataggcgataaagtagatacgaaaaaagataagattacggtagataataaaacggtagtcagcagtgtgcgcagtgtatattacatgctgcataaaccaagaggatttattacaaccatgagcgatgaaatggggcgtaagtgtgttgcggaattggttgcggatattccggaacgtatttatccggttggaagattggaccgtgattccgaaggtatgctgctgatgacaaatgacggagactttgcaaacgctatgacgcatccgtccatgcatattccaaaaacatatcgagttaccgtacgtccttccattacggaagaccaaatcacagagatgactgtcggtatgatgattgacggcaaaaaaacggcgcctgcgcaagtgaatgtcatttcacaggagcccggacgagtggtgcttgaaattattttatatgaaggcagaaaccgccaaattcgcaatatgtgtgaacaattgggattagaagtagcacgattaaaacgaattgcctgtggaccggtaaaattgggtatgctgcagccgggagaatatcgtcgtttgacggccgaagaagtaaagaaactaaatacagcggcaaaatccaataaaaatacaggagtagaaagcagggacggtcatgataaccgtaaaacctatcgaagataacataaggaaagagcagttgctttcccaatatcattgctctgcagccgacagcactatcttggtaatgaaagacggggtatgtgagcttggctatgcagcgatagatttgatacaaggaaaattgctgatacgtaatattttcctgacaaacggctcagcacaggagctcaatgcggaaaataaaatttatatcgattttctcatgcgtgctgcggcatcgtatggagccaatcacggtgcgtatcaaatggaaaactgtgtggaggaactgcattcattttttgtttccaaagggtttgttttggagcatggaatatgtaccattccaatcagcaaaattgtacaagtttgcaatccgcatcatacctaaaagaaagaccgaaagaagtttcttttggtcttttcttgccttttccgctttgtatagttgcaattgatttttaaaaatgataaaataatcatactattctatcacaaaaatcttatacttcttaagttttagcaaaagttgggatgattattttgatcaaaagcatgacaggctatggtcggtatgaacaaaccattgacggttggttgattggtgtagaagtaaaatcggtcaatcatcgttatttggaatataccgccagatttccgaaaggttacggctttttagaaaataaattaaaatcttttgtgcagcataaaattgcaagaggcaaagtagatgttaccgtaaccatagaacatgtttgcgatacacaattaaccgtacaggtcaatgaatctctggcgagaggttatgtacaggctttgaaaacattggctcagcagtatcatttaaatcaggagattgatgcggtttccattgccaattatcctgatgttctgacagtgtataaggaacaagaagatgaagaagtactgtggaatgcagtacagcaagtatctgaaacagctttttgtcatatgcttgaaatgcgtgagcaggaaggtgctaatttaaaacaggacttgctaaggcgtgcagatgatattgaccgtatggtaaaagaaattgaaatgcgttctccgcaaacagtagaagaatataaacaacgtttgcaggcaagaatgaaagaattgtttgcagattcggaatataacgaatcccgtctatatacggagctgatactgtttacggataaagtgtctgttgcagaggaaaccgtccggctgcgcagtcatattggtcaactgaaaaccatgttggaatccaaagaagctgttggcagaaaattagattttttggcacaggagatgaaccgagaggcaaataccattggttccaaagcaatggatgcgcaaattgcttatatggtggtagatattaaagcggaagtagaaaaaataagagaacaaattcagaacatagagtagcctttttacaggcaggaggaattaacaatgaagttaattaatattggctttggaaatatggtttcagccaatcgtttggttgcaattgtcagtccggagtctgcgccgattaagcgtattattcaagatgcaaaagagcgtggttctttaattgacgcaacgtatggtcgtcg

SEQ ID NO: 3835 - DNA, 7902 bp, Unknown
  16S sequences of unknown bacteria
ggtgttttcaatctgcttactgatgaagataagaaaaagtttgttcattttagagtgaatcaaattattactaagtatcgggagtttgtttcagcagacataccagatagattgcacgatgttattgttagtgagataaatgtttcccaatttaaaaatatgagagacctaaacaagaagataaaagatacctttgtcgcccatatcaaatcttgatttattaagaggtttatggtatatttgtggcaacgaaatggcaacaaaaaatcggatagcgtctgctttaccgataatacaaataatgtagatactatttgttaaattacccatacaaatctgtttaagattagtttatggggagcgagtgggaataaactgagaggtcgaagaaacccagtgtttatgcgcgtttgcggcgattcaatcggtcttttgataacaatttgataacagccatacaagagccattattcttgtaatccagtggtttatggattacagaatgattgacaggtggcttgtatggcgaaaaaatccatattagaaagcccttcgctgtgagtagttactcataactaagggctttttgttgttccttataaaaagaagaaaactgaacgattttacttgccgacgttgtcagctacgatttttttgcttctgacagtatgtttaccaattcgttggacgccgtatccataaaagcatttgttgaaaatctcttatctcttgaaacaatttcaacaattttctgcttcatatttcgagggcttacgattactctaaacggtacaccgataagatctgcatccgaaaacataatcccggcgcttactttacggtcatcataaatgacttcaacacctttattttgcagttcttcatacaacttatcagcataagccttaacctcagcattgtcagcacgaacagcgcaaatgtgaacttgccatggcgcaactgccaaaggccatatcggaccgtattcatcgtgatgagcctcacagatagaagcggccagtctgcctacaccgataccatagcaccccataatcggataccgtttttctccgtccttgtcgatataagtcatattcatagacttggtgtatttggtgccgagctggaatatattgcccacctcaacgccacgagataccgtgatagaggacttgccgcaatgcgggcaaataccgccttgctgtatcttggcgaaatcgtggtattccgccccttccacatcacggttcatatcaaggcctgtgtagtgatattcgtatacattcgccccgcaggaaagattgttcattccctcaagagaacggtcatacagaagtgtaaaattaccgtttagatgaatggggccgatgtatcctgcgttgagtccgctttcatcggtgataatcgcaggatgaatgtcataacccagataatttgtgagctttgtttcattgacctcaagatcaccacggataaacaatacgatataatggtcatcggaattgcgctgatacacaactgctttgcaggaagtcttctcatcacaatgcaagaacccgcatacctcctcaatggtgtgaatgttcggggtatgcactaaggtcagttcgtcggaaaccttgtttctttcgttatgaatgatacactctgccgcttccatattggcacggtaatcgcattccgtgcagatggcaatagaatcttcaccgatagaggtgatcagcataaactcgtgcgaaacattaccacccatcataccggaatcggaagcaaccgaaataacctcagggagtcctactcttgcataaatacgttcatatgccttatggcatttgtcataatactcctctaaatctgcctgactggtgtggaaagagtacgcatctttcattgtaaattcacgcacacggatcagtcctgctctcggtcttgcttcgtcacgaaacttggtctgaatctgatacaccataaaggggtatttcatatagctttgtccgtaatcacgcacaaggtgaacggcggcttcttcgtgtgtcataccaagcaccataggactcccgctacggtcattaaagcgagccatttctttgccgatgctttcgtatctgcctgattcttgccaaagaaaagcaggcataacaacaggaaactgcacttcctgcccatcaatcgcatccatttcttctcggatgatttgctcaattttacgagtgactcttttcaaaggcatataggaagaaaaaataccatttgctacatacttcatatagccgccgcgcaccattaaagcgtggctgtcaacaatacagtctgacggtctttctcggaaacgttctccaacaaggttttgaagcttcatagtaaggatacctccatttttgcttttgaacacaaaaaagccctaagccaacattacatcagcttagggcgaactataaacaagtccgtggtaccacctaaattcggatatgatccgcactcattggcacaggataattccgatgccatatctctgtaacgggagaacccggcgagacttactgttatttcagttcacagctcaaagatgggttgggcatcttttcaataaaggcttgcaccgaccgccttctctctgaaaatccaagatgcttactatttcttatcatagcttttgtgttcaaattttggaaattatatcacaaagtaatgagaacatcaaggtattatgggaaaatccaaaggaactagcaaaaactctctgattcgcgattatattgaattttctcaaaaatcgtttataatccctacatatcatctaaatattatccacggtaaaattattcttgttatcaagttggataacaaactgaaacattagcccatataggcaggattatctggatatgcaggaatgccttttccatttcacttaggatttcttgccttgcagatgtataatgaattatatatgaatgcagagaggataccataatgaacaatccgtggcatgaaatccgtctatctgattatgagaatcatatgagtctggattctgtcaaacagcttcagacgatgaacactatgatgaaaaaacagtttgagacgtatcccgtatgtacggcgatggtattgggtgttgctggtggaaatggattggagcatatatgcagaaaaaagtataaagcggtctatggcattgatatcaacgccgaatatctgaagatggtagtcaatcggtattcttcactggaaggtgtattgcaatgtatgcaaattgatttgattgaggaagcggataagttgccacaagcagatatgattattgctaatctgttgattgagtatatcggatatgaagtatttcaaaatgtcgttgggcaggtaaatccaaaatatgtatcttgtggaattcagcttaaccccgatcaagataattggatctcagattccccctatctacatgcatttgaccaattggatacactgcatcatcaagtagtagatgatgatttagagagagctatgatagaagttgggtatcgcacaattttttatgaaacttatgaattgcccaacggaaaatgtttgatacgaatggattttcaaaaatagaagatctgatttaaacacaacaaaaaagcggagcaaaagccccgctttttcatttgcaattattcttctgcaaaattgccagtataaagctgataatatttcccttttttctcaatcagctcatcatgcgtaccgcgttcaatgatacggccctgttccaaaaccatgatgcagtctgcattttttaccgtagacagcctatgtgcgatgacaaaagtcgttctgcccgtcataagcgcatccatgcctgcctgcaccagggcttccgttcttgtatcgatggagctggtcgcttcatctaaaatcagcacaggcggatccgccacagcggcgcgcgcgatggcaagcagctgccgctgtccctggctgaggttggcgccgtcgcctgtcagcactgtttggtatccatccggcaaacgttggataaagccatccgcattggccaatcttgccgccgccatacattcgtcatccgttgcatctaggttgccgtaacggatgttatccatcacagttccggtaaacaggtgcgtgtcttgcaaaacgatgccgaggcttctgcgcagatctggctttttaattttgttgatgtttatcccatcatatctgatcttaccgtctgcaatgtcataaaaacggttaatcagatttgtgatggttgttttgcccgctcctgttgagccgacaaacgcaattttttgtccaggttttgcaaataggctgatatcatgcaaaaccattttcttttcatcatagccaaaatccacatggtcaaatacgacgccaccttccagcctggtataggtgacagtgccctcctgtttatggggatgcttccatgcccataggtttgtgcgctcctcacactcggtaagctggccatcgccagtttcccttgcgttgacaagctcaacatagccatgatcttcttccggcttttcatccaacaaacgaaatacacgctgtgcccctgccgcagccataacgatgaaattcatctgctggctgatctgtgtaatgggctgagtaaagctcttatttaggcctacaaaagcaatcaatgtgccaactgtcagcccggcatagccgtttagcgcgagaagcgcgcctacaatagcacacaatacatagctaaggttgccaatgttggcgttgatgggcataaccaggttggcataccggtttgccttatcggcactatctcggagagcttggttcacctggtgaaagtctgctttggcctgttcttcatggcagaatacttttaccaccttctggccttccatcatctcttcaataaaaccgtccacaatacccagatcgcgctgttggttcgcaaagtatgtaccggacaaactggaaaagcgcgccgttacaaacaccataacgcctgctataaccaaagccatcagcgtcagcggaatattgagtatgagcatagatacaaacgtagaaataagcgtcaccagagaattgataacctggggaatgctctgccccatcaactggcgcaacgtatctacgtcgttggtgtatacggacatgatatctccatgggctgtggtatcaaaaaatttgatgggcaggctttccatatcgctgaagatatcgatccttaaacggcgcattgttccctggctgatgcctaccatgatgcgattgtacgcaaacgccgcgatgacgccaatcagcataacggcgccgacttgaatcaaattgcgcaacagtggcgcgaaatccggcgctgcgcttgccagcatcggcacaatatagtcgtctatcaacacttgggtaaacatcatgctgcgcaccgttgcaaatgcagagacaatgataaacaccacaaccgcacagaagcgaaatttatagtatttgagcatatagctcatcacacgcttgagtacagacatggaatcacgcatagagattctctttttcatcgcttaattcgcccccttttccggcataggatggtcaaaatctccgccgcctttgatttgggattcatagatttcttgatagatggcattgccctccagcaggttttcatgggtatcaaacccattgatcctgcctccatccagcactaggatgcggtcagcatcctgcacgctggaaatgcgctgggcaatgatgattttggtggttcccggtatcttttctgcaaaggcctttcggatcttagcatccgtagctgtatctaccgcgctggtagagtcgtccaaaattaacacttttggttttttcaatagagcgcgtgcaatgcaaagccgttgtttttggccaccggatacattggcgcctccgcgtgtaatatacgtatggtagccatccggcagccggtcgataaattcgtcggcacatgccgcccgacacgcctctatacactcctcgtccgttgcatttggatccccccatctgaggttttccaaaattgtgccggaaaacaaaacatttttctgcagcacaacggatacctgattgcgcagcacatccatatcatacgcgcgcacatcctcgccacctacgcgtacacagccttcatccacatcgtataaccggcagattaggtttaccaggctgctcttcccgctgcctgtgccgccgatgacgccaatggtttctcccgaatgtatatgaagatcgatatccgtgagcgcttttttcccggtgccatgcttataggaaaagctaacatgatcaaaatcaatgctgccatcctttacctgcatcaatgggtgctccggattcttcaggtccggcgtttcttggagaacctctacaatgcggtggatgctggccatactcatgctgatcataacaaagatcatggacagcatcatgagcgacatcaacacagacatcacgtagctgaacatagaggtcaattcacctgtggtcatggtgccaatgacaatgaacttggcgccgaaccaggaaaccgagatgatacagccataaatagccagcatcatagcagggttattaagggccagcagattctctgcttttacaaacaggcgatatacattgtaagcggcctttgagaatttctttttctcatattcctcccgcacaaaagccttgacaacacggatcgccgaaacattttcctgcacgctggcattcaggtcgtcgtattttttgaataccacgtcaaaaaccttcatcgccgccttcatgatacagcccagcaccaccgccaaaaacaggatcgcaaccaaaaagatcaagcttagatcacggttgatggtaaagcacatcaccatactggaaaccagcatcagcggcgcgcgcacagcgatgcgcagcaccatttgataagcgttttgtacgtttgtaatgtccgtagtcatccgcgttaccaatcctgccgtgctgaatttatcgatgttggaaaaagaaaaggtttgaatattgctataaatcgcttcacgcagattggcagctaccccagcagaagcgctagcggcgtacttccctgctagcgcgccgaatgccaaactaaaaaaagccatgaccagcatgacgattccgtattgatacacagcctgcatattgccggcctgcaagccgttgtctatgatctttgctgtgataaatggaagcaacacttccataaccacctccaaagcggtaaacagcggtgttaaaatggaatcctttttgtattggccaatgtattttacaatggtcttcattgctcacaccttctttactagtttttcaagatacattcaacagcattttatgctgcacgctttgcaatgcgcgcagctcttctgttttcaggccgctgcaaattttggtttgcagctgtgccagcgtctgccctatgctcttacccagcgcctggccctgcggcgtggcaaagatcagcttttgcctatcatcattttccgcatttttagtatatacatatccctttcctttcagcttttttaccaatgcggaaatcgacggctttgatagacccaacacacgatatatctccgttgcgcacaccccttgctcgctatgctccaatacatacgccagcacctgtgcctgggcagctgtaagcccatgcagagcagccgctcggttgaaacatgcctctagccggatgctgagctgtctgagcgtttgcaataggctgcggaattctacggcagacatcatttttcacctctcaatggttttggcccgaatagttttgctgtatacattcttatacatcatctccgcttgaatgtaaaattcaaatatgttattatcgataaaaactttttatagaaaataataatgtttttattttaggagtttctt

SEQ ID NO: 3836 - DNA, 9243 bp, Unknown
  16S sequences of unknown bacteria
gcggattattgcctggctcaggctccaccggggctataccggcggcgaccggcggttctaccgcatctgccgggaacaccgcctgatcatccgacccaagcgccgtccaaacaggatcaccaaagctgaccggcaggcagaaaaggcggaaaacctgattaatcgtgactttaccgctcaaaaacccaatgaaaagttcctcacagacatcacggaggttccatgtcaagatgggaaactctacctggcggcagtactggactgcttcgatggcagtatccagggttcctatatggacaacaacatgagaacagagctgtgtgtacaggccctagagaacgcctcccgcaacacgaatatcgagggggcgatccttcactccgaccggggcagccagtttaccagccaggtgttcctcacggccctccggcgtcacaagctcattcagagcatgagtgggaccggccgctgctacgacaatgcacgtatggagagcttccttgccacattgaagaaagagaagctctaccaaatggacacgaccaggatgagccgtgatgaagtgaagagcgtggtgtttcggtatatccgctacgataacttgcgccgcatctcctctgtcaccggcggccttccaccgttggtctatagagagcgctacctgtgctctgaggtaaagactccgacccgatgaaatgtttccagtacgaagctttcctggcagttagtggctaaactttttttgacaactccagatggaagatttggaccggagcatccagcgcatctatgaagacaatgtgctgggcaagctgtccggcagtcggtacttaaaattatctcgccaatgcgagaaggcgcaggcagagattgagcggcttgccaccgtaatggaacgggaaattgaggcacaggtcggaaagatttccgatgtgaaggagtttctgaagctggtggacaagtacctggatatttcggagcccgacgctgtcattcccaatgagcttgagagcaagatcgtggtgcatagcccggtaagggagaatgaagaaagcaggtgcgaatcgacctgcatttcacctatgtggggcaaatccgcatccccttaaagattggaagggagtccctagacgaatcggaaccggcgtgacttaacacgccggttcctaccaaaattcttttttacttccttatgggacgctgcctaagtgcaggggcgcgccttttcacgtccttcgcggtggtttgtctgcgctccgcagcgcgcggcgcaggagcagaaagcccgcggcgctgctgagcaggccgctagcgcccgtcagcaggaacatcaccgccatgccgctgcccgcgcccgtccccacggcgcgcgcaagcgcctgtgcggcagcgccgcccgccgccatgagcggctcaaagacgttgtccgcaaggaacccgcccagcaggagtcccgcggggatcgaggcgtactgcagcgcgttgcgcgcggcgaacacgcggccctgcagcgcctccggcacgcgattgtagaggacgtggaaatagccggagtccaggatggggatgggcacgctggcccccaccgcggccacgccccaggccagcggcgtttgccccgcgcccatgagcaggtcccccagggcgaaggacagcgccgccatgccgaagatccgcgcggaaacatgccggggcggcggcaggcgcaccgcgatcaggccgccgacgatgccgccaacccccaggatccccgtcacgagcgccagcacctccgcactgccgctgcgcgcaaggatcatgggggagagaatgttctcataggagatgcgcgagaagaaattcagcgcggagatggacaggatcagcgtcagcaccacgcggtcgctgcgcaggaaggcgaaaccctcgcgcaggcccgcaagcggggacccgctgcacagccccccggcgcgcagagcgcattcccgctccggaatgcgcacaaagaggagcagcgccagggctgccgccacaaacgcggcaaggtccgcggccagcaccgcgcccatgcccagcgccgagagcaggaaggccgccagcatgggcgccgcaacgcccacggccgaggcggagatggactgcaggccgctcatgcgggagatcttctccttagggacgagacggccgctgaccacggcggacgcgggcgactgcagcgcgttcatcaggcccgtgagcgcgttggccgcgtagacgtgggcgacctccagcctccccatcgccagcaggacggccacgcacgccgtgcaaagaaaggccaccccatccgccaggaggagcaggcgctttttccgcgcgcggtcgacaatgccgccggcaaagacgctcgccgccacatagggcagccaggtgcacagcgtcagcagggagacggagagcgcggagcccgtccgctcgtacacccagagcacgagcgcgtagctcgtcatggcgctgccgagctgggaaaggctctgcgtgagccaaaaggccaaaaaactgcgaatcgatttggaatttgacgggttttgcatggaaaaacactcctgattttttgtttgaatgtccttttccatgcgcgacggacaaaaaaggcgttgctctgtacatgggctgtccgtcaggcacggattgtacagagcaggccgctcaaatcgatcacgcgatcgtgcagaagcaccatcgccttccccctcctttcacaaggccatgcgggttcctcagagccactccggccgcatgaggatgtccagcgcgatgcgctcgccggtcaggtccgccgggagctcgggcaggagcgagcgctccgcgcagaggtagcgcaccggcagctgcaggcgcgcgctcacctcgcgcaggagctcctccccgcgcgcgaggtcctcgccctccgtctgccaggagacgttcgcgttgttgagaagggccgtgggcgtcaggcgcgaccgccccgcgacgcgcagcagcaaatcgcagaccgagtccgcgtcgcccgagagcgggcggaacgcgttgaccacgaagagcacctccacgtcctcctggtcaaagtagggcttgtactgccccagcgccgccgcgcccgtgtcgtccccgcccacgtcgaagatcacgcggcggctcttgtccgcaaagaccgcctgaatctccgccggcaggctcggcacgtccacggtcgtcatggcgaacgagggcgcgtagacgcggatgccgtgcgcctcgagcagatccgtccgctccgaggagcgaaagtaggggttgacgatgtccaggtccacgagcgtgacctgctcgccccgctgcgcgtacttcagcgcgaggttcagcgagatctccgtcttcccgctgccgtaattgcccacgaccacgacaatgcgggccgtgggcaggttttcctgtcgattttcctgcatagcgttaacttcctgcttcaatttccttctccgttctcggtgggttcgccgcgcctgcgcagggtcgtgggctccgcgctgcggggctgcacttcgtccggccgcacgacgatgggcgcgtcctcgtccaggggttcaaagatcggctcctcccgcgcagcgggcggcggcgtcacgatctggccaaagcgccgcgcgccctcggcggcgcgctccggggccctgcgcaagggctcgtagaccgtctcccctgccgtcccggcggtccgccgctccacaggcgcaggccgcgcaggggatgccgcccgccgggtgccggacgccggctgcgagccagaccctggcaacgggccggacgccggccgcggaccggacgccggctgcgagccaggctctggctgcggaccggacgccggctgcgagccgggctctggccgggggccggacgccggccgggggccaggctctggccgggggccaggctctggcggcggaccgaccctgggcgccgcgttgggattgtacttggcccccgcgcgatggatgacaggcccctccgcggaaggaccggcgtcctcggaggccgcctccttcagggccggcgcgccaaagtgcgccgtcaggaacgcgcgcagcgcgcggtaccgccgccgccagcggtcctgcggccggtccagcagcacgtaaaagagctggtccagcgcaaagcccaggacgaggatgacgatcgcgaccgcaagccagtggtgcacgaggaagccgaggaaccccgatgcagggagcaactcgtcgctcgagttcaagagcatgtccagcaaagcgttccctccttatcgccggcctcaggacgcggcgtcgatgcgcacgatgaccttttcctcgctgaccagctcgtaggcgtagtccacgtttgcgcggatggagacgctcaccggcacggcgctgtccgccatcgcctcgtagcccgcaaggtccacgtagacggagatgtcgtcgttggtcaaccgctccagcgccgagcgcgccatggtgaccgatacgtccgccgtcacgtcgtaaagctccgcctgcaggcccgcggcaaggttgcggtacgtcaccgggaggccggtgaaggtgcgcgtctcctcctcctcgcgcacgcggaccacgacgtccacctcgctgaccgaggaccagacgacctcgccgctgagcttgagcggcagggtcgtggtgaaggacgcgctcacgccctccaggtcgatcgtggagacctggacgctgtcgatctcatccagcacggcctgcggcgcggcgatgcgcacggtcgagggcgcgacctcgatgccctccagatagaagccgtcgcgcagaaggcccgtggtggaggattcgtaggtgatgggaacctccttgatgggatagaccgggatggagaccgagaccgaattgccgatggtcgaggtgatgttggccgactccacggcctggccgttctcgtccacgagggtgtagaccaccgagcggttgaagtccgccgtaaggttcgtcaggtccacctcgaccacggccgccgcaacgcggttgacgtccgtctcagggccggtgatctggaactgcgagggcgtggcgacgatgctgcccaggcggtagttctccgacagggtgccggtggtggtgacctgcacgggcacgacggaggtcgtgaggctctcgacaaccacgtccacgctgctcacggacgaggacgtcgcctcgccgtagacggtggtcaggttcacctgcagcgaatagtccccggtcgtcgtgatgcgcgaaaggtcgatcgtcgcatggacgttgtcggtcgtggcgcggctcaggtcgttcatcgggacttccaggtagacgtccacggtcgagggcagctcgtcgctctcggtcgcaagggacaggccgcgcgcgttgagctcggtcaggcccgtgatctccagcggcacgtcgtagacgacctttgtgcggtccggattcgtctgggacatgaccatcgcccagaggatgatggcaaacaccagcgagaggagctttaggaagggattgcgcgcaaggcgccgcagcagcggcaccttctgtacctttttcttgagctcaccgagctttttgcccttctgctccggggctgcttcgcggttttccccgcggggatcgttgttgatgccgctcatttcttgctcctccacttggtcagcaccggggtcaggaccccgctgacgctctccttgtccgggtcgtagatgccgtgcagcaccgcgcggatggcctcggcgtccatgtgccgcgtgagcttgccgccccgcgccatggacatggtgcccgtttcctcggagacgacaagggaggtcgcgtccgtgttctcggtcacgcctatggccgcgcggtggcgggtgcccagctgcttggagatggagttctcctccgtaagcggcaggaagcagcccgcggcgacgatgcgcgtgccgcggatgaccgtcgcgccgtcgtgcaggggggtattgggttcaaagatgttctccagcagcggagccgagacgatggaatcgatggggttgcccgtctcgatgatgtcgcccagggccgtcttgtgctcgacgacgatcagcacgccgaccttgcgcttggagaggtcctccatgcagcggatgatctcctcgatcatgcggttgacctcgtccgcatccgtctggtggtgcatcttgtccacaaggccggtgcggcggccgatcttctccagcgcgcgcctaagctctggttggaagagcacgaccagcaccaccgcgcccgcatccataatatagcgcagaatccagttcagcgcctgcaggcggagaatatccgagaggaagtaggcgacaatgatgatccccacaccctttaggacctggttggcccgcgtctcccgcgtgagctggagaaggttgtagatcataaaggccacgatcaggatgtcaataatatcgttgatcgtaagcctctccatcgtgttggcccaaaggacctggatttccgtcagcaatcggtccatactcgcacaccaccccgcatctcttctcaaatccagcggcgcttcaaaaaagcacggcttttctccccttcttctctattataaaccaaagacggagaagaagcaaaggctttgttccctccgcccggcgccgttttttgcgcgcctcggggaaggggggccgctctttgtcctttgcgcgccgcaaagtccgtaagataaacgcgcgggccggaattcgtgttgcatctttcgccccaatgcgctacactaataggcgcaaataccaaacagggggtgcaacccgcatgaacaaagaaaaagtcctcctcgataccgatatcggctccgacatcgacgacagcgccgcgctcgcctacctgctcgcgcaggagaagtgcgacctgctcggcgtgaccaccgtctcgggcgagcccgtgcgccgggcccagatggtcagcgccctgctgcgcgccgccggccgcagcgacatccccgtctaccccggcgcggcgctacccatgctcacggacctcaagcaggcctacgcgccccaggcggaccgcctggtgaactggccgcacgacacggagttccccatgggcgaatacctcgacttcctgcgcacgaccatccgcaagaacccgggcgaggtcacgctgctggccatcggccccatgaccaacgtcggcctgctctttgccatggacccggaaatcccctccctgctcaagcgcctggtgctcatgaacggctcctttgagcacaagctcgccgtgggctacaacgagtggaactccctgaacgacccctacgccacggccatcgtctaccgcggcaaggcgccggtccaccgctcggtcggcctggacgtcaccatgcaggtgcagatgcgcatgcccgaggtgcaggcgcacttcacccacccgctgctcaagatcgtcgaggacttctcctccgtctggttccagaacgcggacatcatgaccttccacgacccgctggccgcggtctccatcttcgagccggacgtctgcggctttgcgcgcggcaaggtcgagattgagctggcgtccaagcagctcatgggcgtgacgcacttcacccgcgaccccgccggcccgcacgaaatcgccgacacggtcgaccccgcgcgcttcttcgactgcttcttcggcgcgttcgccaaggcatgatcgtcctggaccgcttttccggcgaggaggccgtgctcgtcggggacgagggggccttccgcgtgccgcggtcggccctgccgcccaatgcgcgggagggcgacgtgctcgtgcccgcggacgggcgctacctgccggacccggcaaagaccgccgagcgccgcgccgcgatgcgcgcgcgcctgcgccgcctgaccggccaaacgcaccgcaacccatagcgcaaaccgcccccgttccgcgttctcttgcggagcgggggcggtttaggcggcgtgtacgcctccggtcgagcgtttgggcctgcttcgccccgagccgccgttggcggttcggggcaagggggggagaggcgggcgaaaggccccctttccgggattcggtgcgccgcatgtctctcgaaaccatgcagcttgcatggtttcgaagcgtgtcggcacgcgaaaccgcccccgctccgcgttcttctgcggagcgggggcggttttttgcttcaccgcctgtcccttgccaggatcgcccagatctcgacgtcgacgtattcgcccttgttgtagagcttctgccgcagcagcccctcccggcgcatgccgcacttctccatcacccggcccgaggcgcggttgcgcacgtcgaacatcgcctccacgcggttgaggtgcaggcggacgaaggcgaactccagcatcgcgcgcagggcctcggtcatcaggccccggccccagtattcctgggccagggaatagccgatctccgcgcagttgtgctcgtcgtcgatccagacaaagccgatggtcccgaccacgcggcccgtctcccgcagctcgatggccaggctcgccggctcccccatgcggtaggcgcgcagcgcgctgcgcaccatggagcgcgaatccgcgatggagcgatgcgcgtcccagagcacgaaccggctgacctccgggttttggctgaaggcgaagatgtcctccgcgtcgccgatgccgagtttccggatgcgcagccggggcgtctccatcggcgcaaagacgtcgtaaaacccgttgtgcagcatgggacccaccgccctttttatatgggattcccatattgtaccacgatcgggccctgctttgcaacctcgacgcgctccaggggcaaaagcgcgccgtagcgcagcaccgcccggtccccgcagcgcaccgtcaccccgagggcggcggtcttgccgtcgttgcagacaaagcgcacgccgcccgcctcgtccacccgcaggcttgccgcggggaagggctgcgcggcgccgtcctcgccgcgcaggggatagtaggcgtgggcctgcgcgatgagcgcgccgccccgccaggcctgcgcccgcagcagcagcccgccccggcagtcccagggcagttgcgcgcgcagcgcgcccagccggttcaccgcctccgacgcgccggtcgcaaagctccgctgcgcaacgggcgtgccgtccagcaggaagagctcggcgcgcaccaccgccgcgccctcctcccccggctggagcagcagcagaatctccgccgcaaacgcctgccccggcagcagcgggccgcgcccgcccgcgatgtggatg

SEQ ID NO: 3837 - DNA, 4558 bp, Unknown
  16S sequences of unknown bacteria
ccggagacgtcacgagccttgccgccgatctcggtatcgctgtccatgagagaaaaaagctcgacggaagcggcatggcgccggtcgagacggacgatttctgccactttctcgctaagttcgacaaaggagcgtcggcgaccttctcgataacccgcgcggcgttcggcaacacgaaccagatacgcgtcgaggtctacggtgacaagggcgcgttcaggttcgatctgaaccacccggaaaagctcgagtattacaccggcggcataaaggaaggacacgccatcgagcacatggagacagtcgaggtgcccgaagagttccgcaccgttcagatgcagtgctacgtcgatctgctccacggaaacccggaccgctacataccgacgcttgaggacggagtgaagctccagagagttctcgacgcgatcctcgaatcggacgaaaagcggcagtggatagatataaaataaccgcctgaaaggaaatacatcatgaaaccgatcaccctcacctacgacaaagaaagagacctgaagctcgacctttatatgccggaaaacgagaaaccgaagctgttcatatatatgcacggcggcggtatcacctccggttcaagggacgcgggaatacgcttcgatatgctcgtgtccgacggcatcgccgcggcgtctctcgactacaggatgtatccggacgcgaagtttccggacttcatcgaggactgcgcgagggcggtcgcgtttctgaaaacagagcttgaaggaaaaatcagcggcatatatgtcggcggctcatccgcgggggcttatctctcgatgatgctgctgtttgacaaacactatctcggcgcttatggtatcgacccgtttgatatcaacggatgggtgctcgacgccggtcagcctaccgtgcacttcaacgtcctcgccgagcgcgggcttgacccgaggcttgtcagaatagacgaggcggcgccgctctggtttgtcgacgaaaagctcgtgccggaaaacagaaaggttcccgatgtcctgataatctcctcagagcacgacatggagtgccgcctcgaacagttacggctccttgaagcgacgatgaaacacttcggctggccggaggacaggctcaggttcaggtacatggaaggttactcgcactgctcatacatcggtgaaccggtatttgccgaactcatcgaaagtatcgttaaataaagagaacagccgctcgcgcggctgtcttttcatatcacggatttcatgatcgcggtgaggtttgaggctatagtctcgactcccctcggcgacgggtggacgaggtctccgctgagcccgcgcgcgttcgggaggatgttcagaccgtttatgtagtgtaagttcggcagggcgagctcacagacgacacgcttcagtatcgcgcggaatctcccggcgtgtccgccgcctctgaggtcgtcctcgcagaagaaaacgtctatcgctatgaccggcttctccgggttgtcgccagcgattctcttcagggcgtatctgacgcgcttctcgtattcctccgggtccatgccgaggatatttatgcccatctcgagcaccatgaccgagaaattctgccccgcgagccagtcggcgatttccggctcaacccggcagttgcccgcgtatccgcagttgcggtaatccattccgaagttctccgcgaccctgacgacaaagctgttcgccgggagcaccgagagactgccgtgagttatcgacgagccgtagaaccacatcgtcttccgaggcgccatatcccgcgccggaggctcaatatcaccctcggctttcacataaacgccagtgcccgaccgtcgagacgagccgcaccatgcgcgggtcatagagcatatccggccatccggagaatatcgcctcgcggaagctgtctgacggcgccggaacctctatcgtgtgctctccgggctcaacgaacttcctgatatgctgccagcccgccgtcaccgagccgtagaagactgtgaacatgagcggcgtgtcggggctctcgtttatcagcgttatccgcgcgctgccgccgtttatgacgaagcggagctctgttccggtcgcgccgcggttcatattgacgccgccctcactgagatgctcctcgagagccgcgggagcgcggtggagaacgtacgagccgtcacccgcgtcggtgagctcgtcgacgccgtggaattctatattatcgaatatcattttctgccatcctttcataccgtgcgatctgctgatcgaccttacggatattatatcatataactccggattttgcaagtattctgaaaaaatgtaccgttattttactttttgaaacgcaatttctcactgctctttaaccatatgtaaaatctgacggagctcttgacaacagtttatttctgtggtaaaatatagttagtctcagctaacatgattgtgatcatgcctgcggacggacgcctgaccgcgacgggaaacgatttttcgcgataatacctcaaaaaagtctttttggagtggattttccggggcggtcatgatataattataattaaaataaaatcgcaaggaggaaaacacaatgggaacatggggtaaaataggtcttttcgtgggcggtctgctcttcggcacagccggactgaagattctctcgtcgaaggacgcgaagaagctttatacgcacaccaccgctgcggttctccgcgctaaggaatgcgtcatgaagaccgcgaccacggtcaaggagaacgccggcgacatactcgccgacgcgaagaagatcaacgaggagagagacgccgaggctcccgagacagtcgaggacgcttcggaagaggctccgtgctgctgctctgaggacagcggcaaagaatgatccgcagaccggcgtgagtcggcaggccgccgggagacaatcatttcccggcggtttctttgccgccgcgcacatatatcctatggaagaaacaaagctatgaaattcacgatactacacgattcaaacggcagaatgaggatccacgccgcgaaaaggcacatgacccttgaagaagccgatatactcgaatattatctcagaagcattccgggcgtcgggaaggtctcggtctatgaccgcacctgtgacgccgttatatactacacctgcaacagggcaaatctcatcgacagaatagcaaaattccgcttcgacctcgaaagcgcgaaggcgctcgtccccgcgaagaccggacgcgcgctgaaccgtgagtttgagaacaagctgctcgcggcgcttgccgggcggatggtcagacggttcctgctgcctctgaatatactcaaatacataacgattgtccgctcgttcaagtacatcctcaaagggttcaagtgcctgatgaagggtaagatcgaggttcctgtgctcgacgcgacggcgatcaccgccgctatgctgacgggcgacttcggaaccgcggcgtccatcatgttccttctcaggatcggcgacatactcgacgagtggacccaccgcaaatcggtgaacgacctcgccggggcgatgtctctcggcgtcgacaaggtctgggtgaggaaggatggagaagagatatccgtacccgtccattctgtgtccgcgggcgacgagatcgtcgtcaggaccggcaacatgatcccgctcgacggcagagtcgtgtccggtgagatgacggtcaaccaggcgtcaatgaccggtgaatctgacgccgtgccgaagtcggagggcagtctcgtctacgccggaaccgtcgtcgaggacggcgagtgcgtcgtcagggtcgagaacaccgccgggaccggacgctatgaccgtatcgtgaaaatgatcgaggactccgaaaagctcaaatcagagactgaggacaaagcgtcgcaccttgccgacaagctcgtgccgtacagcctcgcggcgaccgggataacttaccttctgacaagaaacgtcacgaaagccctcgctatactgatggtagacttctcctgcgcgctgaagctgtcaatgccgatcgcggttctctcggcgatgcgtgaggcaagcacgtatcacatctcgttcaagggcggaaagtacatcgaggcggtatccgaggcggacacaatcgtcttcgacaaaaccggaaccctgacgcacgcgtccccgcatatcgccgggatcgaggtcttcggcgggcacgaggagaacgacatactgcgcgtcgccgcctgccttgaggagcattacccgcactcgatcgcgaacgccgtcgtgaaggaagccgccgcgcgcggtataaaccacgccgagtgccacacgtcggtcgaatacatagtcgcgcacggaatactcggaatcgtcgacggcaagcgcgtcgcgataggcagtcaccatttcctgtttgacgacgagaagtgcacaataccggataaggagaaattcgacgcgatacctgacgagtactcgcacctctacatggcgataggcggcgagctggcggctgtcctgctcattgaggacccgatac

SEQ ID NO: 3838 - DNA, 4288 bp, Unknown
  16S sequences of unknown bacteria
caacttgcagggcgagaagtattttccccgacgtatgcgctgcatgggttcgacttagccaatcgcgctgcgctgcgcttgtgctcttggagtctcacccacttgccgccggggaaaataattttgactttatttgcgccgtgcgcggcgcaaactctgcgaggctttgttgacaacctaaaaagcagtgctggggcgttatgctccagcactgcttgtagttatattttattcagtacacttttgtgcgccgccaaaaagcaggcgcttaccttgcatcaaggctcgatctcgtcgaattcaaattccaggctctcgccgcacttggggcagctcgtttcgccttcgagaagggtgttctcatcgacgacaacgacctcgccgcatttcgggcaggtcacctcgtactcggggttctcatcgtcgaaatcgtagtcatcgtcgtcctcatcttcgtcgtcgaaatcgtaaagatcgtcatcgtcgaagagctcgtccatgcagtcctccaggctgtcgaggacttcttcgatctcgtcgagctcgtcagaaacagcgacagcgttttcctccagcgcctggatcttctcggccatatctgccagcagatcgaccacagcgtgaagcaccttgccctcgttcgtctcggtgggcagctgcataccctccatcaggccattgatgtaagcggacttttcagaaagtttcatgggatcaccctcctccggtgtcgtcatggtttggttgcggttctcgtgaaaagcttattctggaagcttatttcgcgcggcccaggtattcgccggtgcgggtatcgacctggatcttttcgccctcgtcgatgaacagggggatcttgatctctgcgccggtttccagcgtggcgggcttcagggtgttcgtggcggtgttgccgggaacggccgggtcagaggacgtgacgaccagctcgacaaagttcgggcactcgacgccaaagacattgcccttgtgcgacaggatggtgcagacctcgttctccttgatgaacttaaaggcgtccggcaggatgtccttactcagggggatcatgtcgtaggtctcctggtccatgaagtaatagagatcgccatcgttgtagctgtattccatcttcttgcgctcaatgaaagcttcttcaaactttgcagtcgggttgaaggaagtctctgtcacgccgccggtgatgatgttgcgcatcttggtgcggacaaaggctgcgcccttgccgggctttacatgctgaaattccacgacctggaaaatcttgccgtccatctcaaaggtcttaccgtttctgaactcacctgcggtaattgttgccatatctattcctccaatgtgtacaatgtgtagtttcgcccttcttgagcacaatatctctttttattttactacatcacccgtacgattgcaagcatttctcacaaaataatcagctccttcgggctttttgtgatatccttgcagccgttttcctccacgatgacaacatcctcgatgcggacgccgaattggccgggcagatagatccccggctcggcggagcagactgcgcccgccgggatattgcccgcgtagctggggctgcaattgggtgcttcatgaatttcaatgcccaggctatggccgtagccgtggccgaagtacgcgccgtacccggcgtccacgatcacctgccgggccgcagcgtcgatctcgcggccgggcatgcccgcatgggtcgcagcgataccggtcagctgtgcctgcaaaacggtgctgtagacctcccgcatctggggcgtcacatggcccagggcgacggtgcgggtcatatccgcgcagtagccatggtattttgcgccaaagtccaaggtgataaaatcccccgcctgcagctgccgctgcccggcgacgccgtggggcatactggtattggggccggagacgacgatcgggtcaaaggccaggccgtcggcgccgttttcatacagggcagcaatgagcttagcgtagagctgcttttccgtcatccccggggcgatctggccgcagatctgggtgaaggcagcgtcggtgatgcgctgggcctcgaccatccgggtcagctcccaggattccttcgaatggcggcagctgtcaagcatctgctgggcaaaaaacagcgcgatatccagccgctttgtaagcttttcatgctccgcgacggtcatatactgctcttcgatgccgagctgggtgattttcttttccgccacgagggcctgcaggtagtccagcgcactgtgggtatgatccgtctggcgaatatcgcagtccggcagtgcgcggtgggcggcttcgatataacgggagtcggtgaaaaagctgacgccgtcctggcagacgacggccatagattcgtcgatatccgcaccgatgccgtaaaagcggttcgtgcggctggtcagcagcagcgcctgctgcgggccggtcagtttttcctgaaatttctttaaattcgcgtgcataatgctttccttcctttcgcggcaagaataaacggctgctccgccacatggcgcagcttgagccatatcgtatgattactgatcgcctgcaccaggatcggcagggccccggcccggtttgcgcccaggacatccgtatagatctggtcccccgccagggcggcgtgctccggcgcgacgccgtagcgggccatgcaggcgcgcagcaccttggccgagggcttgtgggcgtgggtcataacgtccagcccgtaacgcttcgcaaaggtcacgacccggggctttttgctgttggagacgatacagagctggatcccagaggccgccatttccgtcagccaggccagcatttcctccgtaggctcgtccgtcgtatacgggacgatggtattatcaaaatccagcatcagcagcgcaatgccccgctgctgcagcagctgcggcgacaggtccgtgaccgtgcgcgccatgatgcgcggcaaaaatgaaaggctcatattctctcccggcgacgcatagggtgataccggaccggcagacagcccggcggcagacgtcgccatgggcattatagcagattttccgtccggacgcaaggaggcgatgcggcttggggtgagagaatatatcgtcgttccgccgggccaaacgccgtccccggcggccgcatccctggcgctgccggtcgatctccccgcccccggcgcgccctggaccaagcccgcagtgcaaggcgccctctgggtcatcacggaccgccgccccatcccgtcggacgcgtcaagcgctgcgtccctgtgccagatggcgcggcagggctgcagcggcatctatgccgattttgagcgtccgccgggaaacgcagcctgccggttcctggcggcgctgcaggccgggctttcgcagcttcgtcttccgctgctcgttccagccgcctacgcgccgctgctgccgggggcggcctgcgtgcttacctggcagcccggggacggtgcgttttcggcggcagtgcaggccgcctgtggaaggcgcgcaggccgggcgtgctttttggaccttgccccggtatgctgccgcgtccggctgggcaagtctgcgccgccggagcgtctttcgcccgcagcgctggcagaagcgctgacagggcctgtattttacaacgcgcccctgggctgctattacaggctgacccatacaggcgacgccctcctttgcacccttttcgacaccgccgcgtcttttcaagcgcgccgcacccaagccgcgcgcctgcccctgaccggcctcttgcttctgcagcccgaattggacgcgctctccagtgcccccgattttgaaatttctgccttttcagcacaaaaaccctcgtatcatttggcttaacagtgataaggaactaaatcgcttatcaactgttagctgacggttttcgggtgcatacgaaactcccgtctgattcctaacaggaattaggcgggagtttttcttgttaacagagcctatattggaggatagcattatgaaaacattactttcctgtgaatttaacatggacacaggctgcgttgaactaagatattctgacgacagcatgatttccattaattgcaccgctgtagaggacgaagttgcgaatagccgtttccagcagtctgaactggactacctgatttacaatgatcccgttgcctatgccgacctgattctcaacggagatccgaaagcatatctgaaaaatgtgaccgagtacaagccgctggattaaacaatgaaatcgc

SEQ ID NO: 3839 - DNA, 25855 bp, Unknown
  16S sequences of unknown bacteria
gttatttctattttataccgtctcggaggtttacacaatatctaaagaagtctcttgaatggagatatcctgatttaccaagtctttgtattttgttatcagaatgtgaaagatgtttgtgcatttgctgtccatagcagtatctcggttgtaaagagttccctgaatatatgatttcatcctatacacaggagttgattcttcattaaattccaaactgagtttattaccctttttctcaatcaatactttaattaccactgttacaagagtaacaatgagtacataaattgtggatgacaaaatataagccacaagggtactgattgttgtgattaacgatattgcagacgaaaactgtaaaaatgtctgtgcggacttcgctgcatattgaccgtatgaaagagtataggagtcatagaattcgggagtgtcgaaatatttgtaatctacttttctgatttgattataaacctcaatatcaatttttgcggagatctcggcttgcttaatgttaaaataaaaatattccattccgtctcccagcataccgagtccgatttgtactgcgaaaaagattacgagtgttatgattactttaacaaatccttctccggcggtcaactggttgatggatgtttcgagcagaagtacctctaacattgccgacattgtgcctataatcgcatcccaaacaatataaattatagagtacagcttcccatatttccagtatggtttaagcataattccgagatcgttgaaccaaagtttgaattctttgaatttcatcttgattatgcagtgtggtactttaccacctgttcctccattctctccaaggatgttttgtcagataaatgatatgttcttctgcaaaagacaaaataatttcttatcgtaacagatacaatcaaaccccgcctgcgctgaaaaataaaatccggacgcaaaactacatccgggatttggctgtcggcactgccgaccgcaggggtacaaagattccgaacccatcgccgcgttattctttttacgagattgtcaagacaacacgctaatcagattctactgttcttctatcctatttatatagtataatactttgcttgctgcctaaaaagatctgcataaactccattcgcatccaaaagctcgctatgcgtcccttgttcaattattttgccatccttaagcatataaatcagatcacatccgattatattggagagccgatgggaaactaaaattgcagtttttccaacggtcaattttgaaatatagttaaagatttcattttccgtatccacatccaaacttgcagacggttcatctaaaatcattataggagcatctttgtagatggctcttgctatagaaagtttctgccattgtcctatagatggctcaaccgaatccgcctcggatgaaaatgctcgtgtcagcattgtatctattccatgcggctgttctttgcaccaattatcaagctttacttgactaagtaccgacgtgatttttttatcatcacagactcttccggcggcaatatactcttttatcggcatggcatacctattcgtattttgaaatacgcatgcaatggcactataatatgattctatattgtatttttcaatattaataccgtcaagtaggatttctccgctgtcaggtttgtataaacgaagaatcagatttattaatgtgcttttaccgcttccattcagtcctactaatccgcaaatttttccggcgggtatttccatatcaagatcacgcaaaacaaacttgtccgtctcggggtatttaaatgataccttttttaatgttatcgtatgaaagcattcggcaatctgagtattgttttcttctccaagttcaaatatctccttggtgtcaaaatattctaggagcatatcatcctgtttgcgtatttctttaagttcggatgcaaaatccacaagtgtttctacacttccggtcaaattgctaaatgcagcgatcaaaagagtaaagtcgccgaaaagcatctcacctttgaaaacagatacaccgaagattatctgaacaataattaccgtgatgctatcataatagtcaagaaataaatcaacaatggaattcttaacaaatctgcctttgaattttttataatattttttgacagaaacatcatatttatcacatacatattcctgcatatgataaattttgaattcctttaccgaagacttatcaactggaatatttctgaaatagcttttttcacgttgcaacacatctgtttgaatatgaaattctcggttttcattatttatttttgtcctgatgaaatatagcggtaactttacaatcactgctataaacaccataagtgggttataattccacaggactgtaccgaacgatattgccacaggaatctttgcgacacccgaaataacctttttaatctgatcgataggatctatcccctgagcaaccgagcgacgactttgaagttccggattatcaaaatttgcaatatcaatccggtagtcctttttcataaacttggtttgaagttttacatttacatgttcacgccaataattttcaatcagtcccgatattgtggatataagccactccgcaatattgacacagaataacaggacactgaaaaatattgcgcttcttagaaggctgatatcatgtttcccttctacaataaactgcagtatgttgaaaatctgagcagataaccatgaagagacaaattctttctgttcgagaatgattgcaagtacaggaataaaaatgataaaccacaattttggttcaagcgctaaattcagtatgaactttacgtttccatttttggttttcattatgctttttccttatatctttctgcttgaagcatgaacatccgtttatattcatcattatttgtaataagttcattgtgattaccgtttccaatgagctttccatccttgaaaagcaacactctgtcggaaaacacacaggtactgagtctgtgagaaatgatccatatgtttttttgccccttcatttcattcacagcatcaagaatttccgcctcggattccggatcaatcgaagctgatggttcgtcgagaattaaaacgggagcatccttataatatgctcttgccaatgcgattctctgtttttgaccgccagacagttccgttccatcagtttcaaagctacgggataacggagtattgagtccgcattccaaagtgtcaatgaatttatatacagtcgaagccttaagggaatagcttattttttcatcatcaatttcatctgttgacagagtaatagattctttggcactgactgcatagctgcaataatcctgaaagagcacaccgtatattgcatacaaactttcaacagaatactcacggatatccctgccatcaagcaatattatcccttcagtagggtcgtaaagtctcatcatcagatgtagcagcgttgtcttccctgcaccgtttgcaccgataatggacacacattcgttcgcttcaactttaaaacttacatcctcaagaacatttttttctgttcccggataacgaaatgtaacattactgaactcaatcgaatgaccgttgctttggagtatattatctttaaatgaatcatcgtctttgaatatatttgtgggtaactccaaaaattctcttgcataacgtgattgttcggcatagtatcgaaatccggataattcatttatggtgttatatatttgatttacgaatcctgcgtacatagaaacaaacaaggtcatatttgcaaggcttacacttccgttgtacacacatattgacaaataaacatatccggctacaagagggaaggaataaacaacatttgtaaataagtttacagcattcaatttgatattatgaataaaggtttctctataaatttttttatgtgcctcgaggtaattgctttttgcgtaattaaacagatcaaaaagcctgccttctgaggccatttccttacttctaaataatccgcgatagtattgttcttttctcctcaattccgcaagctcattatttagacgatatgtccatgtataatgtttatttgacaatggctcaagacatattcgtaaaacagtaacagccaacattaatttccaatcaatatatgcaagaacagaaatgtaagcagtcattccgattacataggaaatactaccaaacactgtagtagcactattgataaacatttcaccatcctgcgcccacccattttgaatttggttataaaattccggatcatcatatgaagcataatcgagtgtaaaagcttttcttacagattcacgcaaaagaaatgctgttatcttgtccattgatttcgtttctgcccatctccaaataacgaaaaaaaatccatttaaaattgaaacagcaaaagcaataagcagtggataatatgcatataaataggaagcgaatttttccgcccccaatataattcgttgattaaaaatagcacctacaaaagctccgagtagagccggaattgttcttagaacaagaacaaagcaagtaaaaattacgtattttttatccacaagccatacttgcttaattgaagcggcaaatagtgtaacggcttcatgaaatgatatttcatctgtatttttatgtaaaaaactgtatatcttctttaattgaatcataaactcattataattaggccttcaaatccgccctaccgcggcgcatgaagaatcgcctcgcatcaaatcttcgagagcccttcgtatcccgtatctctattaaaacaaacaggcatccggggatgcctgtttgttttggcaggggcacaaagactcgaactctggacacgcggttttggagaccgctgctctaccaactgagctatacccctgtattctgttgtcgcaaaaagttctatgcagtaaaaccgagattcagccttacgacggagttgtgcgcaccgcgccgaactcgggaacacggtaagtgagtatgcaattaaaacctacgctataccgtgttcattgcagtacgcgcacggcacgaagcggtgccggacgcaatgttttatcaaatagaacttgcaggaattattataccataactctttttataatgcaatagctttttttaatttttgaatttttccgaaaaatcgcgcgtattttcgagcctcgtcaaaacatccgacccgcaaatctcccggcatccggactttagcatctctcgacttttttcctttttgcgcaaacaatttaatgtgagctttgctgcatttctgcaagttatccccgaaaagccctgtttcaaagtttttcgactctcttttctgattaattttgattattacaaaaaaatttataacaaataatcgcaaggctattgacaaacgcttcaatcaggtatagaatggtagacagtaaaagcagttaaaacccgatccggataaattccgtggatcggacaccgcttttaccactaccgacgcgcaaaaacgagcggaaaaaggaagaaggcaggaacaatgacagtggaatgcagaatgacaaagtcctatattaggacggacgaagaggaggatacgccggtttacggaatcagttttttcaagacgggcagctacgaaagggcgatcagggatttttccgacgtttttctttcggaagacgaggcggcggaattttgcgccggcataaacaagaacgacctcgatgagatccacatagacgagatcatacaggacgcggtaaacataatttctttcgtctgattccgagcaaccttgcaaaagattccataaatcagcagataaacgcccctttgtctgttgatttatgggattttttcaatcgatttcaagaaaattgttgacagttgccataaagtggtatataatggtgatagttggaattctttgctaatcccctgccgaaattatctaaatataatgaacccgccggagcgggcaaacaaccatataacagaaaggatgctttcgcacggaacgaaggcgggacgcacaaatgaaggtcatagaatatctgaagaaatttttctcgaacatggcgttcatgttcaggcgcacatggaaatacgccaaaagcaaatattttttgatgatcctcgattcggtgaaatctacggtgcagccgttcgtgcttctcataattccgaaatatattctcgacgagcttgcctccgagcgcagagtggatgtcactctgcgatacatagcctattacgccgccgccgtggtgggcttcaatctgatctcgctcataataagcaggttcggctcggatcagagcatgaaaatagatcaccgcgtagccatggatcagcacacgaaatggcttcacatggattacgacaaattcgagaacggaagagtccgcgatctcgaggcacgttccgtctcggcggcggagcctcggaatttcgccgaggataaggtactcggctttatctcgaacctgattcgcctcggcggatatacctacataatcatgtcacttcacccgataatgatcctcttcattctcacggtcatcgccgcaaacacgcttatcgcaaggcgcagtgccaagctcggctacgaatacaccacggcaatgactcgtctctctcgccgcttcaactacatattccgcacaatggtagatttcaaagtcggcaaggacgtgcgcataaacggtgccgacagctggctgaaaagtaaatttgaaaaggaatccgaggaatacattcgggatcaccgcgcgcagcagagaaagctgctcggcataaacacgctctccgacataataggactcatacagaccgtagtgatgtacggatactgcggataccttgcgatctcaggcgggatcacggtcggatcgtttacggtgttcctcggcgcactaaccgcgttcaccggaaccttcaacgaattcgttaaacgcttccccgcgctcggactgctctcgaaatacatcgacgactacagggaattcctgcgctgtgcggagcatgagggaaaggagcttgaaacctccgacatctccgcgcttcccgagcactgcgacattgaattcgtaaacgtatccttcaaatatccggacaccgaccgctacgtccttaaaaacataaacattaagataaaagcgggggagcggctgtcgatcgtcggctacaacggtgccggcaaatctacatttataaagctgctctgccggttctacaagcccaccgagggaaaaattctgctcggcggagtcgatatttcgacctacccactccccgaataccgccggcggctcgccgtggtgttccaggattatcagcttttttacatgtctgtcagatacaatatcgtcctcaacctcgaagaggacccggagcgcgtgagaaaagcgctcgccgaaagcggtatcctcgaaaagatcgaagggctggagaacggaatcgacacctcctacggtcggatcctgtactaccattcgcgcgacttctccggcggcgagacacagaaaatcgcctgtgcaagagcgtactacagggattcgccgatcgtcatcctcgacgagccgacctcggcgctcgaccccgtagcggaaacacagctttacgggcgcttcaacgagatcatcggagacaagaccgccatctacatttcacacagacttgcaagcgtcaagttctgcgactcgatcgcggtgtttgccgacggcaagcttgtcgagcgaggaacgcacgccgagctcatgaagaaaaacgggatatacgcggacatgttcacaaagcaggcgcactactatatagaaaacggaacagacgaagagacaagcgaggaaatcacggcgtaagtgccgtgcaatacctcatgccgcaaaaagaaaggaagctttcgccgcgcgaaagcattgcaggattatgacaaaggaagaacgccgcgcaatgcggcttgaaagaaagcagaacgcaaaggaagcgaaggaaaagaaccgcaaaaactgcggaacgctgaaggaacagtacgccaacctctggttcatatacaaattcatattccgcacctcgcccaagctcgttttcataagaataccgctgctcatgctccagaccgtacaggctatggtctccatattcttcgtacgcgagatcataaacgagctgacagagggaaagagcatccggcgcgtgattgtcctcgccggggctatggcgctgaccgcatttgcgctcagcaccttctccgcctttttgggaagacgcgactcgattgagggggaccgcttcaacttcaaagtgcagaaatatctcgccgaatcggtcatggagatgagctacgaaacgatcgaaaaccccgatatgcagaattacgtcagaatggcgcagtacaaccgattcggcatcgcacttcagtacacgaccgcggtggtgtccggaatattcaacctcatcggagtcggcgcgatcgtgttcacgctcaatccgacggtcattctgataatcgccgtgacgagcacagtgcgttttctgcttgaacggtatcagagaaatttcccacgcctgttttccatgcgccgtatacagtatctgcgcaacaacgattattccctcggtctgatgagagatatcaagttcggcaaggagattcgcatcgcagatatcggggactggctcgccggatttgccgaagagacgtggagagacaagcttttccccattgatagggaatttacgagaaagtacctcggcttcggcaacataaacagcattctcggtgccgtacaggatattctcgtgtacacggtgctcgccctcgaggtaatattcagcgcgatgaccgtcggcgacttttccatgtacctcacggcggcgaacaccttctccggcgccatcatgggcgttgcaacgaactactcctacctcatgctggaaacgacatggtacatcaaggattaccgccgctgcctcgatcttgtaaagaagcagcgcgaagagggcggaaagactcacatcggggttcccgcaaacgccaaaatagaattccgcgacgtctccttcaagtaccccgacacggataacattgtgctcagccatgtaaacataacgatcgaggcaggagaagcgctttccgtggtcggtatcaacggttccggaaagacaaccttcgtcaaactgctctgccggctttacgagccgacagaaggcgatatcttcataaacggcgtgaattccaaggatatcccgctgaccgaatactaccgcctgctcggagtggtgttccaggacttctcgctcttcaacttcaccgtcggcgaaaacataaccatgagcacggagcacgacgaagagcggctgcgcgagagcataaaaaaatccgggcttgagagcaggatcgaaactctgccgcacggcaccgacacatatatgttcaaggaattcgagccggacgggatcgagctgtccggcggcgaaggacaaaaggtcgcaatcgcgcgtgcgatatacaaggaagcgccgatcgtcgtgttcgacgagcctacaagcgcgctcgacccgattgccgagtacaacatataccgcaactttcacgacctcgccgagcagcgcaccgccatctacatctcgcaccgcctttcgtctacgaggttcaccgaccgtaccgccgtattcgcaaacaacacgatcgccgaatacggtacgcacgacgagctgatgcggatcgaagacggaatatacaggaagctgtttctcatgcaggcacagtactaccgtgaataattacgagaaaggacaccgaacttggacgaaaaaataatctacagcataaaagacatcgcagtcaatcccgatttcgtcggagtgatagtcgcgcctcactccgacagctacatctttgaggacccatccgaggtgccggaggaggtgcggcagataaccgatcacttccgcagcggcacgccgcttgattacgcactgctcgactgtacaacacacacaacgctcgcaacggtgaatttcagccgcatcgaggggcttaatttaatggacagcgtgttcttctttttctgcatcgtctgcgaaaaggagaccgacgccgcgttttcgatcgaaaccatctccaaacagcggctctggataaacggaaagatcgtcgcactatgctgcacggaccgcgacaccagccgccagcttttcacactgaccctatccgccggaactaacgtaatttgctttcagcagcatgattcatattcgtcgttcctgacaacggtgcgcttcaccccgcttgaatacgagaattccctcgcgcacaactccatggtgaaaaacaatttccactataaaaagggcgagatcgcagcggaatttgacggaatcttccttcagagagatgagtttcagataagctgcactcccgtggattcggtcaatctcgacctcaatgaaccggtcacgctttcgatcgaggacagcataacgggagaagtgatgtattcaaggaagctgcgcttctttgaatacatccgcatcgacctttcaaaaatccccttcacgaagaaatcccccttccaccatgcgcatgccgttctccgcgcaaggacgcgcggcggcggcgaatacgcccactccatagacgtttttcccgtcgttccgtgcgattacatgaagcagacggaggacagggcgcgccgggcgcttgaagacccctcgatctccgaacatgccgccgcctgcctccgctacaatctcgcctgcatctaccactttccggaggacgacatcataaacttcctcgcgtgggaggctttcgagcgtgagatctccatgatcgagcgcggcgaatacgacacatatctgcaaagccccggagcgaaaaaactctactatttcaccaatatcgacgatcagtacatgaggtactgcatctgtctgccgaagggatttgaccccgagcaaagatatgcactgcttatcataaatacgataacctccgccgacggctcgatgtactcatattatttcgaacgcaccgacgctttttccgacctgatcgtcgcggatatccacggcagggggatgacgaccgggagctacgtcggggatcgttcgttcagagagatcctcgccgacatagaaaagcggtaccgtatcgacgaggacaggatatacgccatggggcagtcaaacggcggatacgcgacatggacgctcgcggaaaaaagtcccgacctcttcgcggggatctatccgtcgaccggatacctgaacccgaacgaggtacgcaacctttcaaatatgcgcgtccgctttctgacctcggacgccgatcccggtcatataaaaaatacggaaggcgtcgatgcgttcagggactgcctgaaggattacgaatgcacgacatttcacaagctgatgcacaacgtgttcgagcaggtgcagtttgaagaaaacgcgctgcgtgagctcctctcggcgaagcgcgatccgtggcccgacgaggtatggctcgatactcacatgaaccgctacggacgcgcatattgggtctcgcttcactcgatcgagagcggtcggatatacgcccacatccacgcccgcacggacggggacaacattatcgccgaggcggagaatacaagctctttcgcgctcacgctgccgccgaagctcgatcccgaaaaaacgcacgtcctgctgaacggcagagactatccccccaccggggaaagagagcgccgattcgagatgcgcggcggggatttcgcggagtgcgaaaagttcaccgaaaacacagcgccgtacaaaggcaccgggcttgttgacggatacatcgcgctgatgaaaacggtgaatctgtgtccggaaagcaagattctctccgatatcgcaaacgcgatcagactgccgagatcgaacacctacgacggaggtgaagcggcatcgtactcattcattgacagagatgcggacaagctgaaggacgcggaatttctccgcgggcgttcgtttgcagtcgtaacaaaacgcccgtcggaatatacgtcggacttcgcggcgagcgtcgatcggatgcttgaaatacatacggatgccgacggatacgaataccgcggcgcgcgcacggacggtccgtactgcgtgatgcagatcgcccggagcccgtggagtccgacgtgctccgttctccacgtcagcacgaacgatgaagaaacggcaaggaagaacgtcttcacaaagcgcatcctcctcccatcctacatcaatgcatttcatccgtattacaacagctgcgccatgatattcgacggacacacatacaaacggatcctcgattacggctgcggcatcgaagagctgtcgccgcgcaaaaattcctgacgccgctcagctttgcggacggacgttcatcgaatcacgggagtcgaaagaaaaccgagccgttcgctccgcaatcaaaggttaaaatccccgcttcgcaaactcgggttctctgtgcaagctcatttccctccgtacaaaaaaacagaggagaagcctgagcttctcctctgtgaaaaacaatattacggatttttccgatcaccgttccgaccgtgcggagcgtttcggaattcgagactttccgcgattactcgccctttgcctcgtcgtccttcttatcgtcagcatttgcctcgtcagcctttgcgccgcccttcttcttggcaacgatgatgataacaacaactgctacaacaacaactgcgccgacgatgatgagcgcgatagcccagccgggaagtccgtcattaccgatgttgctcatgtcattcggggtattgaccttatcggcagccttggtggtagtcggagcgtttgtggtcgtaggagtgctgtcgggagccttggtggtggtatcgggagtcgtagactcgggagtcttatcatatgtagctgcgggagttacggtatcagccttaagagtaacggcgttcggaccgccgacagtcttttgagcatccctgcactgaccgccgcagattcccgtaccccaagtgagccaggagtcagcaccggagccggagccgttgagaactacgagagccataccgagaatcttgtcagcctcgggagtgaagtcctcaccgatggtcttccacggaatagcgatctcataagtggtggtgcatccgaaatcttcttcgctgttaggatcgttgggaacggtggtgatagcgcagagagtgtcggtcatgatctctttagcttccatgtcgtaagcctgaacgaccttaccgccgtttacaagagcaaagcccgcgttgataaggttcttcgcattcgcccaagcgttcgcgccgttgtccttgtagttacccttgctgaaaacatattcgtcggtcagatagttgaagcccggaatcttctcttccatgcggcttgcaggtcctgcgggatcgatacgggtctggaggcagtcgccgttccagatttcgtccttgctgtgggtgtttgcgaaaccgtcgatatcgttaacgatcgcaccgatatagaaatactcgtcgtcccaacggagccagaggtcataactcatctcgagctgagcctcgttcgagaactccatgtaggtgttggtggggctgggagcctccttgtcatccttgttagctgcctcctcgccctttacagtgacggtcttctcgccccactcctcagtggagagcgttccgtctatagtgggcttcgacgcaaatttgagagcgtcggcatcaacgttcgttcttgctgcgaaagccgggattgccagcattgcggaaagcatgaccgcgcagagaacaaaagccagaaacttcttcatcatatcctccaaaatttattattgtgcgccgttatttccgtaacaagccgttaaccgcgcgcacatattcacggtcttattttatcacatgcaaagtgcaatgtcaatacattatctttcattttatcaatcaaactgtctaataccgataaacaaaaactctcgaacggcagattttgccttcgggagtttcctttttttcgttttcgatgcccgtcccgaccgcccaaacgccacattccgcacaccggccgtacaccatgtccttcctccgcgcctcgacacgcgcccgacctcgcggcgcgctttcccgtatcttcgcttccgcccgcacagcttccgagcgcaaaaaatcgcggcggaggaaaaacagcaacctgtttttcctccgccgcgcggaaatgttaaagtttatcggaatccacgcaatttctcacgcgaaaccggagtcattttccgtaatcagacaagagatctgatgagaaggatgatgtccttcatgttgacgcttccgtcctcattgaagtcagcagcagcctcattgatcgtgagaccggtccagcctgcctgataacggataagaaggataacgtcagcgttgttgagtttgccgtcgtcgttcatatcgccgggggtcatgttcttgggcttctcggagtagtagccgtcttcactgttgacattcatcggatcgtagtcaacgatgtttgcccagccgctatcgcccttgcagttgcgtccgagagtgctggtgaggaatgcacggtcggtggtggaaatgttgtagtcggcgagatccacattaccggtgttcttctcaatattaaaggtaagatcggtggtgaacttgatgttgtcaacgatcgccttgccgcagttgtaaaggatcggagcaagcttgttaaacttcggatcctcggaatttgcgggaacggtaatgcaatccttttctgtctcaaccgcgagagcaccgtcaacgtagagagatgctttctttccttctatcttgagagtgagtctgtgccatgtagcgggaacaagtgctcctgcactctcatcggtgttgggaagcgtccactcatagggagcggaagcaaagatgtcggtgcatccgttctcccagccgaagttaccgattacccatgacttcgagttgtaatcgtaacctgcgaaggtgccgtacttggcattttcttcgccgtccttgccgccgaatacaaatccgacaacagtggtctcggggttaacgggcttaacgtcgcagagagcgacttcatactgcatgatgacattggagcctgcatcgtagcgaacgtcatcggcagacatgtaagcctgaccgtaacctactgcgagaacctgatccttatacggaacggggtcattaacgggctcatactcgaggagtccgtcgaccttttcaccggtgagagcgtccttgccgacgagagtgattgcctgagaaccgccgtaaatgttcggattcagcttgccctccttgttggcttcggtatcatccatcgcataagttgttctgtcggtgataccggaaccccactgaaggaatccggaccaatcctcggaggctgagctggagttaagataaacagcggacataccgagaaccttaccgataccgtaggtagtcttgtcgataggctgatcgcctctgatgatcatatcccacggaagagcaacctcgatggtaacgagctcaccggtcgctgcgggagtgacctccatagcaaactgagcgatgctgtcgtggttcttgttcttcttggtgaggtcgccgagaccggaatccatgtcgtagagccatctcggcttaggatccttggtggatgtggtgttgatcgcacatccggtgttcataaggtttttgacatctgcccacggcttatcgtacttttccttgttgaacgcggtcacggtgtggtcgtaaccatcctctgcagctgcctgagcggagttcggacccttgtcgtcaacacggaactggaagcagtcgccgttccagatatcgccgcggcttctcttgttgtagtagccgtcgtagtcgtcgatctctgctgcaatgtagtagtagtcattatcccaacggagccagattctgtaattaagctgagcgtgatcgccggcttcctctttctcattccacacggtggtgtttgctgcgcttactgcggttgcatccttacctgcagcttcagagccctttacctcaacggtataattgccccactcttcagcagagattacaccgtcaaaggtaggcttatttgcgccgaaagcaagagcatcgaagtccttgttcgactgcgctgctgaggtagggaggacgcaaagcgaaacaagcatcacacataccatcagaaacgaaagtacctttttcatttttttcttctccttacaaagttgcatgagtcttcatgcttagtgtatatatattctatcatctcttttattcaaagtcaatagttttcgaaaattgagtttaactttttgtgcaaatacatgaaaaaagaaactccgcataccgtgatacggagtctctttttcataattaagacaacacaaacgtcaaatcttcccggaatcggacagattccggctcactcctcgccgtcttcgccgtcgcagactttctttccgcaggcggggcaggtaagctccgagggttcgatcgactcgtcaaagtagatctcctcgttgcagtgagggcagaacatcatacggaaatcgtcgtcgccgcaatcctcgccgcagtcgcagcagtttccgtcgcattcctcatcgtcgtcgtaataatcgtcgtcgtcctcgtcgccgaagagatactcctcgacatcaccgagatcggaatcgacctcttcgatgtagtcgttgagctcctcgagatcggaatcgatctcatccatggaggagtcgatctcgtcgatcgcacccgccatctcgcccacaaggtcgatcagcgcggtgataagcttgccctcagcgctctctttgtcgtaatcgagaccgtctgcaagccccttgatataagcactcttttcggaaattgtcattttcgtccgttcctttccttatcatgtgccgcggcatgcatacgcattgcggtcacgttgttttatgcggtcaaagccgcattcgtgcaattcggaaaaaccgggcaccgcactcaagctctttcgagatactctccggttctggtgtcgatgcggataacatcgccctggttgatgaagagcggaaccttgacctcggctccggtctcgacggtcgccggcttggtcgaaccggtcgcggtatcgccgcggacgccgggctcggtagcggtaacctcaagagtaacgaacatgggcggctcgacggcaaatacgtttccgttgtaggaagcgatcttgcacatgtcgttctccttcacgaacttgaagtttgcggagagcttgtcggcgttgagcggaagctgctcgaaggactccatgtccatgaagtagtagagatcgccgtcgttgtagagatactgcatctcgcggcggtcgatgcgcgcgtcctggaatttgtcggtggggttgaaggtcgtttcggtgaccgcaccggtgatcacgttcttgagcttggtgcgaacgaatgctgcacccttgcccggcttaacgtgctggaattcgatgacctgcatgacctgtccgtccatgtcgaaggttacaccgtttttgaaatcgcctgctattaccataaaataaagctgtccgccctggagcgggggacactcctttcaaaaataatttttatacagtcactgatattttataacaaatcctctctttttgcaataggaaacgcacatttttttgcaaagcggggaaatttatttgaaagatcggaagaaacgggcgcatctctcccccgaaacggggatcgcgcgcctcatttttcgcaaaatgagcgggagcgggggcgcggcagagaaaacgggaggctgccggcggttgacggagaaaacgcgaggcggtcttcgggcggcgagtgcatttactttgccgcacatccgcgcgagttttccgaagtccttccgtccgccgttccctcccgcgaagccgaaaagggagggcgcaaagccctcccttcccctttcgggataataccgtatttcgtctgcggaaagctccgcccgccgtccgaaaatcagactatgccctgcgccatcatcgcgtccgcaaccttgaggaagcccgcaatgttcgcgcccgcaacaaagttgcccttcattccgtacttctcgcacgcttcggagacgttcttgtaaatgttcgtcatgatctcgtgaagctttgcgtcaacctcctcgaacgtccacgaataacgcgcggagttctggcacatctcgagcgcacttgtcgcaacgccgccggcattcgccgcctttgcgggtccgaagaggattcccttctcgaggaacatctcggtcgcctcgggagtcgtgggcatgttcgcgccctcggccaccgcgaagcatccgttctttataagcatctcggcaccctcggtgtcaagctcgttctgcgttgcgcacgggagcgcgatatcgcacggaatgctccagattcccgagcagccctcatgatactccgcatccgcgtgaacggaaacgtattccctgattctctttctatcgacttcctttagcttcttcacaagcgcaaggtcgattccgcccttgtcgcagatgtatccgtcggaatcggagagcgcaacgaccttcgcgccgagcgcggtcgccttttcgcaggcgtagatcgccacgtttccggaaccggagattaccacggtcgctcccttgaaggacttgcccgccgcgcggagcatctcgtcggtaaagtagcagagaccgtatccggttgcttcggtgcgcgcaaggcttccgccgtaggtgagtccctttccggtgagaactccggtgaactcgttgcgcagtctcttgtactgaccgtagaggtatccgatctcgcgtccgccgacaccgatatcgcccgcgggaacgtcggtgtccgcgccgatgtgcttggaaagctcggtcatgaagctctggcagaagcgcatcacctcggcgtcgctcttgcccttgggatcgaagtcggagccgccctttccgccgccgatcggcagtccggtgagggagttcttgaagatctgctcgaagccgaggaactttatgatgccttcgtaaaccgaggggtggaaacggagtccgcccttgtacggtccgatcgcggagttgaactggatgcggaatcctctgttcacgcggaccttgccgctgtcgtcgacccacggcacgcggaattttatgactctctccggctcgacaagacggtcgattattcccgcttcgacatattcgggatgagcctcgatcacgggctcaagcgtttcgagaacctcgagcaccgcctgatgaaattcaatctcgcccggatttctcttcttcaccgtctccataacgccgcaaagatactgatttttgagtttcatatatttatttccttccttcggtatttgtacaccgctcaccgaagagcgaacaccgcatcggatttgactgaaatcctaacgattcctgcacactgatgaattaattatacggcagacagtgccgtttgtcaataaaaaattgcgtgaaatgaataaattttctctcaaacttgcaaaatgtgtcgttttttggagctttgacgaacgcattttcgccccccgcgatccgaacggaaaatccgtcggaaagacaccttcgcccgacagcgcgcacctgcggggaaaattttttcggcggatgaggggagcgccgtgcgcaagtgtgcctcccggcaaaaaacatttccggcgaaattccgcatctccggtaagatcctcgccgcccgtcggtaaatgaaaaagccgcgcacggacgaaatcccgcacacggcagcgaaagcgcagacgcggaggcgcagacgccccgcagtcacgcgcaatttgtgatttataataatgaaagaaagcgtgcaaagcccctctcgcctgcagtcgaggataacaaccgccgtgcaaagccccgcgaaaatccgatcgcaatgccggacaggccgccgggcgctgcgctcaccgaaccgcaaatcggatatcccccgccaacaggcggaaggcggacaaaccaaaaagcacctgcatccgcaagtgctttttttggagctgctacccagattcgaactggggacctcatccttaccaaggatgtgctctaccaactgagccatagcagcatttgacatcggctattatatcaaatacttttcgctttgtcaagtgttttttcacttttttcgtgtttcgtgctgttttttcgtccgcgccgtcatttcgaacgcgatccgggagcgaaaagtcatactccgaagtcctccgccccctcacatcaaagcccgaatcggcctgtcccgtaaagtcctttgccgctctgcgccgcacgcttgacatttcgccgtgcagggggtatacttatctatataccaaaaggaggtcggaagtggacaaattcaaattggtttcaccgtactccccgacgggcgatcagccgcaggcgatcgacctgctctgcgcggggcttgaagcgggaatgccgtggcagacactcctcggcatcaccggctccggcaagaccttcaccatggcgaacgtgatcgcgcggctgaaccgcccgacgctcgtgctcgcccacaacaagacccttgccgcacagctctgcaccgaattccgcacgttcttccccgagaatgccgtcgaattcttcgtgtcgtattacgactactatcagcccgaggcgtacgtccccggaaaggatatatatattgaaaaggattcctcggtaaacgaggagatcgaccgcctgcgccacagcgcgacgtccgcactgttcgagcggcgggacgtgatcatcgtggcgtcggtctcctgcatattctcgctcggtccgccggaggaatacgcgggacaggtcacgtcgatccgccccggcatgatgctctcgcgcgatgatgtagcggagcatctgatctcgatcggctacaaccgcaacgatatcgaattcgcgcgcaacaaattccgcatgaagggcgacacgctcgaggtgttcccgtcgaactcaaacgaccgcgcgctgcggctcgaattcttcggcgacgagatcgaccgtgtgtccgagataaatcccgtcaccggctcggtcgtgcaggatctcacctatgccgccgtatatcccgcgaatcactacatcgtgtccccggatatgcgcgagagcgcatacgaggagatcgaacgggagatggaggagcgggtcgaatacttcaaatcgcagaacaagctgatcgaggctcagcggatcgaggagcggacgagatacgacctcgaaatgctccgcgagatcggctactgctcgggaatcgagaactactcccgcgtgttcgcggggcgcgagcccggctcgacgccgtacacgcttctcgactacttcccgaacgatttcatcaccttcatcgacgagagccacgtcacggtgccgcaggtgcgcggcatgagcggcggcgaccgcgcaagaaagaagaatctcgtcgattacggcttccgcctgccctcggcatacgacaaccgcccgctcttcttcgaggaattcgagaagaagctcggtcagaccgtcgcggtatccgcgacccccgcggaatacgagagaagccgctccggtcagatcgtcgagcagataatccgcccgacgggacttctcgatccggtgatcgaggtgcgccccgtggcgacacaggtggacgatctcatcggggaggtgctcagccgctcggagaagggagagcgctccctcgtcaccactcttacgaaaaagatggcagaggatctcacggaatatctcgactcgcgcggcgtgaaggtcaagtacatccaccacagcgtggaaacgatggagcggacagagcttctgcgcagcctgcgcgccggagtatacgacgtgcttgtcggaataaacctgctgcgcgagggaatcgacctgcccgaggtaacgctcgttgcgatcctcgacgcggacaaggaagggctgttccgttcggaaacgtcactgatccagatgatcggacgagccgcgcgaaacgcagacggccgcgtcataatgtacgcggataccgtgacgaaatcgatggaggcggcgatcggcgaaacggcgcgccgccgcacgatccaggaggcgtacaacctcgagcacggcataaccccgaagacgatcgtcaaggagatcgcggagccgatacgcatcgccgccccggagaagggctcgaagaagaaacgcggagagaaggctccctccatgacgaaggacgagcggaacgcgcagatcgaagcgctgcggcgtgaaatgaaggaagccgcatcgcagctcagattcgaggaggcagccttcctgcgcgacaggatcaaggcgctcgagaccacgaaatagcccccgccgtgcggaaacgcggattttattcatccccgaaccttattatttgtgaattttacaaaaaacgctggattatttccgcaatgtgtgatataattttatatcacatccatcattttgatgtcaacgtaaatgaaaggtctggtaccgaacaaatggtaaaaaccaaaaattccaagaacagccggctcaaaaccgtactcatcaccgtcgcgtgcgtgcttgcggttgcgataatcggctcggttttcacttacaccctgctcggaaacaacggatatttcctccgccacacggtagccgtcaaaagtgaaaactatgaagtaaacaacgcacagatgtcgtatttcttcactacgaatctctcgtccgagctttcgaagaattcgaccgtttatcagtattacggactcgacacctccaaatcgctgaagacccagaactacccgagcggcggaacatggtacgactacttcatgcagagcgtcaccattccctccgtcaagcagatgctcactctctgcgagcaggcgaagtccgtaggatttgagctttccgacgatgaccgcgcgtcgatcgacgaatcgatacagacgatcaaggacaccgcatcccagagaggctactccgtttcgcagtatgtgatgaactactacggctacggcgtaaatctcaaggacgtgcgcagcgcaatggagatgagccagctcgcatacagctattacaacagcgtcatggattcctacgagcactccgacagcgacctcgcgggatacttctccgagcatgagaacgacttcctcaagatcgactacctctcctacaccttcaaggtcagcgacgtaaagaacgccgacacctcaacggataccgacacttcggcagataccgatacttcaaccgacaccgccgcatcgaccgatacccccgagaccgccgacagcacctccgcagataccgaaacctccgcggacacctcgaccgatacctccgccggagatgccgagagcaccgacaccgatgcttcgaccgatacctccgccgagagcaaagaagaggacgaggacgcggagtacaaggctcagatcaaggcaagcgccgattcgctcgccgcgattaccgatgttgagcagttcaaggcttacgttgagaattacctcaagaccgtggtatacgcatccgagaccgacaccgacaagctcgacgggaacgtgacctccgcaatgtcgaagctcgagaccaagggcgcatcctacagcgaggacagcgacgagatcaaagccctgttcgacatgaccgaggcaaacaagaccttccttcacacccatgacgacggcacctgcgaagtataccttctcaccgcacccaagtaccgtgaggaatacacgacgaagaacgcccgcgtgatcgcgctttcctcctccgattccggaagcatcacctcgacgatcgacaccatcaacgaggcgctcaattccgcagaggacaaggatgccaagtttatcgagctcgccgacgaatacagccgctccaccgcgaaggacgcgctttacgagaacatcggcaaggacgacttcgacattgacgaaatgaacgcatggctctgggacgagagccgcgccgacggcgaccgcgacatcttctcgaaggagagcacctcctcatcgacctccacttcatcgactacttactactacatcgtcatgtacaagggcgacggaatgaccaagtggaagtacgacgtcgataccgcgatgaagaacgcgcagtatgaggaagcttacaagggattcgaagaggctcacggcggagacaagatcaccgtaaacctcgataacatctacaagattccgacaacctgacgccgttcggaaataacgaataaagggggcgcataccgcgtcccctttgcactgtctttcaaaggaagcacgacaccgcaccgacactgcaaaacgcccgcgtgacaccgcgccgatatgcgcatcatatgccgaaacgccgcgcgcttcccttaccgataaaacaaaattcaagccccacgggcaaacggagtttatatgaaaaattcaagccgcaccatatgcgctcttctcgccgccatcctcgccgcgtctctcttctcctgctccgaaaaaaaggatgactccgccgagacctcgggtaccgcagagacttcgggtgtgaccgataccgccgcagacaccgcacctgccgagtcctcatcgccgaaatacagcctcgggctcgccgcagacggcaaattcgacggcatccgcgcgtcggaccatgtaaagctctgcgactacaaaggcataaacattcccgcggagaactgcaccgcgtcggatgaagacattgacgcgcggatcaaaaccgtaatttcgaatttccgctccacattaaagcgcaccgaccgcgccgtagccgacggcgatactgtgaacatcgactatgtgggatcgatcgacggcgtcgaattcgagaacggctcgaccggcggaaacggaaccgatgtcacgatcggtgtcacctcctacatcgacgattttctcgagcagctcatcggtcatatgcccggcgaaaccgtgaatgtcgaggtcacgttccccgtaccgtatcctaacaatcccgatctcgcgggcaaggacgctcttttcgtaaccgagatcaactacatcacggagtacgccgaccccgaattcaccgatgacttcgttaaggagaatctctacggcacatacggactttcgactgtcgccgaggtgcgcgagtacatcgaaaattcgatccgcgaagagagcatcacccaatatataaaaagctgccttcttgaaaacagcacagtcgatcttcccgacgcggtctacgatttctgcaagaatacaatgctcaactattacaccgactacgcgtcacagtatcagaagaccctcgacgattacgttgaggctgccggatattcgagcgttgacgagttttgcgaagcaaacagagaggatctcgaatccgacggaaagatccgcctcatattccaggcgatagccgaagcggaagggctcacggcggacgaggaagacgtaaaggaatacattgcgaaagcgaacgaaggaaattcctcgtacagcgagacaatgtacgattcctatattactgattacggaatgccgttcttcatgcaggcggtgcttcaggaaaaagcactcgccgttgtcacggacagcgcggttctcggaggctgagcctgccaggcatacgcctgatccgagacgctgagccgaacgcgaaacaccctgcgccgagacggtgccgccgtacagccggaaagcgcggcggaaaccgataaccgcgccgattcggcgagaaaacgcggcagataccgatacttcgccgattcgacgctccggcgcacaccggctacgcccccccccggcgcgc

SEQ ID NO: 3840 - DNA, 24751 bp, Unknown
  16S sequences of unknown bacteria
acctgtcctatgtactctccctcgtcccaacagccgaaatcgtcgaacaataacagtttttggtcttccgtgcctaccgtgcatacgatatcctcgtccattatatccgttataaaatactgcggcatgcctttggaatatacgatcttttcttcgctcttttccatatacttcataatatatgccagcgcttccccaacgcgggcgttatcctctatcttttcaaaatcattccgtccgaatttctccaaaaaataagtattctgattcgtcgtctgccgacggtgatttttaaaattataatcctttacctgtataaaatatcccggcatcattccttgcggtatatcgaatacgccgtggaaatgcagacgttttttttcgggagatcgttcccataccccgatatacttccaacccttgcggctgctcagcaaactcagacaattccgcatcttctttcgaaaactgtactccgtatgcttcttatcgtcgaacgtaaaagtgacaaaataatcgaaattttgcaaattcgctttccgcgtcattcggatgcggcgggcgatcagattctttctcttacgttcaaaattcaattccacaaacaaccgcgcctcttcgtcgctcttgaaatacgcacgcatacccgcataaacagcctgacgcctccgacttttcggctcatataaatattttttatacaacatctcgaacaactctttgcgcggcggagaaacctccgtttgcccctttgccaccgtttctgactgcggttcgggaattgctgactcggtactcttttcaaccgtttgcgccttgtgttcggcgtcaaacatattcatctgtacgccgccgtcaaacggtgtagtttcctcttccaactcttccatcacgggaacctgccgctctatttttacgccttttttcaagcgttttttccgcggcgtgtgcgggatcgctatatagtggctcccgtcggaatatacttttgccttcgaatacggcattaaaattatctccttcatcgttttttgtatgcctataaagcccagaggcaaccctctcggctttataggctttttttatgcgccgttatccttgtacagcgcgttcataaaataactgttctgacttttcaactcctctacgctcgccttttccgtcgcatactcgatataatccatcaatccgaccttgcttttctctgccatatcattaaaataatcactgaaacaatccgttgaaaacctgttcgcataaatctttgcgttcattaaataatactttttattctctgcctttccgtccatcgtgccgcgctctttctctatcttcaatatacaatacccgtaacggttataaacccgcgcattccttctccaaagccatgcagttacgcttttgaggacgtgtaccaaaagcgtattgttgcccctgcggaaacggaaatcctcgtacagccgcataaatcgctcaaatgcccattcagatatcatttcctctatcgaatacagcggcagcgtaagcctctgttctccggatgaaataatatgtaacacctcgctcaaatcccttgcgtccgcgccccaactttccggccgttgttcgtccgtgaataccttgatgaacgggaaatgatccaccgttgcgctatgcctgcacattttcagccaggcgttgaacagatcgtttttctggttcgccccgtccgtgcctttcttcacttctttcagttccagattattcccgcgttccttgccgatctccgttatatttactatcccgaactcgaaactgcccgctttcgaattgttttccataactttcttgcccagcctcaacacgtcgaaatccaatatgtgggaatgcctgtccgtttccctgttctgttcgggaaagaagtccataatccatagcgggaaattgccggtatctataaaggcgttgtccgtacgtatggaataattagatataatgagactgctctggatcacatatataaaataagcctgcgcatacgtttccaatacgtcaaacaaaccgctcgttttcagtccgtcgttgtattcgtaaccgtatctgtcggcgtcgtacccgtagagttgacgttccgcattcccatggctttcaaacctttgccgctttaaccttatccagtattttatagaggcaagattgtacaccgtgccgtgttccatgcacttttgcagttctttttcaaagcatatccacgggaaatgcggaaatttcagatcgttgtcctgcaaaattttcaaggctttctggcggaacatgacctcttgcgagagcgccatatctgtgataagcgtcgttttctttttccccatcgaaccgcacgccatgctcacgatcggcagttcgttgatgaaaccgcagttacgtgcctcgaaatgccgcagccttcgtttcgcagtacgttcccgcattttcccgaacccgatcaacgcggctatggcgatgctccaccacgggaaatgtttgataatgacttgcagatctatgagcagtttattgacctgtatatagaccgttacaatatcgaaggacacgacaaaccacagataataggctataaactccgtgactatggttacaaggttcagatgcagcgcccatgtcgccagccagcaacccaacaccgctttgtgttcacggataaactctcggaaagaaacgatcgtcctcttcacgggctggtatgcgtactttgttaccgccttgaacaccttgagcggaacggtatccctgccgtgctttcggttgcctttttgatacagttttcgtatcataaacacaaatgcggcaatgcacggcaaagcaagcatgagcacctttgccgccgttcccaaaaacgcggcgactgatttcccccaacccgcgaaattctctgcattcagcaacaacgaaaaataatttgtcgcaccttccttgaactcatttaagtcctccggcaagaccgtcccccacgaaaacacttccgaatatccgttgaccgtagccgtgatactgtgttgcattccgaacaactcgcagaaataatacgctgcggaattacccaaatcgcgcaggctttcccataaccgcagatatgagtccgaaaacacaaatacgccgagcagcaccatgactgcggatatggcggctgtaatgataatattcctacgcatcggcttgtcctcccgtatagatcagataactgataatcaatacggttattataatgataacgaccgccaatatcctttttatcttctttttcatatttcctccgctttcttattcatttttccgtttgttctttttttcgttacgcttctttgccgacttaacgataccccggaataccgacgcgatccccttaaatatgatctgtatgagccatacgacgatttttaagatccaatacagcacaggtaatgctataagcaatcctatcgccaacagcacatatttcagccaatcgggaagatcattccccatatcccccggcggcgtcagaccgttgatgatatctataggatcggatactgcgggaatgaccatatacacgccgtctttatgaaacgtaaggtctattatatcgaaatcgaaaaatacgctctgccttgcgaaatatgcctgtcccttttttaccgtgccccaaagatcgcttttataaatatcgacgggggcggcataatagtcgcttgccgcaaaccgaaacatgactaaataacattcttcgtctgttttatccagcggatctacctttaccgcgtcagaatatgcgtctttgatcgtttgtgcgtccttgatattgaccagcagccgttcggatatttcctgatccgtgcctttcaaatcattctctttgagcacctgtatcggagagatctccctgcccgtttccgacgggattttcccgaatatcgtttcccaaaacccgtactcgttccaattctcccaaaacgacggatcgccgtctttccaactgatcaatttttgcaggtcggtatccgcgtcgaaatcgtaataactgtatccctgctgtattttcccctgttcgttgtctatcttacggctgtcgtctatgtcgctttcaaacagatccgcgctgatgctcccgtcctttacgggcagcctgccgctgtcgtaactcttgccgtacgccatgatatgatcatacaataagtttccgtttacggtcccggcggtatccgttttataaggatcgtacccgtcaatatcgtccgtaaggaataacagcgtaagcctgtcgcagatctcttctatccttgaactgactgccaggttccagccccatttcgctgattcatacgtttcgacgccccacgatgagatcgttttcatctcgtttgcgagcgcataaccgatctcgtcgttcaatacaggctcgttcattgagatctcgccctttttgctctccacggtcttaccgagatattgttgtaccgcgttataaaactcagcgttgctcgtcactacaaattccttcgtcttgtactcccaccattccgcttttattctctgcaattcgccgtatgtatcaaacaaacgcttgggaacggcaaaatacaccgtgtcgagttgattttggtagttcttgcccttgcccgaggatgccgtgcggtaataggtatgctgtacctttaattgcacggcttcggcgttgcccgcggcgtcgcactgaaagggaaacttgctgtcgccgtagccttccgcgtatccgctgaactgataatacttgtttacccaatactcctgcgctgtagttttatcactgtccgtttcatataattctatcccggatatatgataatacctgctgcccgttgccgcttcccgttcgcgttcggctttgaatatcgttttattctcgtccttgatacgaaactttaagaatctgttttcgtatgcgcccgtacttgcattacaaaatatcaaaggaaatttcgcatagtcttttacagttcccgggtccccctcttcgttttcaaaataaaaatcagacgatatctcgatcttattctgcgccgaagcagtcgctatatcgatcaatgcagggttgtatacgtacaagtacagcgcataattcccgtttgcgttttcgtattgcgaatagcaatattccgcaaaggtaattacctgcacggttccgaacggattgcgcggatagtcgtttacattgaacggtttgccgtccacggcggaactgcctaaatcgtccaatacgtccgtagtatcgaattccaattcgctgttcgcagcaaacgcagtatatggggcggaatgaccgccccgtaccattgtcaggcttattaccgttcaaaataataatgccgacaaccgattaaaccttgctttcattctttttagcatagcacaccccctcaaaatacaacggacggtggagatatctcgatccccgttacttttctgtcaacggaaaaatataaatttgccttcgatccatctgccgtcaccgcaatcacaaaatagcaaagaccgctttttatttcttcttgaaactctatactgccgccgtacttttcttctatcgccttttccaccttgaaccccttgggtagatttattgtgaatttgtccgtttcttttttcagtccgaacacttttgaataatcgttatcggtttcgtccgtaccgtaaaactttttcggcacgccgttatgaacaaaagtaaaattattcgcactgttcgatgttacctgtacggaataattgacctcgccgccggtcagagtctttacataaaactcatacggcttaccgctttgcagtgagatattcgcgctgtctgtatttgcgtacaacttttgcccgccgcattcgacataaaatgttacaccttgatcgcgcaaggcaaaatatgtcacaattcctactatgccgagcagaagcagcacgccgaacaaaacacttatgatcgttccgaccgtgctgccggctccctttgatttactcatttttcctgccctctctcggatctaccgtttaatgacttttcggttagaatataatagaactatcgctcatttccattccttcgacgcggaacccatacggcaatacccgaacttgataaatgtctgttttcgaaccgtatgtaccgaccgtctttacttcgacatcgaacagcataatccccggctcgctcggattccctgtcaatgccattacgagtttattaaacacggaaggattttcagataccggtccgctcatagcgtccttaaatacgcggtcaaagaatgttttatcaaacgcgggcattcccgctgtgatattttcttcgtcccatgtcagaatcgcaccgatcgtgttcccgataccagacgcgctctccgaaaaagatatctttaccgtagtcttataatcgtccttgatcgtataaacagaagctgaataatcaaatttccaagtttcggcggcttgtccgctcttcgtaagatcgaacatttttgttatcccgtccgttaatacagtcgagccgaacgttgcttttacactcgatagtttctgcgtatagtccaccaaacagttgcctgttacgtccgtattatctcggctcgtggccgtcactttgatctgttccccgaaacttttgatacacgccacgttcgcggtcaaagctccgtcagccgtgggcgttatggtcacaaagtcggtcacggtcttgcccgccgaccattcgctatcaggatcaacaaacgctatcgtccaatccacggctttattttcagcggtttccggagtgatcgtcaccgtaagcgaatatgccgtttccgccattgtcgaaataccgtattcgccgtaatctgattgcgggatcttcatgctcttgatcgtcataccgttcttttctccttccgtaatgaccgcgccgcccgcttcctgctcaggcggtacttcctccggtttcaatagcatgatccatgctccgataagccccgcaagcaacacgatgatgagaataaaagatattgcccacttcactttatccgagcgcttatgctcataaagttcgtattcttcaaattcgttgtacatttttccttgtttcctccatgttttctttttttaaaacggcggcttgctttttcgttacaaaccgccgcgattgttttatgccgactttttattgagcagcatattcaagagcgtcttgtccgacgcgcggaacggcttgaccgcacattcatattccgtgccgtcctcgtcctgcgtatggactgcataagtattccccttgatgactttgcccgtgttctcgtccgtgatttcatagggcttgagtaccaattccgcctccatctccgcgccgaatacgatatccagtaccttatatccgccgttgtcgggcggcacgatcagtactcgcgcatccttaccgcggaccgttcctttaatgaaatacgaataatacgtcttttcgttcttctcgtacgtttcgcgttctactttgatctgcttttccattatgctgctttgcctcctttattttttcttttcttatcgataataggtttaatttccttccaggatttatgagacagttcacctgcctctgcttttgagaagcctgcatccagcgcctgtttatacttaaaatccccggcattatcgttttgcgaaagaagatatcccgaacgcaagcccttttcatactcggtcagttcctgcccttccttctcgccgcgctggtggactttcgctttacgctcttccgcatatcccttcgcacggatacgcggtctgaaccaccgcccgtcacgccggtatttattcgtgcccgattccgcaggcgcgttgtcttgtgcttttgccatttgtttacctccgtttttgaattataaatttgcccgtatcgccgttagcaaagccaaattaaaattatgtaattgtattggttacggttgcggctctttcggcgttttgccgtgtacgcatcgggaaaacggatcctttttctcccgttgttcgtactttttcgtctgtccgcaatccgttttaccctcggttagtctatatatctgcgcgtgtgcatcgtggcaggcaaacgcttgccgtcgagattcctgcgcttgcggccgagtgcttcataatccgcatctcttttacgtgtccgcctgtaatacacgtctcggctcaccgtctccggatcttccataccgtcataaacgatcgatatacgctgtacgactatgtaatcccgtgtgcggtatacattgtccgccttccttaaaaactcaggtgtttgttctttcataactgtctccttttatttctccctgcaaaaatcgcagtagtttcctgtgctgccgatatatataatccggcgaaaagttcatgtcttgcgccaacgcttcttgcgtccggttccccacatataatccgatatataaggcatataacttcaccggtgctttctgaaccgctgcgttatatcgattgactgtcttgataatttcattttcgccaacgtcctttgcggcttggtcaaacatttctcggttcgcataataatatcggacttccttcaattctttacggattgtatccattgactccatatttcacctcgattttttattcgggattttatccctctcacctaatagccacggcatgaaggctttttcaacgggtttttcaaaaattttttaagatttttttcaagcgcgtctttcctctttcaatccgctgcgcaatcgcttgaaaacttacgcccttttcggtcgctaattcctgtaaacctcggccttcgatgcaatgctcataaatcgcccaacgctgagacgatgttagttcgcacagcgcacgatagaactgctcccgttcatctgcgccaatcaactgtagctctgtattcgccttgtcatctacaatgtcgtatccgttttcgattgacttgtccaacgactgatgccgccgcgtttctttccgctcgatttttgcggcggcattttcggcttgtataaactcacgtacaaaatcctcgtctttttccgaaagccatgctgcgatttcatcctctacttctgccgaaaccttggtttcttcgccgtttttgtccttgaatgttactgttacgtttttcattttaaaatcctccgatttttgattttttcttaaaatcgcgatcgggcggatctcgccgtaaatgaaaaacgcccgactgcttgtcgggctaacctttttatgcgtatataaaaaacaccgccggtagatagactgatcccataaaaagattagcctacccgccagcggtgtttcaccgattgttatgcttttcagcacggatacttattcgggcgatttattcttaaacggatttatcgcggtggcactgtttcagcctgaccgtttacctctttcccgaacgatattatttagttttttcccttatactgcgcgtatccgcatcatatacgtttgcggtttgatttgtttcgaatagattttcgcgccgcaacgttcgcagatcacacgcatcgctccgttttcatccgttatgcccgttagtcttttcatacaattcggacagtacatttgttttactttccctgattccttcattctcctattctccctgacgtattacaagaccttaccgttgcatagggaaactgcttgctccggtatgtttcgataccttcctacccggggcttccgtggtatagggaaaattagattttcttcgttatcctcccgcctttctttcctccattattttttataatacgaacgtatgtttgtatttttttctatattataacgcttattgttttatccgtcaagcgcttgaaaagaaaaatcgaggatacgatttttttatcgtaccccgattttttctgtcagttccgcttgacaaaactgcatttcaaattacttaaacgtagatccttaaacgaatacgttgcataaaacacctcttccataaagttccggtcgtatttctgcatcaacaaatgaagttcgtattttccgttactttcatgcaattcatgttctattaccatcgatcctgccatttcttcttcctgttctatgacttcaccgccggttaagatcatctcggaatcgtcaaataatcggatctttatttcgtttgtatctataattacctcttttaccgcttcatcccgaaaaaaataatttatagaatatatatcttcctcttgcttttgcttattgatcgttaattctgataagatttttaactctcttaagttgttttgttcgcaatcctcaaaaatatcgggtaagctgtctaaataatctaatacagccttttttaccttcggaggagcataccccatgacaaacagccgtttatcgggtattcgctgccgtatttttgcaggcaattcctcgtacacccgcattcggttcattagttctgctttgatatcattctccaacgaccggcattttacatttgagttttcaggatcatagtacatatatagcggaaatatattttttgccgctaacacccgcatttgattttcttgttttggtttatccgtcaaataagaggtcgcgtctgcccttatttcatccggcattttaggtacgctttcgtctaatataggcaagaccctgatcccgccctcctcttcggtcagccaatatcggatgttccagatttcgtattgtttataccattctttggtaaaaatcttcatgataagtttttctcctccgaacactctttcaccgcgaatataaatgctttcatctcgtctaacgggatttcttcgttcaacaatttgttgatcgtttcgacgctttcaccgctggcaaacgccaattcctctacggtcattttcttttcttcaagcaattctttgatcctgaatgccatcgctttttcgatcgtcatgggtcatatcccccattcccggtctatgtttaatctatcgtcaattttcggagccgttatttgcacgaattttattcccttttccttgatcagctttatgtattctgtttctgccgcccaatgcttttttaaagattcttcgtcgttcggcaggatcggataatttgaccacgttatcactctcgccaaccgctctcgaaatacgtctttttcgaaatcctttaaatattcgtccacggcatcgatcgtattatcccatagatcggcaagttcgttaaactccgcttcttctccggatattttttgataaatttcatattccaaacgagttaacttttcgtccaatgcctgatattcccggattttatggtcctcgtcccgaatactgttcgctacataatttcctaaaaatactaactgcatcagggcagaaaattctctttcatctaacactatttcaactttttcagtttccatgccgctccttattttatgatgttttatttttaatctttgtcgaaagaaactcgataaaattatccgtttgctcaacgctccatctttcgtattctataaaatattgctctgcgcccgtatccatgtaggcgctgatctgataaatattgaactctcccgtcgttatcgtccggcgataatataatgtatagtcgaggtattcgctctgttgatcgtacccgtcgggatcgccctgcttatattcccggtctatgatcagattgaatttgcaggataggatttccgtttctgtctccactctgttttgtacgagaaagaaactgaccgccttgccgtcgcttatcttatacgttttttcgatagaggaatactctcccgccatctgcgtcaatgtcagattttcattgacttccgataattccgatttacttgatttataagtatcgtcaaaatcgtccttcggagggaatagaaatattgtacagagcacaaaaactgtgatacagaataaaaggcaacccgcgactggtatgatccgtttcacttttttgtttgcaactcggttcgcctgtgccttcggaatcagcgtattttctaaaaacgaacgatcctcttccagcaactcggcgttttccttctctatcgccttttttaaccttttcatggttttcctcacgagatcgttagcgcataggcatctacgatttttacttcgccgatattgatatagcccttatcgtacaatgccacacccaacgcgccgtatacatatttatccgtcctcgtcttgtttcctgccaaagtataattcacttccagacagccaaaccccgccgcggcatgatttccgtttgtgatctcatattcaagaaaatcgtaaccgtccagctcggatatttttaatcctctgtaattttccatgaacaaggctatcggttttccagacgttaccgccgttttggcagagttataattgaaagtccgccatgacataaggctcgtataactcgcttgatatccctgtctgttcgcatattttttaaatccgcttttgaagtccgataccgttgcgccgtttccatccgttcccgtatctatataaagctgatcgaacaccgctctcgtttccggagtgtccgaaagatacatataactgcccataaaagatacgcccggttcgtaattcgggatcaaattcggatacgttttatccagatatacgaccaggttcacgcacatttttgcaacgcaggaggctgcctctccgtgcatacagccggggatcgacggcagcatattatatttgttctccgacctatatatgtaatctacccgcttattttcatagtaagcgtcgcccgttccgcgatatgcgtcctcgcctaacagttctaccgaattttcagaaacaggcagatttgtttcgcagtcatagaaactcccgccgtcgctgtaccaatagataccctgcctaacatatacatttttgccttcttcctgacgatacgggctttccccttgcggataaaactccgttacgcgtaacgccccgtcgtctatcaatagcgcaaagccctgttcttcgccgtatataaaactgtaagcgatacccaactcattcaattcaatatcatatactctttccttttccgccgataccgtagtggtgtcggcattttcatagtcgaatatttcgtttaacgtttcgtagaacagcatatctgcctcgctttcgacaaccgccgcattcgccgtaatgccgatccccaacatagccgcgatcattgccgttaaaacaacgattgcaattcctttgtgcattcttttcatttttcttcctccctgaaatgaatttttaatttatttttagcgatgcggtgatgatattttaccgcatcgtatttttcgtttaacagttccgcgatctcttttaatcgaaaacgttcccaatagcgcagataaattattttctgctcggactcgctcaatccttctaatattgacttgatagccaatgagataatgaatgttcataaaacgcgaatgaacaaaaaatcagtattgagcattttagaaaaccaacgcgacgaaatcaaacgttcattggctaacattatgaaagccgtcgaaaaaggtattttcaatgcaacaactcaatcacgcatggaggaactcgaaaagcaacttgccgacgttgaatcaaacattgccatagaacaatacaaagagaaaaccattttaacaaaagaaaatattattgactttctcacgaacgccattctgcaaaaacctaaaaagatgctgcaaactctgatacaaaaaatcgtcgtatatgatgataaaattattatctattacaattttacagataaaacaaatcccgatgaatctaatcatcgggaatctttttactatccgggttcggatagttccgttatggtggagataaacggactcgaaccgtccacctcttgaatgccattcaagcgctctaccagatgagctatatccccatgattgcgcggcgtgaagccgcgcggaaatttaaaggattggaataaaattaattattccggtttgatcgcggaaacggggcaaccgtcttcgcacgcgccgcagtcgatgcagacgtccggatcgatcacgtattgagaatccccctgcgaaattgcgttcacggggcaggtgtctgcacaggcgccgcaagaaatgcactcatcagaaatggtatgtgccatatttataacctccgattgttcttcataggcggaaaccatccgcttttacccgagtattatatcacatatttttcgattagtaaattgtttttcgcggctcaatcgagtaaatttttcagatctttgtccgctttgtcgtcgggctcttcttttttcccgcctttgaaaacaattttgtccaaaggaaaatctttgtagacaagactcccgtccttgttctcgattttgacgcgaaccgtctgtttcagcatgttttcggaaacgacggtcccctttccttcgggagtcgtcgcctcgctgccgagtttgggcatctttttataaatttcgctgtaatattcgttttcataggaaaggcagcacatcagcctgccgcaaagaccgctgatcttcccgggattgagcgacagcccctgcacctttgccattttgatggaaacttttttgaactcgggaagcgcccccgcgcagcagcattccctgccgcacggcgcgatgccgcccaaaatcctcgtctcgtctcggatgcccacctgacgaagttcgatgcggatatgaaacaccgacgcgagatctttgaccaactcgcggaaatccactctcccgtccgcagcgaaataaaaaatgactttcgtgccgtcgaacgtaaattcgcagtcgatgagtttcatgtccagattgtgcttgcggatcttttcttcggcgatcttcatagcgccgggtttgcgctcggcgttctttttgacctgttccctgtctttattggtggcgatgcgcaccacgggtttgagaggctgcaccacctcggcgtcgggaacgtccttgggcggaaacgcgacgacggcaaactccgtgctcttgctcgtctctaccacgacttccatgccttcttcgtacgtttcgttatttttcggcgcgaaatagtaaattttaccgccgtctttgaatttgattccgattactttcatcgtccctccaggatccgtataaacaacgtttcgtaagtcattgcgggatttgcattgaatttcaggttgcgttccgcctgcccgatcgcctcctgcgaaaataccagcgcccgttcatcgtaccgtttcgcggctttttccagaacggcgcgttcgccgccgaacaaaagcaggtctttacggttcaggcggagcatcagcatatcgcggaatgcgagccgcaaaagaggcagaaatttgttgccttccactttttccgaaaccagcccccgcgcgaattcgaccgcggtcgacgccgtgagattgagcgcgatctgagccgcctttgcggagagttccgtcagcgagccttcgcccgcgagttcttcggcttttccgaggtttccgcccgaaatcgcggcgatctcggcgatgtcttcgcggtagggaaatttttctttgagcgccgcggcgatatccttttcggaaaacccgacgagctcgagttttttgacgcgggagagcacagtgggaaggacggcgtagccgttggtcgagccgagaatgaaatacacgttttcgggcggctcttccagaattttcaagagtttgttctgcgccgccgcgtttgcgtcctgcaaggcgtccagaacgtacagtttgcggtcggattccaggggtttcacgtacgcgtcgtcgatgaccgccctgacgtcgcccaccgcgatctttccgcccgtttccgcaggaatgaccgccatatcggcaaatcgctcttcgcggatcagcctgtcccgccgctcgtccccgcccgcgacgagcaccgcgagttcctttaaaaaggcgcgcaggttcgccccgtccgggcagacgagtaaatacgcgtgcgagagcgtaccgcttttcgcgtcccccgcaacgatgcgataaggtttactcttataaaacaggctcaccgtcgattcctttatttcagatagccgcgcgccgttaacaggcgcacgatattttgcgaagtccggaacttatcccccatacagtcgatttcagcgaaccgatcgggatagcgcttcaaaagttgcagatagccctcgtagacgcgctgatgaaaattttcgcccgccttttccatacggtcgttttcgtcggcgccgtgcttgcgcgcaaacgcgcgccgaggcgggatattcagaaacaacgttacgtcgggcatataattgcggagggcgtattcgttgatcttttccagaaaatcgatcgacagcccccttccgtagccctgataggcgaaagaagagaagatataccgatcgcagataaccatttcgccgcgctcgagagcgggctccacggtgtctttgagatgttgtacgcgcgcggcggcgtataaaagcgcctcgcactcgtcgctcatctccatgaacttgccgtttaagataatttttcgtatttcttcggagatctcgccgccgcccggctcgcgcgtgacgacgtgcgggatatttttatcctgcaaatattggctcaaaaggcgtatctgggtagatttgccagacccttcgcagccctcgaaggtgatgaaggctcccctcatacgcgtcccccgatcttgatgacgctgatctttccgttcttgacgccgaacgtgtttttcgcgcgtttcaagcattcggcagtttctttgccgatgacctcgcccgcgatgacgagcgggaaacagggcggcgtgacgcccgcgttgcgcgcgcagactttgcccgccgccttttcgaggggcacttcctgcaccgcgaaggtaagggcggtgagataactgaattttttgacgccgcacacgtattcgggcacggcctcgtaagtgtttttcaaagatttgttgcgcgcgacgcggcggagggctcggtccagccgattgaggcgggaagccgtcgtcgccgcggtgatataaaataccacgtagcgaccgtcgttcatttccgcgaaaatgccgcgcttttccagttcttcgcaggcgagatagggagaaatacccataccgccgaaatccaccgcgaactgcaaagtggaagaacctttataaaatttgacgccctttttggcgaggcgggatttgacgagcgcaagttcgcgtttgatggaatcgatgagccgcgcgccgtgctccgccatgtacttgacgccgaattcgacggacgccatgatgagataggaggggctggtcgtgcggaagatctgcaagccctcttccgccgcggcggcgagccgctcgtccctgacgtttaaaatcgcgccctgcgtgagcgtgggcagcgttttgtgcgcgccgtccacccagatatccgcaaagtcgcccgcatacgccgcgcccgattcttccgaaccgttgtccgcgtcgaatttgaggtatgcgccgtgcgcgccgtccaccatcaaaagttttttatacttttcgcagatcttacggatcttttcgtattccgcgatattgccgtaatagtcgggcgaggtgagcagcacgccgcacacgtcgctctctttctggaacgcttcctccacgtccagcggcgtgggcgggagcagaacgccgtctatctcgtttgcttttaagatatacggctcgatgcctaagagggcgcaggcgttgtagacgctcttgtgcgagttgcggccgatgatgactttggatccgaatttgcgcgcggcgaacagcatggaaagcacggcgcacgaagagccgtccgtgacgataaaactcctgcgcgcgcccaatatttccgcgatctcgcgctccgccacggcgatcacgccgtcgggatcttccagacagtcggaaaaggacaactccgtgatatccagagccgcatccctgaacaaggaaaatattttgcggtttgcctgatgtccgggcatatgaaaacgcgcggggcgtatgcccttgtactttttcatcgcgccgagaattcggtattccatgctctccctcctgcgtcgtttacgcggacagtttgcccgatttgtcgtatgtggtcagaataaaattcagataggtgatcggctcgaactgcagatcgtactgcgacgccgcccaatcgaacacggaaagacagatcccctcgttgctcttatctttgtcgccgttggtgatatattccgtgatgttggtcagattgctcagatcgaaagcgcagcgaacggtcttccattcgtcatcgtccacgttgttatcgttgtttttgtcctgccagatcttggtttccttgatggaaagcacgccgacttcgagcgccttttgcacgttcagataactgtcccgcaagttttcgatgcgcgccgtttcgtcttttataccctctgctatctgcgcttccgtcttataacgcttgtcctttttcatgcgggtgcggaaagaattttcaactgcgcccgcatccagatttccctcacggaaatcgccgtccgtataaaactgcgcaagatatttttcgcacgttttcagatagtcttccttgacgatcttcccatcgtcgtccacgtagtcttcgccgaggggcgctaggatcgaataatacgaagtggcgaactgctgcaatctgctgaacgtttcctcgccctctttttcaggctcgggtttcacgtcggatacccacaaaatatcgccctgtttggcggaaaaccacgccgccatcgcctgcgaagtctgcgagtcgtccgaaaacgaaccttgcgtaaattcgagtacgtcgtaagaaagcgcgttcttctctttcagataatcgagggtgttgagtttttcgttattcttcaattccatatcgttgaagtaatagaaataaaacgtctgcccgatggtagcgcgcgttgcgagcatggtgaacagcagcgaccagacgatgatcgccgccgctgcgatcgcgatgatcttgatccaatcatacgatagcatatgcccgattctttttttgctgatgtgtgcgtccatgcgttatttttccttattttgcgccgaaagccggcgtttattcgagaatttctttgatctccactttgaagtcgccgccgggggcgtgcaccgtgaccacggcgcccttcgcgctgccgaggagcgctttgccgaagggagaatcgatgctgatgacgttgttcatggggtccgcctcggtcgtgcccatgagggtatagaccgcctcttcttccatgtcgtaatcgtacactctcactttgcttccgaaatggatcttggaaatatccgtactctcttcgacgatcttcgcgtttttgatcttggcctccagttccaggatctccccttcgttcatcgcctgttcgttgcgcgccgcgtcgtattccgcgttctcgctcagatctccgaacccgcgcgccaccttgatgcgctcggtgatttcctttctcttttccgtttgcaggtatttgagtttttcgaccgcctcgtcataccctttctgcgtcatgatgaattcttccgacatttttcacttgctcccgtgattccatatttgttgataaaacaatgattccgccaatcagaaagcggaatcactcttactctttttatattatactctttcttttgaatcttgtcaagcggctttgatttttttcggcttaccgacagggcaaagcagggcgaattttgcatttttctcgcgcttttcagccctttttcacttggtccaggtactttccgatgcgcgaagccgcctcgctcagattcgccatgctcgtggcataggaacagcgcacgtgaaatcttcccgcgtcgccgaacgcgttgcccggaacgaccgccaccttttcggcacgcaaaagcccgttcgcaaaggcctcgccgtccgtttgcagcgattccaccgacggaaacacgtaaaacgcgccgcgcggctcgaaacatctgaggccgcagccgttgaaaaaatccaccataaatcggcggcgcttgtcgtattccgcgcgcatggtctcgaccaccgaaaaattgtcggtaaagccctcttccaacgcctcgatggcggcatattgcgaatttgtcggcgcgcacatgatgacgtactggtgtattttaaagagcgccttgtctatttcgggcggcgcgcacacgaacccgatgcgccagcccgtcatggcgaacgccttggaaaagccggaaatgagcacggtcctttcccgcatcccttcgaacgaggcgacggaaacgtgcttgccgccgtaggtaagttcggcgtagatctcgtcggaaatgaccagaaggtcgtgctttacgatgacgggcacgatggcttcgagttgttctttggtcataatgccgcccgtgggattgttgggatagggcagaatgatcgcctttgtacgcggggtgatcgaaccttccagcatttcgggcgtgacgataaacccgttttcgcgcacgcatttgacggggacggcgttcgcgcccgaaagatgcacgcagggaaaataggaaacgtaactgggttcggggaccagaatatcgtcgccgacctcgcagatcgcgcgaaggacgaggtcgataccctcgctcgcgcccacggtcacgatgacgttgtcggcgggataggaaacggaaaaacgctcaaaaagatagcgggaaatgagttctctgagtttgggaatgccgcggttgcccgtgtactgggtatagccgcgctgtacggagcggatggcagcgttgcggatatgccagggcgtgataaagtccggctcgcccacgccgagggagatggcgcccttcatttccgatacgatgtcgaaaaatttacggatgccgctcggctttaaatccttgacgcgctgattgagaaagtctttcatggctgtacggataacctcatggagtcgtccggtctgtccgcgatcgtgccctcgatcttgtattttttgaggatgaaatgcgtcgccgtggataagataccgtcgatggtggacaggcgttcggcaacgaaacgcgacacgtcgcgcagagatcttccctcgataaacaccgccagatcgtaaccgccgctcatcagatacaaactctgcacctcgtcgaagcggtaaatctcctcggcgatggcgtcgaaaccgttcaccttctgcggcgtgacgcgcacttcgatgagcgcctgcacgatctcttccgacagggcttcgccgttgacgatcgccgtgtacttgacgatgacgccgctctcttccatatttttgatcgcggcggaaacctccgcttcgctcgtgtcgagcataacggcgatcttggagggggaatacctgcaatcctcttcgaggatctttaaaatgtccgcttccagttttttcatttccgaactccttgtttttcttgcaaacagtataaacttttcaccgccccgctgtcaatcagattttactttttcgcgcaattatgttaaaatagaattatcatcggatcatacgttaaggagaaaatatgtttaaactttgggcaaagatcatggcagacgggaagatccgccgccaattcgtctatgaaccggacgaaaaactcgattattcgcattttttgtcctatctcatggatatatgccacgaaatggatatccccacgcccgtgctcttgaagacgcatattttcaatttcgcgaaattcaaccacgtcaaatttctgccccgcgattttgtggaaagcgtggatttcgattgccttcttttggaaaatatcgtcctgtaatgcaaaatttcccaaatgttgcgcatactttcgggtatgaagatttccgcgattctttccattgccgcgctcattctctgcggcctgaatttttgtatcaacgccctgttcggcgtggacgttctgctcgttttatgcgcgtacaacgccctcgtataccgcaccgtcaacagttttttcggcgtggcggcgctctttatcgccttctggacgatcgctttcaagccttttcacaatctcggctgaaaaatcgttgacaaaaaggcaggatttttgttatcataacggcggtaggttttcggaaaacactacttaaaaacaaccgaggtaatttcatatgaaaaaattcacaacaaaaatgttgtgcagggcgggcatcgtggccgctctgtatgccgtgctgaccttcgctttgggaaatctgtcgttcggaactttggggttccagatccgtcccgcggaggctcttactattttacccctcttttacgcggaatgcgtgcccgcgctgttcgtgggctgcctgatcgcaaacctcatttcccccgtcggcccgtgggatattttcggcggaagcctgatttccctcatcgccgcgctgtgcacttattttgcgggaaaactgatcagaaacacgccgctgaaactggccgtcggcggactgttccccgtagcgctcaacgcgttcggcatcgccgcgatcatcgtatttaccgcaggcgaggcgctctcttatccctttatggtgctttctctcgccgtgacgcagtgcgtatgggtctatgcgctgggcgttcccctctacttcggcgtgcgttccctgcgcgaacgcggcattcccgctttttgcgacgagcgccccgtaaaaccgatctcgtaaacaacaagccccgcggcacagccgcggggcttttccaatatttgccaatacttttttcaaaaaaaagtgcttgacaatcgctcttcaatcatttatagtattacaaagaggattatgttgcatttacaacaaggagtggggagtggaaattacgacgtccctgtttgacggggttacaaaagacgaatacgacgcgatgatggtctgtttcaaggccgtggtgaagacctataaaaagggagaagagatcacggtcgggcacgaccgcgtaggcgtggtgcagaaaggcaaagccagccttttgaagaccgacctgaacggcgtgcgcaccattttcgaacagttgcgccccgggggcgtgttcggagacgtgctcgcgttttcgggcacggacgccagttttttcatcgtatgcgacgaggactgcgagatcctcttcatcgactacgagcatatcgtcaagcgctgcgaaaaggcgtgcacgcatcacagcgtagtggtgcagaacctcgtaaaactgatgagcgaaaagacgcaggcgctttccgaacatctggaaattttaagccgccgcaccatccgcgaaaaacttctggcatacttcgtgaccgctgcgacgaaaaacaaaaattattatttcaccctgcccttttcgcagacaagccttgccgactatatctgcgtggacaggagcgccatggtgcgcgaactcaaaaagatgagccgcgacggcatcatagaaatggacaagcgcaacgtgaaactttgcgcgcaatattttaaaaagtaaaaaacaagagcctgttccgaaaggaacaggctctatttttacagacattcctgcaaaatttgtaaaatatctttttccgtaagcggcgaccaggcattttccagcccctcgtttacggcgatatgatgcgccatttcgccgaggcgctcgctgccgatgcccacttctttgagcgtcatgggcaggccgagcgaaacaaaatacgcatacgtcttttcgatcgcctcgttcgcgacggcaaaaccgtccttgccgtttacttcgatcccccatacgttttgggcgtaatttacaaagcgttcgagcgtcttttcgctcaggatatgccgcatccatcggggcgtgacgatggcgagccccacgccgtgcgtgatgtcgtaatacccgctgagcgcgtgttcgatggcgtggcacggccagcccgaatagcggttgcccaaccccgcgatgccgttgcagcccaaagaacttgcccacatcagttgtgcgcgcgcctcgtaatcgttcggatccccaatcgctttgggcgcataacggatgaccgtctttagcaaactttcgcaaattttatcggcgagatagttgttgggcgcggtaaaatactgctcgatcacgtggttcatgatatccgccgcgcccgccgcagtctgccgcgcggaaacggtataggtgtattcggggtctaaaatcgagagcgcggggaagagatgcccgtcgagatagccgactttgtcgttggtatcgggcttggagatgaccgcgccccagtcgtattcgctgcccgtggcggagagggtgagcacggtgacgagcggaagcgccttttttgtagggactttgcccgtgatgagatcccacgcctgcccgtcgtaacacgcggcggcgcagatcgccttggaacagtcgagcacgctgccgccgcccaccgcgaggacgacttcgacgcctttttccttgcacatcttcgcgccctcctccacgctttgcagtttggggttgggttcgatgcccgaaagttcgtagatctcgaaaccgtccaacagttttttcaccttgtcgtacagtccgatctttcggatactgccgccgccgtaagtgagcagtacttttttgccgtaagcggcgagccttgcgggcagttcttccacctgtcctttgccgaacagcacgcgcgtaggcgtgcaatactcaaaattttccataataattcgctccttatcgaatttatattccgtaaacgagatcgcggacgatctcgcccgccatca

SEQ ID NO: 3841 - DNA, 32759 bp, Unknown
  16S sequences of unknown bacteria
tgcgcaaaatttaaaggccgaagaaaggcttggtttgaatatgggatcaagaaaaattccgacttccaaaaaaaattacgccgaatacgatgagtcgacagaacttgagttcaccgaaaatcccggcggaaatcatgaggacgatccttttctcgactcgctcgacaagctgagggaaaaggatatctcgggagcaaagtctccgaagaacggcaagaaaaagaagatctcgcccgtgcgcaccgtgacgctggttatcagcctcgccgtttttgtcacctgcgcagtctatcttgtatttaatctcatacagaaaaagcaggggcaggagttttacgacaaccttgcaaaagaatatttcggcgggatctccttttcgggaggcgaacagaaggacgacggtgcggtcaagcgcctggtgaagatctcatcggcatcgaaggtgctttgcttatccgatcgtctcgctctcggcgcaaatgtcgtatccggagattatgacgaaaagctcgcggaaatgcgtgcgagtcttaccgccctttcggagcagaatcccgacacctacggctggatcaccgttccgggaacgaatatcaactacccgataatgcagacctcggacaacgagttctacctcgaccacatttacgacggctcctaccgcgtagtcggttcgatcttcgccgattggagaaacaacaagacaatataccgcaatttcaacacagtgctctacggtcacaacatgaccgacggctcaatgttccacgatgtcgtcgcgtttctcaacgaggacgttttcagaaacactctgatatacatctacaccatggacggagtgtatgtttatgagcccttctccgtgtttgagacccgcgcggactacaactacttccgcacggagtttgcaagcacggcggacttcatagctttcgccgaggaaatgcagcgcaactcgaaattccagaagaatatggaatttctctcgacagacagaatgataacgctttcgacctgcacgaacagtacgacgcagatcggacgctactgcctccaggcaaagcttgttcaggtcataagctgatgatgcgccttgtatgtccgctgtgccgcgagcttctttgcgaaaaagaaagctcgcttgtatgccccgcaggtcactcatacgatatcgcgcggagcggatacgtcaatcttctgccgcccggaagacgttccaacgcacgaaccggggacgattccggcatggtcgccgcacggcgggattttctctcgcgcggatactatgacaggtatgtgacggagagtgccgaggctatgaagcgctttctcggcaaaaatccggaatttctcatagatgccgcgtgcggagaaggtcatcacacccgtattctttcgaaggtatcgggaagcgcgctcacgctcggtgttgatgcgtcaaagaaagcagccgatgctgcggtgagatcgtcccgagatgacaaaagcatttccttcatcgcgggaaacatcttcgatcttccgatcgcatcatcgtgcgccgatgcgttttcggttctgtttgcgccgattccgtacaaggaagctctgcgcgttctccgtccgggaggatgtctcctgatctgctcggcggcgccggatcatctggcagagctgcggcagataatatacgacgacgtaataacgaaggagaccgccgtgcccgcgcatgagagcttcacactcggattccgcgaaaatataaagtacaccgttgagcttgacgcggcagagcttgtatcgctgttcgaaatgaccccgtttcgttaccgttcgcgccccgatgcggctgagcgcgtagcctcacacggcaaaagccgcatgaccgtatccgttatgtgcaatatactgataaaaaaacccaatacatttcaatgaaaggcttaaacaatgaagatatctgtctgtgtaccgatgtataacgaggaaaagatcgccgccgactgtgccaaaacgcttcatgatgtcatgagtgcaaatcaggtgatgaccggagacgattttgagattattttctgcgatgacggcagtaccgacaactgcggagagcgcgtccgcgagctgacgggggaataccacggtctccgcgtcgtcggttatcccgacaacagaggcaagggctccgccgtaagagaggcgatcgccgcctccgaaggggatatcgtaatgtaccttgactgcgacctcgcttacggaacggatgtagtccccgaggtcatacgtaaaatgaaggaaagcgattacgatattataatcggctcgcgcaatctcaccgatgacggctatgagggctacacgccgataagaaagcttgcgtcaaagacatatatcaaggtgctgaatctctgcgcaggattccacatgtctgattcgcagtgcggattcaagaccttccgcggagatatagcgagaaagatattctcatactgcaggacagacggattcgcattcgacatcgaagcgataatgatcgccgaaaaaatgaagctcaacatcggcgagatcccggtcaagataataaatcaccgcgattcaaagataaacgtggtgcgtgacaccttcaagatgctcggcgatctcaagcgcatcaaaaagcgcgtgaaaaagcttgatatagaataattccgcctcgggttaaagagcgcggacaaaaaggcttcggcaaacgatgtttgccgaagcctttttatattccgattatttcttatagagtgcgccgtatgccgcgcatgcacggaagtcctgaccttccttatccattccgaatgcgttccagcatgcgggacggaagatctgatcctcgggtacgttgtgcatcgcaacgggaatacggagcatcgagcacattgtgatgaggtccgcgccgatatgaccgtagctgatcgcgccgtgatttgcgccccaattgttcatgacatcgtaggtgcttgtaaacgcgccctttccggtaagacgcggagcaaaccatgtgcagggccatgtatagtccgtgcgcttccacaggatatcggaaacctcgtcggggaggttcaccgtccatccctcggcgatctgaagcatcggtccgaggttcttcacgagattcaaacggatcatggtaacgggcatctgcgcaacggtgagaaatctcgaagagaatccgcctccgcggaaatatccgttgtcggcggggttccacgtcgtcgccgcaaggatcgaatcgatgtcctcgtcggtgacatcccaccattccttcatcgtgccctgtccgttctcatcggttgcgatgccggtcgcgtcaaggcaagcggcaccggagtttataaggtggattataccgttctcggcaactccctcgggagtgtagccggttgcctttttgatcgcctcggggctccaatatgtgcggacgtcggcgaatatctgcgcacggttggtgagcagcttcatgaacatcattccgagaccgttgagcgtatcgttctccgttgcgagaatgtacggttcgcgtgcgccgttccaatcaaatgacgtgttgaggagagcctcggcgaaatcggcgttcggatagaagtccgtccactgacgctgtccctggaagcccgcagcaagtgcgttatgtccgacagcctcctcctcgcagccctcaggaagcttgtcgtttccgttcatgagatccttgatgatgaccatcatctttacgacgaactcccaatcgcggtctttctcctcgcgggatttctggaggaattcgggattcttgtcgaatccctcgcggcacttttccttcgtccatgcaagagccttctgatactccgcctcatcatagatgccctccgtcatgcggcggatgatttccacctcgtcgacggattcaacgcgcattccgaggtaatcctcaataaatccgggatcgatgatcgagccgccgatacccatgcagatcgagccgatctgcagatacgatctgccgcgcatcgtggcgacggcgaccgcagcacgtccgaagcggagaagcttttcgcggacatcgtcggggatatccgttgcatccgcgtcctgaacgtcgtgtccgtagattccgaacgcgggaagtcccttctgcgcatgcgttgcaagcacggacgccaagtaaaccgcgccggggcgctccgttccgttaaagccccatacgccctttatggtgttgggatccatgtccatagtctctgcgccgtagcaccagcaaggcgtaacggtaagtgttatcgaaacgccctcgcgcttgaactgtgcgtcaacccttgcggtctcgccgacacgtccgatcgtggtctcagcaattactacctttacgggctcgccgtcggtgtagcgcagattctcctcgaaaagcttctttgcagcgcgcgccatgttcatcgtctgctcctcgagagactcacgaaccttgagcgcaccgcggcgtccgtcgatcgtcggacggataccgataaccggatagtcgccgataattctttttgccataatatcctccttcgccgcacacgcggctgaataatttttatgatcacggcacatcagtgccgcagcgtttgtactgcaataataataccacatttcgggaacaaattcaacgaaattttgtcatttttatcagcggtgaacgatatttatcatgccggaggcggcgggcgttatttttatgcccgcatcacccgaataaactcccgttttttcgaaaaaagtttcattttttctcaaagcaggttgattttttaataatttgaggttacaatattatatactgaaataaaatacaaggagattgcaaaatggctcttgttaccactaccgaaatgttcaaaaaagcatatgccggcggttatgccatcggcgcgttcaacatcaacaacatggagatcgttcaggctataaccgaggctgccgcagaggcaaagtcccccgttatccttcaggtttccgcaggtgcccgcaagtatgcaaagcatgaatacctgatggctctggcaaaggcggctatcgccgactccggtgtcgatcttgcacttcatctcgaccacggcgcagacttcgaaatctgcaaggcgtgcatcgacggcggtttcacctccgtaatgatcgacggctcgcaccacaccttcgaggacaacattgcagttaccaagaaggtcgttgaatacgctcacgctcacggtgttgtggtcgaaggcgagctcggacgtcttgccggcgttgaggacgacgtaaaggtttccgccgaggattcctcctacacccgtcccgaagaggtcgaggagttcgtctccaagaccggcgttgactctctggccatcgccatcggcacctctcacggcgcttacaagttcaaggccgagcagtgcacccgcaacgaaaagggcatcctcgttccgccgccgctccgctttgacattctcgaagaggttgcaaagcggctgcccggattcccgatcgttcttcacggtgcatcctccgttccgcaggaatacgtccgcgagatcaactcgatcggcggaaagcttccggacgcgatcggtattccggaggaggagctccgtcaggctgcaaagcttgcggtatgcaagatcaacatcgactccgacatccgtcttgcaatgactgccggaattcgccgcgtaatgcacgatcagcccgaggtattcgacccccgcacctacctctccgttgcgcgcgacgagatcagaaagctcgttgttcacaagatcaccgacgttctcggttccgcaaacaccctttgataaaatacatgaaaaagtgccggttctccggcacttttcctaacggaagatattcacggcgcaaggcgcaatgccgattccgccgaaacaccgaaaggcaggatcgaaaatatgaaatggtctgaagaataccgcattaattcccacgatatcgatgaaaaccgcatagtctccgcatccgcgctaatgcggtatatgcaggacaccgcgaacctccatatggcggcgatgaggccgtcttacgacgacctcttcgacgcgggatactcctatgttctgagccgcttttccatgtcgagctacgcgccgctttactcccacgaaaccgtgatctcacagtcgtgggcgtgcgagagccgcggagtaagccacaaccgctgctaccgtatcatgaaggacgatcggatcgtcgcggaggcggtttccgtatgggcgctcgtgagcatcaaggacaggcgtctcgtgcgcgcgaacgagctttcgctcgactacggaaccgacgaaatgcttgatctcgatatgccgacgaggttccgcatcccatctcatgtgaatccggtgctcgttggcgacaggctcaccgagtatgccgatgtcgatatgaaccgccacatgaacaacacacactatccggatatcctgtgcggttatatcccggagatctcgggcaaccgcgttatatcgatgacgctcaatttcgtgaacgaggctccgctcggcgagaggataaagatatactcgggaaagtcggacggctcatactatttcagaaccaaacgacctgacggtaaggtcaacgtggaagccgaattcattcttgaagaaatttgattccggaataatcccgaaaagccctgcccaaagcgtgagtctccggtatcggcatacttacaagcgccgcctccgtcggatcaacgcagaacataaagaagccgccgctgtgaaaacagcggcggcttttaattttcccgaaattatctttcttcgcggaaatacggaactccgagcccctccggaggctgattttcctttctcttgcgaaggctcgtgataataagcacgacgatcgttacgatgtagggaagcatcttgaacagctcctgagaggaacgggtgagatttgaaatgtagaagtacatccagaacaaaactccgaagaggtacgcaccccagattgcgttcagcgctttccatgtggtgaaaataacgagcgcaacggcgagccagccgagcttttcgatggagccgtcgtttgcccatgtacccttgatataatccattacatagaacactccgccgagtccgcatatgcccgctccgaggcaggtcgcagcgtacttatatgcggtgacgtttattcccgcggcatcagcggtagaagggttttctccgactgcacggaggttgagtcccacgcgggtgcgctttataacgaaattgaggatgatcgcacatatgatcgcaaaatacaccatgaacccgaatgacgagaacagctcgccgatgtgcgcgaatccgaccgaagaaagccccggcatcggcgttctgaatgcggagctcgttaccgatgtggaaatctgacctacgcctcccgcaagcctattgagcgatccgccgaagaagtttgcaacaccggagccgaagatcgtgagcgtaagtcccgtaacattctgatttgctctcagcgttaccgtaaggaagctgaaaagcaatccggcaagagcagctgcggcaaacccgctgaagaacgcgatgaggacgcagagcacgggcgacggagcttcaaccgaattctcataaaagaacacgcagacaaggcttgcaattccgccgatatacattattccgggaacgccgaggttcaggtttcccgatttttcggtaaggatttcgccgaggcatccgaacatgatgaccgtaccgaaaattatcgcggactgaagcagagatatcaatgcgcttaccgacatattactcagcctcctttttcgagcggaatatgagcttatagttgatgaagaactcgcatcccaaaatgaaaaacaggattattccggttatcatttcggatacgtaatcgttgagtccgaactgagacgcgatctgcaccgcgcccttgtcgagaaataccaggagcgcggagatcaccgccatgccgatcggattgaacttggcaagccatgcgacgatgatcgcggtaaagccgttgccgcccgcggtgttcgtcgagattgtatggcttgcgcccgaaaccgcaacgaatccggcaagtccgcatatcgcgccggaaatgagcatcgtgcggataaagaccttgggtacgtttattcctgcgtattttgcggtgttctcgctttcgccgacaaccgaaatttcatagccgtgctttgtatatctgaggtaaacgaacataccgatcgtaagagccgccgcaatgatgatattcagcgcgtaggtctgaccgaacagcgcgggaaaccagccgatccttgtcttgggattgatgattccgacggaattcgagccgtagggattttcccaaagcgcgacgcagtatgaggtaagctgcactgcgacgtagttcatcataagcgtaaaaagcgtttcgtttgtgttccacttcgacttgaagatcgcggggatcatgccccaaagtgcgcccgcgacgcagcttgcgataaccatgagcgggaacaggacatatgccggaaacgtatccgaaaaatagatcatgaaagcggctgtcgtgattccgccgacgaggatctgcccctcggcgccgatgttccagaatttcatcttgaatgcgggagcaagtgcgacgcctactatgagaagaaacgccgtatccttaaacatactccacattctctttttcgttccgaatgcgccttcgaccatcgcgccgaacaccttgatcggattgagtttggtcagcgcataaataagcgcggaacataccacaagagaaagcgcgatcgcgcagaggcgtatgatccatgcgcggacaaacgaaatgtttgtgcgctttgccatacggacgatcggctctcttacctttgcgtgttccttcgtcatatcacttttcctccttcatgaggttggtcataagaagtccgacctcttccttggtcgtcgtgcgtgcgtcaactatgccgttgagcttgcccgagcagagcaccattattctgtcgcagagctcaaggagcacgtcaaggtcttcgccgacgtaaatcacgcaaacgcccttcttcttctgctcattgagaagtctgtatatcgtataagatgtgtttatgtcaaggccgcgcacggcgtatgcggtcatcagcaccgtgggagcggatgcgatctcgcgtccgacgagaaccttctgcacgttaccgccggaaagctgccttacgggagtatcgacatcgggggtcacgacctcaagcttttcgcggacattttccgcaagctttttcggctcacggcgatccgcaaggggagaatgcccctccgaataattcttcagcatcatgttgcccgtcattcccatggagccgacaagtcccattccgagacgatcctcgggaacgaacgagagcgagattccgagatcgcgtatctgcttcggactctttccgataagcgggatctcttttgccgcgccctcggcaaaatattcgatcgagcttccctgatcgacggggttaagccctgcgatcgcctcaagaagctccttttgaccgcatcccgatattcccgcgatgccgagtatttctccgctgttcgcggtaaacgaaatatcgtcgaggacctttatgccgtccttgtcggtgcacgaaagaccgcgaacgactatgcgaggctccggattcacgggctccggacgctctatatcgaggctgaccttttcgccgaccatcatctccgtaagcgaaagctcggtcgcatcagaggtcggaacatcgccgatatactcaccgcggcggagtatcgcaacgcggtcggacaccgacagcacctcatggagcttatgcgttattatgatgatcgactttccatcgtctctcatatttttgattatgttaaacagcttttcggtttcctgaggggtaagcacggcggtaggctcatcgagtatgagtatatcggcaccgcggtacagcaccttgataatctccagcgtctgtttctgtgagaccgtcatgctgtacaccttctgatcgggattcatctcaaagccgtattttctgcatatttcttcaatccgcttctttatctcgcgcagattgtatcttcccttttcccggactccgagcgcgatattctcggcggcggtgaacacatcgacaagcttgaaatgctgatggatcattccgattccgaggttgtaggaatccttcggggaacgtatggagacttcttctccgtcaacataaacatgtccggaatccggaaaatacagtccggcaagcatattcataagcgttgtcttgccgcttccgttttcaccgagtagcgaaagaatctcaccgcggcgaatgtcaagattcacctcattgtttgcgataaccgaaccgaacgactttgttacgttttcgagccgtatcgccggatttttattttcctgcacctgcattttcctccagtcggatttatccgttttccgaaaagttttcattgtgtatcggtgcccgctttgacggcgcacccgaccgatcataaccgctaaattaaaaacagaccgcatctgaacggtacatgagtacggacgcaacactcgcatccgatatattcacagagcgcagcgtctgcaaatgtcaatttctttactttatctataatcggggacggggctgccgcatcagcagcagccccacccgaaaaagcattattgattatcagccttctgcgttgagctcggtgattccgtcgattctgagagtgaacgaaggagcggagcgaagctcggactcatggaaatatccgtcccagatagcttccttgtctgcgtcgctgtcggtcttgaagtcgccgtccaagtcaactatacagctctcaaccttcttgccgtccacggtaaaggtgttgatatcgaacacatggagagttcccgccttaatagcagcaattgcctcgtcaaccttctcctgagttccttcagcgcaggactcgccgagagcggtgatcgcaacggcatcgtcggagtaaccctttgcccaatcgatgtcgatgtcctcacccttgagaagctgaccgaaagcgtaagtataataagcagcccatatgttggtagcggaagtgagtgcggccttcggagcaacgctgagcatatcaacattgtatccgatggagtaagcaacggttcccgcatcgtaagcagcctgaacctctgccggtgcgccggtggagtctgcatgctgaccgatgattatgcagccgtctgccatgagagcctttgcagcctgaccctcagcggcgatatcaaaccacgactgagtgtactgtacttccataacaacattctcaataacggacttgattccgaggtagaatgcagtgtatccggaaacgacctctgcgtaaggataagcgccgacgtacccgatcttgatattgccgtccgcatccttattgctgtccgcaatctttccgtccttgacgagctcagcaagcttcatgcccgcaacgattccggaaacgtatctggactcatataccttggtgaagcagttcttgaagttcttcagtccgctgtttgctgcagtatcaccggtagcggaaacgaaggttatgtcctcatatccgggctcaccggcaacctgctgcatataggtctgatgattgtatgagttggaaaagatagcagtgcagccctgctctgcaaggtcctccgctgtctctttgcactgctcgttctcggggatgttatacttccaaacaacctgatcctccgaaatgttgttttccttcatggcttccttgattccctcgatgtgcgcgtaggtgtagccttcgttctcatcaccgataagaataacgccgatcttgatgttcttcttgttgtccccgccctttgtgtccgagcccgtgtcggtggtgtctccgttgccggatccgccggagcaggctgcaagcgcaaagaggagcgccgcgcaaagaagagccgccagaattttcttcatcatttgatttcattcctccataaatttattttatcggatttcccgacaaaaccacagtcagcggacgaactttattccgtcccgaacgctcatgctctcgatccttgccagggattcgagccgtattccgcggtcgcgcacaagcttagccccgctctgataggacttctcgataacgatgcccgcacctacggtgtgcgctcccgcattgtcgataagatcggcaagagccgtgatcgcacttccctttgcaaggaaatcgtcgattatgagcacgcggtctcccggattcagaaactcctttgagaccactatatcgtaggttttggaatgagtgtaggattccaccttcgacgtgtagacatcggaatagatgttgtttgtcttggttttctttgcgaatactaccggaacatcaaaaaactgcgctgtaatacaagctatacctatccccgatgcttcgatggtaagtatcttgtttacaccgcaatccgaaaaaaggcggtaaaattcctttccgagttcgcagagaaatttcacgtcaatctgatggttaaggaacgaatcgaccttgagcacatctccctcaccgatttttccgtcggcgattattctatcttcaagaagcttcataaagtcactgtccctccctgttttatccgtattacccgatgcgaataatacacgaatattttactatttccggcgtttaatatcaataggtaatatatctaaattatatccgaatgagttgttaattttgtcttattttgtccgacggcttatttcggcgtctatctctattgacccgcgcggggcaaaatgatataatcaaaaacagcattcagcatccgaaaggggaagaaaatgaacataaaagaaaaaacggcttcgctccgtgcaggagagcttgcggtaatatacatagggcaggcgggattcatcatttccgacggcacggtatcggtcgccgtcgatccgtacctctcgtattccgttgacctcgcgatagaaaccggcgacggaaaatggatgaggctttacgcgccgcccgtcatgccggacgagctttcgtttctcgatttcgttttcataagtcacgaccatctcgatcacgcggacccggaaacgatctcgggcatagccgccgtatcggacgcgcgctttgtctccggaaaggcgatctccgggaaaatttcctcgtacgccggtcgtgactccgtcgcgctcggctgcaaaaaagtccgcgatttcggctctttccgtgtgagcgcgctgcccgcagcgcacgaggaagtacacatgaaagacggcgagagcgaggaatgcggatttctgttcgacttcggcggaataaaaatataccattcgggagattctcttgtatacgacggactttgcgactcggtccgcggctcggacgtcatgcttcttcccgtaaacggaaacggattttaccgccgtgaggacggcatcgtcggaaacatggactctttcgacgcggcgcggctcgcgctcgactgcggtacggggcttctcattccgatgcacttcgatctctaccgcgggaacagcgttcccgaaagcgcggtgcgcgatataatctcggcggcggcaccgtctgtccgcacagtttttcctaagccgggagaagggtgcagaatctcgcgcggttatgcggggcttgaggtctcgccgctttaaaatatcgaaaaacggtgtaatttgccacttatatgccgcgtttctccgaggtaaaataattctgaaaaccgtccctccggcagtgcgctccgtgcgcacctccggggaatgcttttcccaatcggaataattttatcgaggtggaaaaatgtcaaacaaagtgatgaacgtaaccaaaagcatgcttacgggaatggtgatcggcggcacgatcggcgtatctgtcgcaatgtcgatgaagaagccgaccgtgcgcacattccgccgccgcgcgtcggacgcgatcgacacggtcggctcgatcatgcgttccgtagcggatttcacaagataaaaaatcgggggagcactgctcctccgattttttcagtcgttattttcgaggctgcgttcgcttccgacggttgcaatatcgtaaggtgtggactgatagacaaaatagttcagccaattcgaataaagaaggttagcgccggaacgccacttcacgacgggctcgagcgtgtcgtcatcgttcgggaaataattcacgggcacgtctatgtcaagtcccgcattcttatcgcgcaggtattccgacttaagcgtgtcgcggtcgtactccgaatgtccggttatgaaaatctgcttgccgtgatccgcgatgacggcgtaaacgccagcctcgtcggaggaggcaagtatcttcagatgagggcatgcctctatatcggcgcgtctcgtctcagtatggcgcgaatgaggaacccagaattcatcgtcaaagccgcggaaaagtatcgcgcgcttataatcgagatggtggcgatatatcccgaacatctttttcgcaagaggatatttcggtatgccgtaatggtagtaaagtcccgcctgcgcgccccagcatatatggaaggtgcttgtcacatgggtctttgtccattccattatcgtgcagagctcgtcccaatacgcaacagcctcgaattcgagattttcgaccggagctcccgttattatcattccgtcgtagcggtttcccttcacatcgtcgaaggtcttgtagaatgcgagcatatgatcctcggacgtatgctttgccttatgggtcgcggtcatgagaagctccggctccacctgaagcggagtgtttccgataaggcgcgcaagctgagtctccgtcgtaatcttcgtcggcatgagattcagtatcagtattttcagcggacggatatcctgcgtgaccgcacggttctccgttataacgaatatattttcctcggtcagcgttttcgccgccgggagcaaatccggtattttgatcggcattttatgattcctttccgtaaagggacgcgctcggcgtccgtttttatttatacagtgacagcgtttcggaggccgtccggacgaattcctccttcacgctgtcgggagacactatcgttatgtcgggagtaaatccgaatatccatgcatagaaatgaaccgagacgaaaacgcggacggtgacatcgaaatacccctctgcgaacgggcgcagcagcacatcatgcccgaaccggtccactatcgcgcccgcaaagcggtcgagacagcggagcgtcacggtctcctcgcgtccgccgtacattccgaaagttttgtttgaatatacgcccatgtcgaagcgttcaaactgcgccgacccgtccctcgcctcatcaacgacagacagcctctccattttatccacgcggtaatgctttatctttccggcatccgtatcgtatgctacaagataatagttttcgtcctcccacgcaagggcaaacgggcttaccctgtaaagctttccaccgtgacggaaaaccttctgcttcgaggtgttcagttcgtaataaaggaacgagacctttttgttcatccttatcgcggaatgaagcttgtcaaccgaaaggtatatgctctcgttcattgtctttattctgccggaggaatagacctgccttcgcaggctcagcgcctcgtatctgcttgcgagagacgaaagctttgatatgagcatatcggactttttcggagttatgaacctcgatgcctgaacggcatctacaagcagcttgagctcggcaagctcgaaggtgcgggacacaagacggtactccgttctctgcgcctccctgaccgagactatgtccatgccgaagtcacgaagcgcgtctatatccccgtacagactctttctctcggcggatacgccgcattcgtcaagcgcgccgataagctcggcggctgtcatcccgtgctcgtcgtccgtccgctcctcgaatatcctgcaaagctcgagtatctttcttttctgttctgaagtcttaggcatttgtcaatcacccgattcttcaacgggaacggcgaaataccggatatccccgagtgagcattcagctttgcccgagcaaatatcggcaattgccgatattgcgctttccgtattttcgggatgcacatagaatgtgcacttcacctgctcggcatactccggctgccccgacgatacgctgaagcgcggagccgatgcttcaagcctgccccacagcggataagacacgctgaccgtgacgggcgcaagcggcgtcatccgcacaagtcccgccgcgcgcaccgcaagcgatgccgacgaagaatacgcgcgtacaagccccggcgcgccgagaagtattcctccgaaataacggaccacggcgatcgccgcgtccccgatgccgcgctttttcagcacgtcgagaaccggaagtccgccggtcccctgcggctcgccgtcgtcgctgtatcttgccgtatacgggggagcggaggttatccggtatgcataaacgcagtggcgcgcgtcggggtaggcgctgcgtatttccgaaataaacgcgatcgcctccgcttcgctgccgacaggcgcggcaaaagacagaaagcggctttttttctcggtaagctccgcatccgaccttcccgccagagtgatatacggttcgttcactttgcctccccctttctcagcgacgcattctacagatatttttcgagcttttgcgcaaatttatcggatatcgaaccggcaagacgaatcccgtccgccaggtattcctccgaagtgaccgtcccgttttcgtgcagaaacgcgagcatcgcgccgtcgctgtacggcagaacgaaatcaaacattatgagagattttgcgaaatgggagatgatgccctcgcgcagcatttcaagtcccgttccctccgtcgcgcttgtaaggaacacgcggctgtatccggaaatctcaccgggtgcaaaatccggcggaagaagatccgccttgttgaggacgagaaaacgctcgccctccgtcgcgcctatgtccgcaagtatcccttcgacaattgcgatcctctcgcggaaatcgtcgcatcccatatcaacgacgtgtatcagaagatcggacgaaaccgcttcctcaagcgttgacttgaaggcttcgacaagctcatgcggcagcttttttataaagcctaccgtatcgacgaggagtatatccctctcgctgtcggtctccatgcggcgtaccgaaggatcgagagttgcaaaaagctgattccgcacatagacatccgatccgcagagcgcgttcagcatggtcgatttgcccgagtttgtatatcccacaagggataccgtgggaatttcccgacgctttctgtctccgcggagcagcgcgcggcggcgttcgacctcttcaagctcgttttcgagataatgtatcttgcgcattatgtggcgcttgtccgtctgaagcttcgtttcgccggggccgcgcgtaccgatgccgccgccgagacgcgaaagcaccgttccgagtccggtaagcctcggcaggcggtatttctgctgtgcaagctcgacctggagtcttccctcgcgggatgtcgcgcgacgtgcgaatatgtcgagtataagcgcggtccggtcgataatgcgcacaccgcacttttcctcgagattccgtatctgcgacggagaaagctcatcgtcgaagatcacgacgtcggcgcgggaacgctttacctcctcggacaccgtcgccacaagtccgcttccgatgtagaatttcgaatccggcgattccctgcgctgcgtaaaggtccctacgaccttcgcaccagccgcgcgtgcgagctccgcaagctccgcgagatcgtcgtctccgctgtcggacgcgagcgtgacgccgacgagtatcgccttctcggtctcgtcggaattttctataagctccgcctgtccggcggttttatcgagataaagtatgtgctcaaacagagcgtcgaattttcctctctccgacggcggatacggtccgaccgtctcgtagaattcaagagagccgtcggacgcgcggccgaggacggacgcggaaagtcccttcaccgtctgtttttcgcggtcgatgccgaccacgaccatggcatcgaggcgcgcgtcggaaagtgtgttgaggtcgatcttcgacggcagcggaacgccgttcggatgcgtatgaagatttcttactccgcaaagtccgcttttacctccgcgcgttggggtatccccgatgccgacgccgcgcgcgtcgccgatgttcacggagatcacggtgttccgtctgtcgaggcagaccgcacattcacgtccgctttcgaccgtcacccgcttcatcatggaaacgacctcttccgggatgaattctcccggtgaaaacgtctcgcctataaaggactgcgcatattcaaccgtcgctttttttatcgaatcaagatttccctctaccttgttcatgcgcgcctcctttccgaatctgccgaactgcattcatgacatttataatataataacatttcatcggaattttatcaagggggattatcaaaatccgacgacggatgtgaaaaaaaccgacaattgtccttccgcgttaacacccaattcaaaaagcagagttataatataatgaagctgcatcagacgagatgaataaaaaggacggtgagtttatgttcggtcctcctccgcacccttcaaaggcaacggacaagctgaaagagccgaagccgaaaagcctccgcgaggttccgggctatctttcccgactttgcggaaaattctttttccgcctgatctatatgttcgggctcgtatgggacgcaaagccgtggatactcttcgtaatgacggcgaattcgataatctgcggttttatcccgatcatcggcgccttcatctcggcaggcatccttaacgctctcgccgatgtgatcaccggtaacacggaatccttcaaaagcatcgcggtgcttctcatcgcgcagtttgcgtacctgtttgccacatcgcttatagataccctgtattcaatgctgatgcggatcgcaaatcagcttgtgacgaacgagatcaaggtaaaaatcatatcaaaggcaaaggagatcgatctgaaaagcttcgacatgccggatttctatgagaagatggaaaatgccaaccgcgaagcgggtatgcgtccggtagccacgatctccgcgctgttctcgataatcagctccgtcatatcggtggtaagctttattgcgatcctcgtcgccataagtccttttgcaccgcttataatgatactgcttgccgttccgtctgccgttatcagctacatataccgaaagaagaatttcctgtatatgcgcaggcgcagccgcgacagacgcgagatgaactactacaacgatgttctcgtcaacaaggatctcgcaaaagagatacgcatattcaacctctccgacaccttcatagaatgcttccgccaaaccttcaaccgttatttcagcggtatgaaaaggctgataatcacggagggcgcatggaacaccggagtttccgcggtatcgtcggcgataaactgcgggctgttcctgtttatcgcgcgcaaggtatacgaaggagtgctcaaggtcggcgactattcgctctacacgggcgcgctgtcctcgatatcgtcgggaatcggcggacttatttcgaccacggcatcgatctacgaaggaacgctgttcatcgacaacatgatcgttttcatgaacgaaaagccgaccatcgtgccgtccgtcgccgagccgcttcatgtaaagcgccacatcggacataccgttgaattcaagaacgtcagcttccgctatcccggcacggaacgcatggtaataaagcacatgaatctgtcgatcgacgcgggcgagacggtcgtgctcgtcgggctgaacggcgcgggaaaaaccacgctcatcaagcttctgacaagactttacgatcccacggagggcgtaattcttctcgacggagaggatatacgcaagtatgacgtgagcgagctttacgccatgttcggcataatctttcaggatttcggaaagtacgccttttcggtccgcgacaacatcgccttcggacagatatcgaaggaaaagaacgacgatgagatcaaatccgccgccgttcagtcgagcgcggacgagttcataaaagcgcttccgctcggttacgaaacccctctcatgcgctattttgacgaagacggaacggagctttcgatcggtcagtggcagaagctgtcgattgcacgtgcgttctactccgattcggattttctgatcctcgacgagccgaccgcatccctcgatccgatggcggagcaggaaatcttcaatcagtttgagaagctgagacgcggcaagacgacaatattcgtatcccacaggctgtcgagcgcgaccatagcctctaagataatcgtggtcgaaaacggcgagattgcagaagagggcgatcatcgcacgctcatggcaaagcgcggaaagtactatgagcttttctcgactcaggcaaagcgctacataatggaggaaagcgagatcgctgatgcagataagatgtcggatgcacgaagcgcagatcccgatatcgaaaaaggtcacgcacctcgccctccgaaggtggagaactcgagccgtccgccgatgagttcgaatcacggcgaaggacacgctcccgatttcggtgctgcacccgatcacggcaatgaacgccctccgagacccgagggcgcgcccgatcacggcgaagaaatgcggtaagcgatgattcggcaaagcggagcggcgaccggcagcgaagccgccgagcggcagaacggcaaaacggcgacagagcatccgagagcagaacggtaaagcactgaagcgatacggaaaagccgcccgtaagagcggtgcccgacaaaccggcgagacggtgaatcggcagcagcgcacggcgaatggcgaaagaaccgcatacatatcctgctttcgcagacgggctgtgccgtcggatatgtcagctgtaacgaatcccggaacaaatccgccgcaatgcgcgccgaaatgccgcttcccccgaggcggcgatccgattccggtcggattttcgaaaaatcaaaaacgccccgcgcaccgaacgcggacggtgttccgatgtcggacagtattctgtcttacattacggacacttttcacgcggtgcgcggggcattttccttttgcggatcatgcctgccgcacggtcagattttacttccgatatcctctttcagtcttgaaattatctttttctcaagcctcgatatgtacgactgcgaaataccgagcctttcggcgacctccttctgagtctcctcgcgttgtccgtcaagtccgtaccgcaggcttattatgagacgctccctgtctgagagcgcgctgaccgccgcgcggacggcgcgttcctcttccagcttttccatatcgcggctcaccgaatcctcatccgagccgagaacgtccgaaagcagaagctcgttcccgtcccaatccgtattgagcggctcgtcgatcgaaatatcgtttcgctgggacgagctttttctcatgtacatcagtatctcgttttcgatgcagcgggaggcatatgttgcaagcttgatattcttatcgctcctgtacgttccgaccgcctttatcagccctatcgtacctatcgagataaggtcctcgatccccacgccgctgttttcaaacttcttcgcaatgtatacgacaagcctgagattatgctcgatcagcgtactgcgagccgccgcatccggcaaagcctcgatcgcttcagcctcttcgccgggctcaagcggcggcggcagcgatgctgctccgtttatgtaaaaggtatccccttcgccgtgcgtgctctcgccgaaaatacgcccgataagccttttcagcatctcgtatatacggtgcgtgtcctgaaaatacatgatccgttcctttccccgaaagatttttcggtactatcttaaaagcgaaagcggaataagcgccgcttcgccgccgtagaatccgcagcccttgtccgacacgcatataacggcatccgcattatgcgttctcctgccgcctccgtcggaaacgctcacaagatcggggcggaacgcggtaacgattctcgatgcaccctcttcgccgatcgggataagccttatcctgcgcttcatgtcctcgggaagtgaggttatgtccccgctcagcatggaatcaagctccgttttcgggacgatatcctcaagggattcatgcgaaacgaagatcacgggtgagccgctcaccggatcggcggcgagattccccgaatcgacaagcgcgccgactccggctctgcgtccgccgagagtgatccgtacaaacgccgttttacgcgaaagcttaggcttcagcgcgcgaacgacgaaaacgcacaggaaaatcccgctgaccgcaagcgcgacggggcgcgacgcgcaggcgctttccgtatagcgcacggtgtcgcctccgcgttccccgatgctgcacaccgcagtaacgcagccgccgagaagcgcgccgccgccccaaagggtaagcgttctgaaaagaaactgccccaaggagcgcgcgccgccgtatgcggtggcggtcatcacgaccgaaagcacaagagtaagcacggtctgcggcaatgccgcaacggaaagcgccgtcatcgcggtcgccccgagggcgccgataagcgacgcaagtgaaaaacgcagcgcgctccttctgagcgaaagaagctgcgcggcaatgtagaccgaaataaagtccatcgaaaaattgataagaaaaagcacatcggcatacaaaacggtggtcatactgccctcgcttttgtctggatgtgcttattatagacccgtcccacggcagattacggtcggatcgggcgcgtgaaacgtgattatttatcccgttatccgttattttacgtccgcggcggtcggaatttgtgcgcaccgggtgtattttggcttattttcacctacgctttgcgcgcttcaagcatatgtatcttcattcccttggaaacgaagttcttttcgtattctgtcatgatattgtccgcggcgcgttcgctcgaatgaagatcgtcggtcacgaattcaagcgacagcggagaattttttacgctctctacagaaaattcaaaaagctcggcgttgtccgtcttgaagaagaacgctcctcccggaacgagaattgtttcgtacatggcgagaaaatttgcgtgtgtcaggcggcgcgatgcgtatcccgccttcgtccacggatcgctgaaattcgcatagacggaatcaaccgacccttccgggaatatctttccgatatcggcggcatccgccctcatgaatctgacgtttcccctcatcccgtcgggaatcaaaaccttttcgcccatcggcacggtttcgccgtcccacttcttccagcctccgttcggtgcgagagagccgagtccgcgggatgcggcatacttctccgccgcgatcacgataacgtcgtcgatcttttccatggcaatatagttatatccggagtccctcaccgaaagctgtctgacaaagtctccctttccgcagccgatctcaagccgcagaggcgcgacatttccgaatatctccgaaaaatcgggaatattgtcgccgttctgtacaaaaagatcggaaagcgacgtcattctgtcggcagtgtgctttttttttctcattcgcatattgtatttctcccgaaattctgttaaaatatataacgtaaagaataagcctctgctataataccatatccggacgaaaaaatccacacttttaaataaatcggaaagatcgccgagggcgataattcagaagaagggacagcttttacgccgagatccggtaaagcacggtatttgaccatggaactgaatgacttcatgtcggctctgaccgaatcactcaaaaagcgcggcatcccggacgatgtgatccgtgctcatatggcgcggcttcttccgtcgctttcggaagaggaccttgccgagatcgccgcgttcagatcggctgaggatttcaccgatatatccgactgcacggcggctgcacttgcgcagaccgtcaaggttgagatccccgaaagcggaaacggcactccccacgcctccgaaaagccggatcactcagccgagcggtcaaagaccgggcactcggtcaaaaaagaaaaaatgcccgaaattccgataacggaagagggaaagaaaagattcatccttatatccgcgcttacgtcgcctctgtgggcgatcgccgccgtgctctacgcgcttctttggatcgcggcgttcgcggtcgaagcgctgtccgtcgccgcggctgtatgcgcaagcatcggagttttcgcggcggggtgcgccgcatcggtatcgggaataatatacggtatcttcataatgatgtccgaaaaggcgatcggcatatacgagatcggcttcggtattatcgtcgcgggggcatcgcttctcggcggcgtgctgctctacaactttgcgatacgatttatgccgtttgcgataaagaaaacggcggaattctttatgttctgtctcggcagagtccgcgttctgctccacgaattcaaaaagaggtgctttgaagtatgaaaatccgaaccgcctccgttgtcgccgtgatagtcgccgccgtgctgatactctccggcattatcgtctgcgctgtcggcagtgcagcggcaaagtcctccggagtcatgatctatcccgaggatgaaaacggaaactctgtctacaagtacgacttcaccgagaaaaatataaccaagatatccgtctccgtaaaggattccgatataaccgtgacccacggcggaacctcgtcgtatatcgagatacgaaatttcaatgccaattactacaagctttccacggagaacaacattctctcattcagcgagatcgacaatgtcgcgtcgatgttcaagttctgggagggcggattctccttcaagggcatgagatacctcttccgattcggtgacggcggtcgcggaatgaaaacggtgaccgtaaacatcgcggacacgtccatgctgaaaacggtttccgtctcggaggaaagcggaagcttttctctcacgggagccgatgtttcggcggattatatcctctctctcggcaaagcgtccgccgacatatccgggctttccacgacatcggttctttcggtatcctcgtcggccggcgcatcgatgaagatatccgactgccgtgcaaaggagttttcgctctcaggaggcggcggaaacttctctctctccggcatcagcgccgaccgagcggacttcagcctgaaaagcggtgaaatcgtcggcgaaaacctcaccttcaccgagctttcctcgtcatccgagagcgcctctctcgatctgcgctcgctcgacgtatcgaaggcatcggtcaactccgtatcgggacaggtcgcgctgcgtctgtcgtccgacctcacggactttgccgtggagcttgccgcaaagaatgcatccgtttttctgaacgacgttcactacagcagctcctattcgattcccaacgaatcggcagaaaagagcataaccgtaaacacagacaccgcttcaatacttctgaacgcagcaaaataaaaaataccgatgcggggcggtgctgcgcctgcatcggtatttcccgtttttacgcaccgaatattctttcgaaatatccgaggtcgatcttgccgccgatgaggatataattccgcgatccgatctttaacgcatcttcggaaaggatctcgacggtgcacagaacctctgcgccgtcggagataagctctgcggtatataccgctttcccgtcattccgcgagccgtccgtgcattcgagcgattcgagattcagataaaacgaatccacgccgtccgcgggaatcgtgcgtttctcgccgcagccgtcggtaaccgtcacggaagaaaccgcggcaacaccggtcatgggatcgaccctcggcggcagaagatcgcccagcatatacacctccggtgaacacgacgccaaaatcgcagccgcagctatcacggctgccaacaaaatccgcacacccaacgttttcataaacgacacacttcccgcccgcggaaaggcatatcttcggacagtgctgtccgtatccgcttacggtacaattatacaccgtgcgcagaaaaatatcaagacgtgaatgatgcgcaccgatgacacgcagcgaaaggacccgacaaatgaaaaagcttctcataatagacggaaacagcatcctgaaccgcgcattctacggtatacgcccgctttccacaaaaagcggactgccgacaaatgcgctctacggctttgcacgtatgctgaaaaagcatctcgatgccgtccgtcccgaatacgccgcctgcgcgttcgaccttcatgcgccgaccttccgccacaagctctccgaggcttacaaggcaaaccgcaaagggatgcccgaggatctcgcgctgcagtttccctacgcgcaccgcctcgcagaagccctcggcttcacggtagtcgagcttgaaggatatgaggcggacgatgtgatcggcactctcgccaaaaaagcggaggactcaggcgtacacacctacatccttacaggagaccgggattcgctgcagcttctctcggacagcgtatccgtgatactcacgaagaccaaggaggacattctctacacgcccgaacgcttcaacgcggaatacgggatatcgccgtcgcagttcgtcgatgtgaaagcgctgatgggggactcctccgacaatatccccggggttgccggaatcggcgaaaagaccgcactgaagctgatctcctccgtttcctcgctcgatgcgctttattccgacatatccgcatgcggcgcatcggcgggaatatgcgccaagcttgaagcgggacgcgacagcgcgtttttgtcgcgcactcttgcgcagatatgcagaagcgtgcccgggatagattcgatcgattttacgctaagcgaaggcaccgacaaaaaggcgctttccgcactcttcgacgagcttgaatttacggggatgcgcgccgcgttctccctttcggattccgaccgtgagaccgagccggagacgcagagcgtaccggacacgttgcccgtaactcccgcggagcttatatccgccgtcggtgacaccgcgttcatcgacgtatccctcgaaaacggaatcatgcagataagcgcggcaaacgaaaacgggatatattccgcatccggcgatgctgcggatttcgcgccgctgttttcaaagaagataatctgccacgatgcgaaaaagctttactcgatactcgcgccgtccggaatttctgcaaatgtcgaatttgacgtgatgcttgccgcgtaccttctcaatccgggcgacggaagctatccgaccgggcgtatcgcggcgcattttgacccttccctgccgaacaccgcgcccgatgcgtggctgatatataagctgtatccgattctcgccgacaagcttgaggcagaaggtatgacgaagcttctgcacgagatcgagatccccctttcggcagtgctctccgaaatggagcgcgacggcataatgctcgataccgcggggctgcgcacctttgcggcgcagctcgccgagcatgaagcctctctctccgacgcaatatacgaaagggtcggcttccgcttcaacctcaactctccgaagcagctcggtgaggtgctctttgagaatctcggtctgcctcacgggaagaagaccaaaaccggatattctacaaatgccgaaactctcgagaagcttcgtccgtacgatcccgttatcggcaccgtgctcgaataccgcgaaatatcgaagctgcgctcgacctacggagaggctcttgcggcgcaggcagacggaaattcgagaatccacacgagattcaatcagtgcggaaccgccacggggcggctctcctcgaccgatccgaatatgcagaacattcccgtccgcggcgacctcggacgcgagctgagaagatatttcaaagcgcccgacggcaggcttctcatcgatgcggactattcgcagatcgagctgaggcttctcgcgtcgatctcgggcgaccgcgcgatgtgcgatgcattcaacagcggtgccgacattcacacctcgaccgcggctgaggtattccgtgttccgccggagctggtgactcacgaactgcgttcgcgtgcaaaggcagtgaatttcggaatagtctacgggatcggggaatactccctttcgcaggatctcggcatcagtcggcacgaggctgccgaatatatcgcaaactatctgaacacatatccgggagtcgccgagtatctccgaaccaccgtcgagaatgcaaagcgcgacggatttaccgtgacgatgttttcgagaaagcgatacattcccgagctttcgagccgaaacaagaatgtccgagccttcggcgagcgtgtggcgaaaaacagcccgatacagggcagcgccgcagacataatcaaaatcgcaatgatagacgtaagccgagcactgcgcgaatcggggcttgacgcccgactgatccttcaggttcacgacgagctgatagtcgaatgcgcagagcgggatgccgaacgggcatccgccattctgaaggaatccatggaaaatgcggctgaaaccgcggcacgcctctgcgccgaggtcagcacgggcagaaattggctcgaagcgaaagactgacgggcacgtctgcccgaaaaaacgctgcccgataaggcgaaacggtttcaaagaaaggaagctttcacacggaaagcacggtaacacaatgaaaatcacactgcccgccccggcgaaaatcaatctgtatcttgacgttctcggaaaaagaccggacggatatcacaacataaaaagcgtgatgcagacggtcgatctctgcgatgagatcaccgttgaaatgctcacccccacgccgggacttcagagcattcagataagctgttcggaagccgcgcttccgtgcgacgcgagaaacctcgcgcaccgcgccgcagtcgcgttcttcaacggatgtaacatctacgatttcacatgcagaatagatattcagaagaacataccgatggcggcggggctcgcgggaggcagcaccgatgccgcagcggtgctcaggggactgaacgcgctgtcggggcatccgctcgacactgacgcgctctgctctctcggcgcggcgatcggtgccgacgttcccttctgcataaggggaggcacgctgtacaccgagcagatcggcgatgtcatggttccgtgctatccgatgcccgccgcgtatatagttatcgcgctcggcggacgcggggtctccacgcccacggcataccgtatgctcgacgatcggtacggatgcgatcttgaccgtgactttgccgatgtttccgcgctgaccggcgcgctccaccgaaaaagcctctcggaaatatcatcgtctctctacaatgtgttcgaagacgtcattctccccgtgcacggcgatgcacgccgcgccaaggaaatgcttctgaaatacggcgcgctcggagcgcttatgagcggaagcggacctgccgtgttcggagttttcgacgatgaagcggcagctcagtcggcggctcaccgcctgcgcgaaacgatcgaccgcgtattcgtatgcacggcatcgaccctctgcttcattgatccggctctctaaagcttacgcgggtattcgaattccgcgcgaagtttcggcatttcggtcgtgaagccgccggaaagcgcttatgccgtcggctgatcgaaagccttgcgcaaaaatccgaaaccgttttgttttttcaatgattccgatacaaaaagccgcccgatggggcggctttttcagataaatggagcttaacgcatcccttttgtacgtttcgcgtaatcaaacggagaattcctccgtaagcacgacgctgcattcgtcggcaatgatctccctttcggaaaacgggatgtgcctgccgcagacaagctgataagtttcgtgaccttttcccgcaaacagcacgatatcgcccggagcggaaagctgcaccgcctcgcggacagccgcttcgcggtccggtatcactatatacggcgcgggaccatcgtaatgcgagattatctcgcgtatgatcgcgtcgggggattcgtaatcgggattatcgctcgttatcaccgaaagatcggcgagattcgacgcggcgtgcgcaagctccgcgcgccgtatctgcgttctgccgccgaccgatccgaatacgcagatcagcctcgacggattgtattcacggagtacgcggagggtatttgtcagacttacgccgttgtgtgcatagtctataacaaatgtcctgtcgggcagtccttctacgatctcacctcttccgagcacggatgttacggcgagggtctccgccgcagaagcgacagaaacgccgaaatgcgaagctgtcgcaatcgccgccatcgcgttcgacacgctgaactctccgggcgatctcagtctgatgctctcggcacgcccccaagccgaaagggtaaaatccactccgagagcgaactcgtcgcggaacgggcgtatatcggatgccgaaagatcagcatcgccgccgacggagaaggcgatcttcggcgcgctgcacgtcgagatcatctcctccgaacagggatcgtctgcattgtaaaccgcaaggtgcgtcttatgctcggaaaacagtctctttttcgaatttttataatcctcgaaatccgggtgctcaccctctccgatgtgatcctcggacagattcagaaaagcggtgacttcaaagtcgatgccgtctaccctgtggtgcgcaagcgcctgcgaggacacctccattgcgacggtatcgacccccgcatccgccatgaggcgaaaataatggtgaagctcgaggctctccggcgtcgtgttcaccgtatctatatggcggtcctttatcatcacgccgtttgagccgatatatgcacacggaattcccgcgccgttgagtatcgccgccgtcataagggaggtggtcgtcttgcccttcgttccggtgatgccgattatccgcagctttttcgcgggattcccgtaaaactccgccgaaaccgacgcaagcgcggcgcgcgtatcggcgcacacgacctcgcacacgccatcgccgaggtcaagcctgtgatcacagagaaatgcacggcagccgcgcgaatatgcatcggcggcgtacttgtgaccgtcggtgcgtgcgccgcggaggcagacgaacagagaaccgtcgccgcacatggatgagttaagctcgatccccgatatttcgcattcgccgtcgccgcagagcgtatgcggcacattttttattatatcggacagcttcatttgaaaattcctttcgttggagttcgcccgcatcacgggcagcgtttttcgtattcgggcttccaaatcgaaaactcggacggaaagcctgtcggagttttcccgcaaagtccgatcgcgtaataggcaagcgcctcggtcgagtccacaagacgcggatcatgctcaagggagcggtttatgacggaaagctccgtgcatccgaggatcatggcatctgcgccgtttccctcaagctcgccgacgacggaataaaatctgtcggtgtcaacgtcctttcccgctttgaccgaatcatatataagttcgccgagtatcttctgcgaacgctcggacgggagtgtccatttcatgcccatctcttcaagctcccgctgatacgagagcgcgccgaccgtgccgcgcgtagccattatgccgatgcggcgatgcccgagggcgcgcgcaagatcggcggtctcatgtattatcgacgggacgggcacattgaccgacgctcttacctcgtcaataaagtaatgcgccgtattgcacgcgattattatcgcttccgcgccgtatttttcaaggcggcgagcgtcctcgatcatcaccggaagcgggctttcgccgccttcgcccgtgataaacgccgttctgtccggtgtcgaggatcggctcgaaagtattatgtctatatgctcctgatcgctcgaaacctttgtgtgcgcggttatgtactcatagagatacgcgctcgacatcgggccgagtcctccgaggattccgagaagcttcggtgtgttcattttactgccgcagccttcgccggggcgaaggtcccctttccgtgaattgatacggcggcaaaatgacaagcattcacgccgccgcaataaatctttatttctccgattttttcggataataaaccgcgaatttctttttctgtctgcgaagctgctcacatacgcagacgaagcggagcgggttcattgcaagatccggtccgtaccagagagacgaggtctccttctttgccgccgcaagggattttgccttttcgacaagtgccttatcctccgtgtactcatatgcgacggatttcgggacatggtgccaaaaatgctcgttctcgcagggcaaaaacttcacaaacggagaatcatactcttcgacggcaagctttgcc

SEQ ID NO: 3842 - DNA, 23134 bp, Unknown
  16S sequences of unknown bacteria
tgatatgtcataaccgaatagctacttcgcagcttatcaggagcggcttataccacttctgatacaagcaagtcccagcccactgcttattgctttgcgcaattaatgcaggggacttgcttaattcggttagagttagataaggagcagcagcgccagcttgagtcctccgaacacaaccagcgccagcaccgcagccgcatacatcatccggtttacccgcgtgatatcctccggctcaatcgggcggaggtcgtctccgataaatggcttcttatgcagttccccgaaataccaggcatcgcctgcgagctgtacgtgcagtgcgccagccgcagccgcctcggtctgtgccgaattcggactggcgtgcttgtagcggtcacgtcgaaagatcttccacgcctgcttcggatcctgcccgcagataccggccgccgcgatgagcagcagcgcagccagacgtgccgggagataattcgccacatcgtccagatgtgccgggatgaagccaaaattcatatacttctcatttttatagccgagcatcgaatccatcgtattaatgctcttgtagaaaaaacctgccgctcctccgccaaggatcatgtacagaagcggtgctgccactccgtcggaataattttccgctacggtctccaccgccgccttgataacgccctgctttgtcaggttctgggtatctcttccgacaatgcgggacaccatcttccgtccggcctcaagtccttcctgctccagcgcctttttcacattcatgctctcttttttcaggctcttcgtcgcgagcacgaaatagcagccgactgcttctgcaagaacgcccacggcaaaggacagatgataggcgagcacaagcagaagtgccgggatcccggtcgatatcagcacgacgatcagcgccgtcacaccgcctgccgtccgctctcccgttttcgtcttcgggaagagtgcccgcgtctttttttctgtaaaagcgatcagccgaccgatcaggcagatcggatgatacgcgctgttcggatctcccagcagaagatccagcacaaatccaactgccacagcgagcagcgatcccatccagtaacgcatatctactccttatccagagctgcctccagctcttctctcgtcctttttaccagcccgtgatccagcccggaagcgttgattccgatcacgaccggatcgcgccggatgaccgacggaaaataaaaatcgcacgcttccttgcggcttgcaatgttgaccagaatcccgcgtgcatggcatatatccgcgatccgctcattcaaagccgcatcgtctgtcgcagcgagcaccattttgaaacggtccgcatcatccagcatcgtctccgaaaacggttcctgcagaattttcaccggatactccgtctgcagcgaccggatcgcgtcacataccgccggtgccactaccgtaatccgcccggcgaacccgcacagactcttcaccctgcgcgccgcgatcgtcccgccgcctatcatcaggatttccctgtcacttaagtctataaaaatcgggaaatacatatttcgcatcctcccttttaatgctgttggggtcaaagcgaacattcgcaatccatccctgcagctctgctgacagggcctagcttcgctacttgctcataaacgcagtcgtttcgcgttcaaaaagtggttttcagtttcatcccgacaccgcagatgacccgcacgacctcatcggctcttttcgccagctccgtgcagattcgcccgtgtgtctcacggtattttcggtcctgcggatcgatcggaacgataccacagcccagctctctggtcacaacgatcagctccggatttttctcatacagtcgctctgccaccgtcccggcaaagcgctctaccgtcagctcccacgcctgtccctcctctgcatgctcctgcaaaaggcgacggacccaggcttcaaaatgaaagatgccgcggcatccctcgatcgcttccggtacacagtctgcaccgtcgatccaaccgtctgccagtccatattgtgttctggcgtattccagctttccctgaaacgcgcctccgattatcagcttcatagtctctcctatctcatccaagcttcgcggcgatgagatgagccgccaccataaagagcggcataacaagctcgcagttgctcagaaaccagcctgccagatcgccgttgatcccgccaaaattcttcattgccatccgataataccagccgaaggtcaaaaacgcgccggccatggctgccgctccgtacagcggattcaaaatgaacatgcctgtgatggcaagcaccagatagaagatcagggtcacccggatccggccggtctcggcctttttcgaaaagtccgccaccgttccctcctttttcatcttcgggaagctcacgacagacagaccgcttagggaacgcgacacgataaacagcattgcatataccggaagcatatccacagtcaccatatccgtcaccgcatagagtaaaaagaaatagaccacacagatcaggatcgcaaatgcacccgcatgggaatccttcaatatctcgatccggcgttccatcggccgccacgagcttaaggcatccgcagtgtcgagcataccgtccaaatggatgccgcccgtcacaaaaaacggaatcagcatgagcacgacaacccgcagcagatcgccaacgcccagccatattgccagctgctgccagccaatgcaaagtgcgccgatcaccgcgccgatccacgggaagaagcacatgacatacttcatattgtcatcggtccagtcgcactgcagcatcggaattttcgaatacatggaaaacgcgatgccacagctgttcataagtctttttatcatattgtttcgccctttccggctgccgcttctctttttatcggaacgggaatgccgtatactacctccgtcacacggtcggcaagcgcagctgcctcccggttgatccttccgagatacgaaagatactgcagcatggaatcatcatacggtaccccgtctgaaaatatctcattgctgaccagaataagggtaccggcccgggagcgcagactgcgaataccgtccagcacggcctttacggtctcttccttcgccccggccggatcgtacagctcgtttgccgtcagattcgagaggcactcgagcagcaccgtgctgcccggcggcacctgcacctgcttcagatccatatagcattcgatcgtctcaaagtgcttttccctgcgcatccggcgatgcttctccactctgcggcggccctcctcgccatatggcatcatcgtcgctatatagtagcgcggtgcatcccccgcttcgagcacctgctgctctgcataggcggactttccgcttccgctgcctccggtcacaaggtgcatcatgccctttctgcaaagtatgtctttgcagcatccagcacaccctgcagttcttccttcgtatgtgctgctgagaggaacatcgcctcgaactgcgacggtccgaagtaatagcccttctgcagcatgtagcggaaccactttgcgaattcctttgtgtctgcctgctttgcagaagcatagtctaccaccggctgaccggtaaagtacatacagccaagagaaccgatgtgattcatatgccagccggtaccggaagccttcacggcctcatcgagtccttcgtagaaccagtctcccttcgcattcagctccgtatagatttccggatgctcttttaaaattttcagctgagtcatgcctgcctgcattgccaccggattgccgcttaaggttcctgcctggtagaccggaccgaccggagataccatcgacataacgtcgcgtctgccgccgtaagcgccgaccggcattcctgctccgatgatctttccgtaagtcacgagatccgcatcgacattgaaatagccctgtgcaccctcgaatccgagacggaagcctgtgatgacttcatcaaaaatgagcaacgctccatatttcgtgcagaggctgcgcagcccttccagaaatcccgccttcggcggtacgagacccatgttcgctgcgaccggctcgacgatcactgccgcaatctccttcgggaactcctcaaataatgtctccacggaggagaggtcattgtaaacagcagaaagcgtgtccttcgtgcagcctgccggtacgcccgcgctgtccggaatgcccgcagtcatgacaccggagcctgcttgtacgagcagtgcatcggaatgcccgtgatagcagcccataaattttacaatcttcgcacgtccggtatagcctcttgcggtacggattgcactcatcacagcttctgtaccggaatttaccatccgcaccatctcgatgttgcgcacattgctgcagatcagctctgcgatatcgacctcacactcggtcgccgcaccatagcttaatcctttttcacatgccttaatgaccgcctcacgcaccgccggatggttgtgtccgagaatcatcggtccccaggagctgataaaatccagatacgttattccatctgcgtcggtcatataagcgccatctgccgctgcgatgaagcgcggtgtctctcctaccgatccgaatgcgcgaaccgggctgttgacaccacccggaatcacgcggatcgcgcgttcaaataatgcttctgatcttgtcattgtattttcctcttttctttatcagccgatgcggccttccttcatgaattttgcgatctccggcgcatagtaggtcaggtacatatcacagcctgcccggtacgctgccactgcagtctcgcagatgattttatcctcgtcgatatagcccattgccgcgcctgctttcaccatcgcatactcaccgctgacgctgtacgctgccaccggaacatttacgacgtcgcgcaccttcgtcacgatatccagatacgacatcgccggcttcaccataatgatatcggcaccctcttccacatcgagtagggcttccttgataccctcgcggctgttgtggtagtccatctggtagcccttgcggtcgccaaaggacggtgccgagcctgccgcatcgcggaacggtccataaaacgcggacgcatattttacggcataggacataatcggagcggtctggaagccattttcatccagcgtctcacggatcgcgcgcacccggccatccatcatatcagacggagcgaccatatcggcccctgcctgaatgtgggacagtgccgtcttcgagagcagatccagtgtacggtcgttgtcgacctcatgaccgcagagcataccgcagtgaccgtgagacgtatactcgcacatgcatacatccgtgataacatacagctcgtccctgtattctttcttgattctgcgcagtgccttctggatgatgccgttctcatcccacgcaccgcttcccatctcatccttgtgatccggaatgccaaacagcatgacgctgtttacgcctgcagcaagcagtgcatcgagctgacgctccatgccatcgagactgtagcggtactggcccggcatcgtcgggatctcctccgccgccacatctccctcttttacaaacatcggataaatgagggaggacggatccatccgcgtctcccgcaccatcttccgaagccgtgctccgtttcttaatcttcttggtctgattgtcatatccatgatgcttcctcttttctgtatatgcaaatatgatgatgatgccagggtcaaaaggtcaaaaagccgttcatgcttgcatgataaggcttttgaacgcagatcgcgaagcgactgcgttcatgagcaagtagcaaagcggattgcgaatgtccgctttaccttgggacccgccaaacatgagaaagtagcgatttacgtagtaaatcagcggatttcgaatgtttgcagaattgcgggagctgcttcgcagcgaagcaattcgtaggcatcagttggggtcaaaaggtattttggtgtttctcccggtgcacttcctccagcttctcgatcaggctgtcgatcgtcgcacactctgccatatacgtctgcatgccgtatgcatctgccgccgcctttgtctgcaccccgatacagatcgcctgcacatccgtatacgcaatgtccccggctgccgctgcgaatccctttacagtcgacgcgcttgtaaacagcacatacgtctccgcgccctgctccagctctctttttatctgaaccggtgaggcctccggatcttcctccagtccatatacggtatcataaatcgcaatgtcatccgcctgcacgccctctgccttctgaagctctgcaagcagctccgggctaccgatggctgcgcgcggaatcagtacccttgcatggctgcatacctttgcgagcgccgctccaagatgcgccgcatcaaacacctccggcatcaaatctgcatagaacccatgtttttccagctcctttgccgtcccggtaccgatcacggcaaatttcactcctgaaaatctccggacatcaaaacgctgacgctgcagctcctcaaaaaagacgcgcacgccggtcggactcgtgaatacaatccacgcatagtctgaaatatccgtcagagcctgctgcagcgcagtattattttctcttgcctttgtcctgatcgccggaagctcgatcacctctgctccgcatttgcgcagcttttgtgccgtcgtaccagaaagttctctcggtctggtgagcagcacacgcacaccgccaagcgaaagccgatccacccaggaaaaggtatccgcaagtgcacatacctcgccgaccactatgattgccggtgtgaccgcgccctgacgtgcgacttcctccggcagagtcgacaccgtcgccacgatccgcttctgtgccgctgtcgtaccctttgagagcagcgcagccggcatatccttcttcatcccggctgcaagcagtccctcgcagatcatctctaatgccgatactcccatcagaaatacgagcgttcctctggtccgcacgagcgcttcgaagtcgatgtcgcacgcctcaccctcgcgcttgtgtcccgtaataatatgtaccgaggaacagtagtcccggtgtgtcaccggaatgccctgataggccggaactgagatcgcactcgtcacgcccggtacgacctcatatgatatcccctcccggatcagtacttcgagttcctcgccaccgcgcccgaacaggaacggatctccgccctttaagcgcacgacccgctttccttcctttgccttttcggcgagcagctcactgatctgctcctgacgcatcgtgtgattgctggagcgctttccgacattgatcgcctctgctgtatccgggatcatcgcaagaatcgccggtccgacgagtgcatcgtacacgactacttctgcatcggtgagcacctgatgtccctttaaggtaaacagccccgcatccgacggacccgcgccgacaagccacacctttcccgctctttttactgtcttcatttcatttaccataatgttcttccttatttgatcgcctgttttcacagacagacatcctcttgatcttttctatttcttcgcgtacccttatcctctgcacgccgcaaggatctgtccggcgactgctgcgccgagtgcctctgcctgcttgatactgccggtcgcctcctctctgaaggtgcttccgctcttctcatcgtggaaaaatccgagcagacgcagcgtgccatgcccgacatccggaatcgcatgcgccgcgatcgggtcgctgcagccgccgtccagatgccggacaaaggagcgctctgcatatgcgcatgcctctgctaccggatcattaaagtccgcaaggaagcccatatcctccccgacgcgtccctgtactgccagaattccctgcccggctgccggaatcatctcctcctcggaaaagtacctgctgatccgatgcgtaagccccagacgcttcagtccggctgccgccagcagcgtcgcggaaaactcaccctcatcgagtctgcgaagccgtgtctgtacattaccgcggattgtcgcaaaggtcgcctgcggatacaatctggcaaactgcagcatccgacgcttgcttgagcagccgatcggctttgaaaaatcaatcttcgtcacgccctccggcagcaccagcacatcccgcggatcctcccggctggaaaatgcaagaagcggaagctcctttggcagctccatcggcacatcctttaagctgtgcaccgacagatcggagcggccgtccaccagcgcacggtccagctcttttacaaacagtcccttgccaccgaccttctccagcgcctgattcaaaataatatcaccggtcgtcttcatcgtcagaatctgtaccgaaagctccggatgcgccttctgaatccaggcctgcacctgctccgactgaatcacagcgagccggctctctctgcttccgattgtgatttcctttttcataactaacttggtctccatttatttttatttgcatgcttttgctgcctggctcaggtatttccgtagaccttctccagcccgtccaggcattccaggaaggtccggctgctgacctcatcgcgcaggccgaacagcatgtggttcatcgcacgcatagatgcctgcaggatctcctgcttcagctcctcaagctccttcgcctccaccggcagatgctgcagcttctttgtcagacgcgcctccacatccgcagcggcctcctccttgatgctctgaatccgcggtacgatgtcacgtccctcataccagttgaaaaattcctctatctgctcttccatacaatgctccgcctgtgcgatcgccgccttctgcgcttcgcttcgcgcctcggcccggaaacagtcgatgtcgtacagctgcacgcccggaagctctgcgaccgtcggctcgatatcacgcggcaccgcgaggtcgatcagcacgacctcctttgcataggcctgcgccacaagctcctttgtcaccgtatagttcgggctgaccgtcgcactgacgacataatcgcactttggaaacagctccatacgggctccgtaatcaattcgcttacagccaagcggaatctccacgataccactccggtactgccgtaccgtcaccgtgacatccgccccttctgccaagagcatcgtcgcggtcagctttcccatgacaccgttaccgatgaccatacatttctttccggcaaaggtctgcccctgctcctttaatgtatcgatagccgtgcgcacgacggagttgtccgtatgggaaagctccacctctgtcttgacctttttcgccgctgtcacggccatgcgaaacagcgtctccatcacactgtccgtcgcgtactgctctctggcaaagctcagcgcctctccgacctgtgtcacgatctgatcttcaccaagaatccgcgacttcagtcctcctgccagccagaagaggtgctgcaccgcctcccgctctttgcgaaatacaaaatacggacggtacatctccggatccgcctcttttattttacagagctgctcatagagcccttcttccggaaaaccgtcgtcggtactcgcccacagctccatccggttgcacgtcgagatcagcacacatccctcgatccccggcaccttctgaagcactgccagcgcctccgccatcttcttttttgtaaatgaaaacaccgttctcacatcgatccccgcacgggtatgatcgatgccaatcatttgtatactcatatctcacacctgttccattgctttttcggcatgcgaaagcagcagcttccgaatgtccgcatattcccccagtcctttcagcacacaacgcactgaaaatccggctgcttcaaacacggatttccacgaatcctcttcgtcgccagcaagatcattgtttgcatgatctccggccacaatcataaacggtgccagtaccacatgccgataccccgccttctgtaccagacgcatcacggattccagtgtcggatagccctcaaccgtccccatgaatatgttggaatgccccaggtccttgaactggtagtccagtgccgcatacactgcatcagcataatgctctgtaccatgtcccatcagcacaagcgcctcatcctttgccggatgcagctcttttacgatcgcatcgatgacgtatttactgtcttctgccgtcgtcagcaccggtgtaccgatactgacacgcataaaacgatccgcatatgctgcgacatccgccttcatctggtcgttctcgatcccgttgatgacatgggtcggctgaacgacgacttcccggatcccgtccgctgccatcgcctcaagtgcctcacagacattgtaaatgtgaataccgtcacgcttcaaaagcttcgcacggatcatgccgctcgtccacgcacggtaaatcgcatacgaagggaatgcctccgccatatcgttctcgatctggtcgatcgtcttttttcttgtctcctcgtagctcgttccgaagctgactacaaggactgcctttttcttatcgttcattatcctatcctccgagtattctgccggaatctccggaaagaaaaagcaccccggccatgggatgcttttgtattctgcattctgccccattcccccatcccagaaatgaaaagcacctgatcctgcgaatatcctgacttagcatcatccttcggaaccccttcccagagtgcagtccttttgcactccagtggttatgtccttttgtccgccttacagtagtggtgactgttccggattctcaccggatttctcgcattttgacctcaacattcttattgtatactcaattttatcggctgtcaagaaaggggctgctcccctttactctccatatacccggatcacagcctcgaccttgcgagtgttcggcttctctgcaatacagtgtaccgctttcttgaaatcgccctcgcacacccggtccgtgatcacgacgatctcggcacagtcattgatccgctccttctggatcatctgctgtacgctcacccgatgtccggcaaattcgtttgcgatcatcgcaagcacaccgatcttatcttcaaccagcacgcgcaggaaataccggctgcgcacctcttccatcggtacgatcggaagctccttgtagcacgtacaggaaacgcgtccgcagcagccgtgcacgagattccgcatgacctcaaagacatcgcctgccaccgcacttgctgtcggaagctctccggctccccgtccgagaaacatcgcattgtcgactgcatccccgcgcacaaatacggcattgtaggaatcattgaccgtcgaaagcggatggccgagcggaatgagcatcggtgccacataggcttcaatgccctcgccctcgctgtgcgccataccgatcagcttgatgcagcagcccatctcctttgcgtaacggatatcattggcggtaatgcctgtgataccctcggtcgatacgtcttcaaagctcacgcgggaattgaacgcgatggatgccagaatcgccaccttgcgggctgcgtcgagtccctccacatctgccgtcggatcggcctcagcatatccaagctccgtcgcaagtgccagtgcctccgagaactccattccctcctgtgccattttggtcagaataaaattcgtcgtgccgtttacgatacccatgacctcggtcagatgatttgctgcaagggactgcttcagcggtgtaatgaccggaatcgctcctgccactgccgcctcaaacatcagatcacagccatgctgcttagcgacttccatgagatgaccatggtccgatgcaatcagatccttattggcggtcacgacatgctttccggccgcgagtgcctccccgatgtaggtccgtgcaggctcgatgccgcccatcagttcgatcacgatctcgatagatggatcattcaatatctcctgccagtcattcgtgatcagctccggatgtccggtccgctccgctgcctttgccacattgcggacaagaatcttcttcacctccgccgtcgcgcccagcttatgtaccatctcatccttctgtgcattcagtaccttccatgtaccaagtcccaccgtaccaagtccgagaattgccacgcctatcgttctgttctccatcgctatttcctcccattgcgccatctttcactttatccgcgtccgtttcgcatctatccgcgccgcctgttttttacgcattcttagcatcctgcgtaccttctgtgcacacgtcggattcgtctaacagtatactggaaagcgttctaaaatacaaccctgttttgaaaagacactatcatctgatggcagccggatatccttttcccgcacatatttaaaacgccaccggatactgcagttggcagtccccgatggcgtcttgggcaggctcctttagaagctgccccgcgtggatacgaaattcatcttaacggtaaatgaactttatttgttgtaatttacgatcttaccgaaatccggcttcagagctgcgccgccgatcagaccaccgtcgatgtccggcttggaaaggagctctgctgcgttgcctgcgttcatggatccgccgtactggatacgaactgcctctgcggtagcttcatcatacatctcagcgatggtgtgacggatcattgcacaaacctcctgtgcctgatcagcagttgcggtcttgccggttccgattgcccagatcggctcgtaagcgattaccatggtctttacctggtcagcggttacgccttccagatctgctttgatctgaagattgatccagtctttgtatgcgtttctctcacgaagctccagagactcgccgcagcaaaggatcggggtcaggccggaagcaaatgccttgagcactttcttgttcagaagtgcatcatcctccttgaagtaatcacgacgctcggaatgtccgatgatgacatacttaacaccggcatccagaagcatcggagcggagatctctcctgtatatgctcccttgtcctcgatgtagaagttctcagcgccgactgctacatcagagcccttgactgcctctacgaccggtacgatatcgattgccggtacgcaatatacaacgtctacatccggatttactacgagatctttcagggtatttactaattctactgcctggctcggagtcatgttcattttccagttgccagcgataattttctttcttgccatgttcgtttcctctttttctaattttctttatttatcatctgctgctacaacgcccggaaggtccttgccctcaaggaactcaagggaagcgccgccgccggtggagatgtggctcatcttgtcaccgaagccgagctggttgacagctgctgcggaatctccgccaccgatgatggtcgtcgcatcggtctctgcgagtgcctttgcaacagcgatcgtgccctttgcaaggatcggattctcgaatacgcccatcggtccgttccatacaacggtctttgcggtcttcactgcgtctgcatacagagcagcggtctcagtgccgatatccagacccatcttgtcagccgggatctcggtggattttacaacagaaacttcaatcttggcgtcgatcggattcgggaactctgctgcaatcgtggtgtcaaccggaagaagcagcttcttgccaagcttctctgccttctcgatcatttccttgcagtagtcaagcttcgtatcgtctacgagggaggtacctacttcacagccctttgccttcaggaaggtgtaagccatgccgccgccgatgatcagagtgtcgcacttctcaagcaggttggagataacattcagcttgtctgctacctttgcgccgccaaggattgcaacaaacggtcttaccggattgttgactgcattgccgaggaaatcgatctccttctgcatcagatatccgactacattctcgccgccctttgcagtgatgaacttggtcacgcctgctacagatgcatgtgctctgtgagaggaaccaaacgcgtcgcatacatagatgtcagccagatcagcgagctctttgctgaactcttcgccgttcttggtctcctctgcaccacggaaacgggtattctgcagaagaatcacgtcgccgtccttcatctcatctgctgccttggtagcttcctcgccggtaacatgatagtctgcgatgaactttacttcctggccaagcttctcagagagacgctttgctaccggtgcaagggactcgccctcgttcggtccgttctttacctttccaagatgagagcagagaattacctttccaccgtctgcgatcagcttcttgatggtcgggagtgctgctacaatacgggtctcatctgtgataacgccatccttaagcggaacattaaagtcgcatcttacaaggacatgcttgccctttgcattgatgtcatccactgtttttttattaagcattggaatttcctccttatcattaaaagaggcccggtcctaatcgaccggacctctattcaggtcttacttaaaacgaaattatgcaagctctgcgaagtacttgattgtacgaaccatctggcttacataggagttctcgttgtcgtaccaagaaacaacctgtacctgagaagtgccattgccaaggttaacaaccatggtctgagtagcatcgaacagagaaccgaatctcataccaacgatatcggaagatacgatctcgtctgtgttgtatccgaaggactcagtagctgctgccttcatagctgcgttgataccatcaacagtagcctcgccggtaacaactgcgttcaggatagtggtagaacctgtcggggtcggaacacgctgtgcagctccgatgagcttgccgttcagctccggaataacaaggccgattgccttagctgctcctgtggagttcggaacgatgttgactgcgcctgcacgggatcttctgaggtcaccctttctctgcggtccgtcaaggatcatctgatcacctgtgtatgcatgaattgtgcacatgataccggactcgatcggcatgtagtcgttcagagcctttgccatcggtgccaggcagttggttgtgcaggaagctgcggaaataacagtatcctcttttttcagagtggtgtggtttacattgtaaacgatggtcggaagatcgtttccagccggagcggaaataacaaccttcttagcgcctgctgcgatatgagcagaagccttctccttggaggtgtagaagcctgtgcactccagaactacgtctactccaagctctccccacggaagatcctttgcatccttctcagcatagatcttgatggtcttgccgtcaactgtgatgctgtcctcgccagcgcttacagtctcagccagagcatacttaccctgagatgaatcatactttaacagatgagcaagcatcttcgggcttgtcagatcgttgattgcaactacttcgtaaccttcagcaccgaacatctgtctgaatgccagacgaccgatacgaccaaaaccattgattgcaacttttactgccatgattacaattcctcctaaatgtaaaatgtaatttgatagtatgttgggatttctcgacttcgtgaaaactttcccaacctgattgttattttacccaatttgtcccaaaaattcaagtggcaatctgcattccgggtaaaattttgtggactttttgcatctcttccactattatgtttacggaatgtacattttgccggtttttccggcactctgcaccattcacaagacagaaaggagcgattttatgagcattttttatgactgccatctgcattcttccttttccgctgacagcgaaacgcctgcggaggcgatgattcagcgcgccatctccatcggtctttccggaatgtgcttcacggagcatctcgatacagactgccctccggaaggccccgacttttgcctcgatcttccggcctattttgaaaagctctctgcattacgggagcgcttccgggatgtgatcgatatccgcatcgggctggaattcggcatccagccgcaatgtacgaagcttcttccggcgcttgtcgcacagtatccctttgactttatcatcgcttcccagcatttcatcgacggcagggatccgtattacccgtcttttttcgagggaacatgtgaagagacatgctacatccggtattttgatgaaatccgtgagaatctggaccgatactcggactttgatacactcggccatctcgactacatcgtgcgctacggcccgaaccgcaaccgggaatacacgtaccggcgctacgccgaccacatcgatccgatcctgcaccggctgattgaccgcggcaaatgtctggagttgaacaccggcggcctgaaatacggccttggcgagccgaacccgtgccgtgaaatactgaagcgctaccatgacctcggcggcgagctcatcaccgtcggcagcgacgcacacgctccggagcacatcgcgtatgattttgcgacggcagaaacgattttaaaggagaccggcttccggtattatacggtgttccgggaaagaaaggcaaagcagcttccgctgtgaccgccgcagacaccgttttacagacccatttggcctcattcttccggtgcgatctgattgtacgcacggaacgcatcggagatatgatactttgtatcatccgtctgcgcccagccggctgtcacgaggatgtactcttttccgttgatcttagccatgctcgccagacagtggcccgcctcatcggtgtagccggtcttgccgcccatgagctttccgccgttcacactgtcgtccgtaatatttttaaaaagtgagctccagaatgtaaatccgtccggatggaccgcagtcggctgcacagtgtaggaatgtgtcgtgaacacctggtaaaaggtcttatttttcagcgctgtgcgcagaatctccccgatctcgtgcggcgtcgaatactgatcctcgctgtgcagtccggtcgcattcgtgaaatgggtctgcacaagtcccatatccagtgcattctggttcatcagctccacaaacgcatcctcggagcctgccgcctcgatcgccagctgcatacagcactctgcgcccgacggaagcaaggccccatacagcagatcacatatctttgcctcctcgcccggctcaaagccggcgcgggacgcatcctgtgcgtacagctcatcataaaaatcggctgacatggtcgtcgtcgcatccaggtcggagatcgaccggatcgccgtgagcacggtcatcaccttgaccatcgatgcagggaatatcttctcgtcgcccttttttgaggcgagcacgctcccgctctctccatccagcagaatcgcatacgggcttacgagcatgctcagatcaacagttttctgcagcttttgcacctgtgactctgcctgtgcctgatcggaccgtttcttccggctgtgcaccagtgcgatcccggccgcaagacagacaatgagcacgagaaggaatagaatgatcagcagctgccggtttctgcgccgcctttttcttccggccggacgcctgcccttcccggatgctctttttaccgcaattcttttatctgcatatctgcttccgccggatgtacggccgtcgcttcttttagtatttgtccggctctgccatgcagatttctcactgcttctggctgttcgccggtcatttggtatttctggctttgaggaagcggacggtatccgtcgctcctgttgagactgtcttctttccatcttttttctcctgtggcagctctccacaacatccgttttttaagtaaaacaaacttctgcccctccgccttcgataggcaaaaaggacagaagtatctgtctgatctttatttaataattgtgccgccgcctgcgacgtactcgccgtcataaaatacaactgcctgtccgggtgtcactgcacgcaccggctcctcaaaaatgacctcggcccggtccgcaccgatcctgcggacatgtgccttcgtcccccggtgattgtagcggatcttcgccaccaccggaaaatcatccgggaagtccgggacgctcataaaattcagatcggagcagatcagccggtctgcatagacctccgtcccgtctccgatgacgacctcatttgtctccggccggatctcaagcacaaataccggctttcccatcgagaggttcagacccttgcgctgtccgacggtataatgggtgatcccgcgatgacgtccgacgatcttcccgtccgtcgtcacgaaattgccctccggaatctttttaccgctgttctcctctataaaccttgcatagtcctgatctggcacaaagcagatctccatgctgtccggcttgtgtgccacatagagtcccagctcctcggcaatcgcacggacctggctcttctcataggcaccgaccggcatttttgtacgcatcagctgctcctgtgtcagattgtacagggcatatgtctgatcctttgccgccgtcacagaattgcggatcgcatagcggccattttgcagctgctcaatccgggcgtagtggcctgttgcgatgtagtccgcaccgatctgcatgctgcgctgcagcagggactcccatttgacatagcggttgcaggcgatacacgggttcggcgtccgcccgtttaagtattcccgcataaaataccggatgaccttccggtcaaactcctcgcgaaaattcatgacatagtaggggatgtccagcatctgcgcgactctccgtgcatcctctacggcacttaaaccgcagcagccgccgttctcctcgaccgtctgattgtcctctttttgccagatctgcatcgtgacgccgatgacttcatatccctgctgttttaaaagatatgccgcgacggaggaatcgacgccgcccgacataccgactacgactttcattaatactcctcggactcttcttcctcgccctcatggatgtcagacttcggcttcttcagtccttcgatctcgatgccgttcttctgcgcataatcccagagtgccgcgtggattgcctcctctgcaagcagggagcagtgtacctttaccggcggaagtccgtccagcgcctccataacggccttgttcgtcacctcaagcgcttcctggatcgtctttccctttacgagttcagtcgccatgctgctcgtcgcaacggctgcgccacaaccaaaggtcttgaacttcgcctctttgatgacaccgttctcgtcgatgtcgagatacattctcatgatgtcgccgcactttgcatttcccacggtgccgacgccgcttgcattttcaatttctcctacatttctcggatgctgaaagtgatccattaccttttctgaatacattctgtttcctcctatctgatacccgatccatattcaggatccgggcagtagcttctattttctgatgagacaacacacgcgctgcgagctttgcctcttattttgatctgctgtgtcggttactgctgagacttctttacaaaatcctcatacagcggtgacatgctgcgcagccgctctacgattgcctttgtctcatctacgacataatcgatatcttccttcgtcgtatctgcaccgagggtcagacgcagagagccgtgtgcgatctcgtgcggcaagccgatcgccatcagtacgtgagacggatcgagggatccagatgtacaagctgatccgctggagccacagatgcccttcatatcgagcataatcagaagggactcaccctcgatgaactggaagctgaagttcgcattgttcgggagacggtctgtgcgatgtccgttcagacgtgtgtaaggaatctcctttaatacgcggtcgatcagatagtcacgcagctttgcttcttttgcggtacgctccttcatagtcgcaaatgcttcctcggctgcctttccatagccgacgatacccggtacgttctccgtgcctgcacggcgcttgcgctcctgtgctccgccatgaacaaaggaacggatcttgacacccttgcggatgtagaggaatccgatgcccttcgggccgttcagcttgtgtccgctggagctgagcatgtcgatgtgatactcgtctacattgatcggcagctggccgtatgcctgcacggcatcggtgtggaacaaaatgccatgcttctttgcgatctctccgatctctttgatcggctgaaccgttccgatctcattgtttgcaaacatcacagaaatcaggatcgtatccgggcggatcgctctttccagctcgtcgacctttaccttgccgttctcatcgacatcaatataggaaatctcatagccccgcttctcgagatattcgcacgtatgcaggatcgcatggtgctcgatctttgtcgtgatgatatgctttcctttggattcataagcctctgccgtcgccttcaatgcccagttatccgactcagaaccgccggcggtaaagtaaatctcctccggctttgcgccaagcgtcgctgcgatcgtctcacggcttttattgatcgcttccttactctttgttccgatactgtaaatgctggatgcgtttccgtagtattcggtaaaatacggaagcatggcctctacaacagtcggagaggtcttggtcgttgctgcattatcaagataaattaattttcccatagctttattctccttctatctaaatcacggtcccatcagccggagcagctgttcctgctgtaatcgacatcatgattttttgctttttcctgtgcttttctgctctcagctaccagctgatcgagcatcatctcatccacggtcttctctatgctctcattgatgcgctgccagacatatttggtcacgcagagctcctcgccttcacagccctcctcggtctgcgccgtgcagatcaccgctctgacatctccttccaatgcgcgcaggacatctccgactgaaatacctgacgcaggccgcgccagacgatagccacccgccgcgccgcggatactgaccacgagtcccgccttcttcagcttcgctacaagctgctccagatagctctctgaaatcttctgccgctgtgcaatgctgctgatggagacagcctcctgctcactgtactgagcaaggtcgatcatagccctcagaccatatttgcctttcgtggatattttcatttcatcaccctgccttacctgtcagtatgacatttccgagtaaattgctcggatttcatttgcaagaataccattctcacattattctgtcaagggatttttaagcaaaaacgtatcatttgcgcactttttccggcataagcttaactaatccctacccggaggcagtcatggttctctcttatctgatcaagggtacgttctggctcactgcagccggcctcatcacccgcaccgcaggcttcttctataaaatattcctctcccgcatcattggtgccgaggaaatcggcctgttccagctctgtatgccgctctatacgttctgccttgctgccgcatccggcggcatccagacgacgctctcccgcttcatcgccgaggcggaagcaaaaaaagatccggaagaaacacggtgtttccttcggatcgcgctttttctcacattttttatctcactcctgctcgccttttgtctctggggggtctcggatgtgattgccgtgcgtttcctgctggagacaagatgtcagtggctgctgcagctgctcgcactctcgcttcccttttgtgcagggcacgcctgccttatcggctattttctcggaaaaaagcaggcggggatcacggcgctctctcaactaattgaacagggcgttcgtatcctcacggccgtcctttgctgcctgttcctgtccggacgcacggcgcagggcgcatccgttcttgccctcggcacactggcaggcgaaggagctgcctgcctgtactgtcttctgcatctgccgcgcctctcctttggcagactacacggcaaacctctgtacatccgcccggttgcaaagcatatttttgctatcgctgcaccgctctcgctttgtcggatgatgctctgcatccttcaggcaatcgaagcggctctccttccgcagcagctacagcgctatggtctgtccgcctccgacgcactctcctgctatggcattttaagcggaatggtactgccgctgcttctgtttccaacagctgtcaccggttcgtttggcatgctccttcttccgctcatctctgaagcccagacgctgcggcacgaatcgcgcatcgtctccgtctccaggatctcgtttttcggaagcctgctgctcggcctgtttttttcttccttcttttttctctccggagatgtcgttggccggctgctctttgacagcgcggaagccggccgctgcatccgaagccttgccctgctctgcccgctgctctattcctccaccacactgaccggcatcctgcatggacttgggaagacagccgcactgtccgtccaaagcacagccggctttctgctccggctgctcttcgtgctctttgccgtgccacgcttcggactggccggatatgtgccgggcctgctggtcagccaactttttctcgtcattgccacactctgtctgcttggcgaaggcctgcagcagccgctgttctcgctgcctgagcttctgcttccggtcctgccgggcctaatcgccgtcggtatcatgctgctccttgacagtcggattccctggctgggcgcatgcagctggggatcactcctggtacacacctcgctgctgtttttgattttttttgcgtcggtgatatgtggctattttcctgcaagtaaaaaaaattaaagcaagtcccactgcttattgctttacgcagggggcttgcttgaacgcagataagcattcccctgcttcaagtgcgcggagcactaagcggcgggtgaggggggatgcttatgtca

SEQ ID NO: 3843 - DNA, 28875 bp, Unknown
  16S sequences of unknown bacteria
tgtacaacatggtgcgcatcatggtaggaacactgctggcagcaggcatggggaagatcccctgtacgcccgaagcgatccgggccattgttctgagcaaaaaccgtgcccgagccggcggaagggttccgccctgcgggttgtatctggataaggtgtactatgagccgatcgaaggacaacagagctgaaaatatcaccgatctgcggcagctccggaaggagcgcagccgccggcgcgcctggaagcgtctggggatcttcctgggcatcctgctgggtgcctggctggttgtcagcggcgtccagggctttttcagcggaacctacatcgaggacatcaacagcttcctggcgatgtacctgcccggcgatggcttcccggtggaggtcaccgggtcggatgtggtgagcctgcagaatgccggaggggatctggcggtcatcggacagaaccgggtgctgtactataaccccaacggacggaaggtgcgggagatccgtcacaatctctacaatgtggacggcacctgctaccgctccaaaacgctgctctatgaccggggcggcaacgatctgaaggtgtacagcggggagaaggagctcttttcccagaactatgccaagtccatttactgtgcggaactcagcagttccggcagtctggcagtggcaacccggtcggatacccatacttcccaggtgaccgtctacaatgataagttcgcctccatctatgagtggtactcagcggaggggtatgtgctggatctctgtctgcctgcctcgggcaaggtgctggctgccgccaccctggaagcccaggacggacagctggtgagcagcgtcaatctcttggacctgacccggaagcaggagacccgccggctggatttcaccggagagatcattgtggatatggcggtatcgggtggagatcagaacctctatgtcctcaccgacaaaaagttctatgagatctccctttcggcggcaacggtactgaatacctatgatttcagtgctcagggcctgtggtattaccactttgacgaggggatcttcaccctggtcaccggcaactatgtggaggagcgcagcctgaatgtggtgcgcctgaccccgggctttgccgaaccgcggtacgcagcctgtaccgatcatttcatcgatgtgcgttccgattcgggacacacctatgtcctcaccgacaatgaactgcatgtctatgacgcgcagatgcagccggaggcagtgtacgatacgccggacgccagttcgctggaactcatcggcgatgatgtatactatctcaccggcagcagtctggaaaaactcagtcaccagcagcaaaaagaggaggaataaccagcttctcttccgctgcaaactctattgaatctggaggtgtccatgaatattgcttctatcctgatggatctggctgtggtattgattgtaatctggcaggtacgccggggctatcacaacggcctgatgcgtatgctgatcgaatgcctttcctggctggcagccgctgtactggctgtgatgatcagctatgccatctccggtaccatctatgatatgttctttgcgggccgcatcaccgaggcggtcaccaacgccatcctggaagccggttcgcctgaggcctttgctggctccctggaacagaccctggcctccatgcctgaggccatccgttcggcggcggaattcctgatgggcggtgtggatctctccgcagtgacctcggcgcaggccgcggagctggcccagacagtcaccgactccattgtgcgtccgctgatcacttcggccatccagctggtgagcttcctgatcctgttcgccctggggctgatggttctgcacattgtcgccattgcgttcggtgccttcaactccattccgctggtgggcggcatcaaccgggctctgggcggtgtgttcggactggtcaaggcagcggcgatcctgtttatcctcaccctggtgctgcagttctacttcaccttcggtactccgtcgggcgtgctgacacctgctgcggtacaggagagcttcctcaccgaaattttctatgacaacaatccgctttcccacttcctgaatgtgggttaagcaattataccattttattggtatttcatggcataatatgatatactgaaaacaagctgaacagagccgcttccacaagcggcagaagagcgggtcgcaggggggcggcacggtcgatggcagccactttgatctggaaaggagccattctgtgactatcccaaactgtatttcgctgttccgtatttttctggtgccctgctttgcttgggtgttcctcactgccagcctgccggaggacttcacactggcggctgtgctgctggtggtgtccgccatctcggacctgctggacggctggattgcccggcgcttccacatgaccagcaagctgggcaagatcctggacccggcagctgacaagctcaccctgttcggggtgtttgtctgcatgtgggcccggtatccgggattctggccgctgtatagcctgttcattgccaaggaactgctgatggctgccgccagtgtgctgatcctgcgccgcaatcatgagatcgaggcgtcccattggttcgggaagctctatacgctggtcttttatgtggtgtcggtgatctctgtactggatacccgtccggtgtccctgctgcgtctgggactctggtggggtatgagtctctttaccattggctgtttcgcgctctatatcccggtatttgtccggcagtggcagtcacagaacgactcgaaaccgcttggacagggctgagattagcactctcggtatgagtgtgacaacaatttaattgtttttgtcagaattgtcattttctgttcatatcccatcgctataataccattgtgagcaggaatgttccggacctgttttcaccctccggtgaacgacaggtctttgctatataaaaataacgcggcttccgggctgcgggaggagggcctatgaagaattttatgtgtacccgctgtcacaagcggcctgcggtgatctttatgagccgtatggaaaacggacagatggtcaacgaggggctgtgcctgcagtgtgccaaggaactgggaatccctcaggtcaaggatctgatcgaccgcatgggcatatcggatgaggatattgagtccatgagcaatcagatcatggatatgatgggggacgaggacggattcgaaccgggcggcgccatgccgttcccgatgatgaatatgttcggcggcccgcttcagcaggaggaagaaaatctcccggctgaacccgaggaaccggcttcggatgaaccgggtactccggcccaggagaaaaagcgccggaagatgaaatatctggacagctactgcgagaaccttaacgacaaggtgcggcagggcaaggtggaccggatcatcggacgggacagcgagatctaccgggtgatgcagatcctcaaccgccgtaccaagaacaatccctgcctgatcggtgagcccggcgtgggcaagaccgccattgccgagggcattgcccagcggctggtggagggcaaggtcccgcccagcctgctggataaggagatctggctgctggatctcactgccctggtggcaggcacccagttccggggccagttcgaaagccgggtcaagggtctggtggaagatgtcaagaaggcgggcaatgtgatcctcttcattgatgagatccacaacctggtgggagccggtgatgcggaaggctcgatgaatgccgccaatatcctcaagccggcgctgtcccggggcgagatccaggtcatcggcgccaccacctttgatgagtaccgcagccacatcgaaaaggatgcggctctggagcgccggttccagcctgtaacggtcaatgagccgtccatcgaggactcggtgcaggtgctggagggcatcaagcagtattatgagaactaccatcatgtgaagatcagcgacgagatcgtgcgccgctgcgtggtgatggctgagcggtatatcaccgaccggtacctgccggacagggccatcgacctgatggatgaggccgcttcctgctgcaatatggagaacaagaagctgatcgaatacagtgagctcagccgcaagctggagcgtctggatcagcgggaaaccgagatgcagcaggccgagaatgtggactatgaaaagctggcagaactgcgcagcgaacgcctgcggctcaaggatcaggcagaggcagtggagcaggaagccctctccgcagaggtaaccgtggaccatgtcgccaaggtcatcgagctgtggaccggcattccggcctccaagatcaaggagactgagctggcaaaggttgccggcctggcagatgccctgaaaaagaaggtcatcggtcaggacgaggctgtggatctggtggcagcagccatccgccgcagccgggtacagatcagccccagacggcgtccggcctccttcatctttgtcgggcccaccggtgtgggcaagaccgagctggtcaaggtgctggcttccgagctgtttgacaccgctgacccgctgatccgtctggatatgtccgagtatatggagaagcattcggtttccaagatcgtcggctcgccgcccggatatgtgggttatgacgaggccggacagctcaccgaaaaggtgcgccgcaagccctattcggtagtgctgtttgatgagatcgaaaaggcccatcccgatgtgctcaacattctgcttcagatcctggacgagggccggatcaccgattcccacggacggacggtgtcctttgagaacaccgtcattgtgatgacttccaacgccggaagcaatgtgcgcagctctgccatgggcttcaaccgcacagcggaagaggcggagaggaaccgtgtcatgaaggcgctgggtgacttccttcgtcccgagttcctggggcgtgtggatgagatcgtggtgtttcgggctctggacgagaacgactatgcccgtatcgctggcctgctgctggacgagatcaagggccccatgcaggagaagggcatcctcttcggctatgatgaggacgctgcccgcctgatcgccaagaagtccttcggcgaccggagcggcggccgtgccatccggcgcaccatccgccgggaggtggaggaccgcatcgccgagctgctggtggagcgtgccggtgatcctccggcgatgctgaaggtcactgccgagggtgatgaaatccgcctgatccacggctgatggcaggggataaaacaaaacaaaaagggcgtgcctctttcatcgaggcacgcccttttgattatgcgtttattcattgggcctgagcgcaaatttccagggaagggggggatatatcagtgacgaatgatttgtgatctcactattttcctcgtcatatacaatgagcatcatagcgtgatgtccccacctctttttgaaaaagtattgatactgatatcgcagctcgggcgcctccttgtagtgtacaacaacatagtaagaattttgcgtatactctttccggtaggtaacggagaggaaagaatcggggtccaccccctgcagctgcgtgtaagcctcaaaagtccgctccgcatagtgccgctgatacgggaaggaaaagagcagccatccggcaagagccaaaatgacgcaaaacagcgcaacgaacagaaagcgtttcataagtcacaaccattcctgaacgaggtcgagattgtggatcgtatccggaagggagtaggggagccgtacgccccaggtgggtccgttcgcggcagatggagtatgaccataataataagcctgccaaaccagtttggagcagtaggtttcgtctgtagattccaagtccatcgtaattacatattcggcatcagaatccttgtatgtgtcctctgcccactgcgccgcatcttcagcaatggaagaatcgctatggcgataaactttgttccagccttcatcatattgcagatatgctccatctggcattgtgctatccatttgggggccggcaaaggctgtggctgtcatcgcaaagagcatcacagcagaaactaacaaactaacgattcgcttcatattttacgcctccatttattataagtattgaatcatattattcaacaaatgtcaataaaaatatgaaaattatacagtatttacgcttttcttttgaatgggtaggcgtttagcgggcagcagtccgtatttacgcacgcggaacatggccgaacacacaggggtatgtccgccgcgcaaaaaatcccccggctgggccgggggatttttactgtataggatgggattttgctgtggcttctcagtcgtgccgcagtgcttcgatggggctcatctgggcggccttcttcgccgggtaaacgccgaagatgatgccgacaccagccgagaagagcacggtaccgatgatggagatgggggtgaataccggcgggaatccaccaatggtacagaagatataagcgccgatcacgccgaataccagaccgatgaggccgccgatcagggtgatgatggtggactcggtgaggaactgcagcagaatggcattggtcttggcgcccagggatttgcggataccgatttcccgggtacgctcggtgaccgataccagcatgatgttcatgacgccgatgccgccgaccatcagggagatggcagccacagccgcaatgaagctggtcaccagacccatgacatcgttgatcatatccagctgggaactgagatcctgggagtagtagatgctgcgtccggcattgttgtgccgggcctccaggatccgcacagcggtgtcgctcatggcgctgttcaggctcttgtcattggagatcaggtagaggcttgagtactgggccttctcattgagcagggtaagtcccgaattgagcgggacatagaaggtgccgggcaggaaatcgagcatatcatcggtgacaaacccgctgtacgggctcttgcagacgccgacaatgcggtaggacttcatgttgtccttgtattccagcgtcacttccaggccgatgacatcggtggtgccgaagaacttctgggctaccacatcatcgatgacacagacattccgggcactgaggttatcactttccgtaaagaagctgccgctcaccatgctgacgccattggcggtttccatgccttcggtaccgcagtagatggaggccatgatggtggatttgcggaagctgccggtgccatatcccgtgagctggggtgtggcagcccggaccatttcattttccagcagggcttcgatatcctcgttggtgatgagatcgttttcgctgccctcctcggtatccaccgagatgatgacggtattggtgcccacagcttcgagctggctgttcatataggcacggacgccgtcaccggctgcgatgatggtgatgaccgatgcgataccaataatgatacccagcatggtcagcagcgcccgcatcttgttggagcggatgctgtcaatcgccatcctcaaatattctttcatcagcatcagtcagccctccctcaggccaggatcaggctggcagatgtcatattctcgatgttggcagggggattggtgatgacaatatccccttcattcagtccttccagcacctcaaccgaggtcagcgaggaattgccggtggtgatatataccttctccggacggtaggtgccgtcgccgttgtcccgggctacatagcagtagtcaccggtgcggtcagtcttggaggcctcaatgggaatggtcaggcagttttcgttgaggtaggtttcaatatccagctctgccgagatgccgggcactacaccttccggattgtccagggtgacttcggcacggaccgagtcgtccttggcaaccgagtcgatgtgggtgaccgtaccgggatattccacgccgccgatggtggcagtggccttctggcccacctgaatatcgccgatgtcataccgtccgatgttgaactctacggtgttggactcggaggtcaggatggaaacagccacagtgcccttggcagcagtgccgtaatcggtgacgccgatggtctcgatcacaccgtcgtgctgggcgtaaatatcctggggcaggttgttgtagacatcctctgcttcgtccagggtcatcttggtcagctcaaagttgagctgctggatcttgatgtaatcggccgaggggatctgcttttccagcgcttccttctgatctttggcggcttcccacttgctgaagtagttattatagaggcggttggcctcgatcagatcctcatctgtggtgttgccgatggtttcgtagtcctcgtagtccttccacttttccttgtagaactcgatgtcctcgatgcagtcgtccaggtcctccttcaggtcccagtagtccttttcggtctcgttgagctgcagacgggcagtttcatagttgatggtcgccttcttgtaggcgtccaccgcctcgctgttatcaaacttgacaatgaggtcaccggccttgacactgtcgccgacctcaaaataaaccttttccacttctgtggtttcaggaatggggtacttctccagaccatccccggctacattggcagaaaaggaaactgtggtgcggatctcacccatggaagcggcggcgccgttcagagtgggcttgtatgtaagagttccgtaaacacagctgcccagcggaaccaggatcagcgccgccacaacgatcagtgcgatctttttcttgctgagcttcttcttttttggtttttctgccggcttttcagcaggcagctgttccgttttctggatctcagttgtttcttccatttgttttacgcccctaaactgtaaagatgtacggtccgcccgcggcggatgcactgtatccagcacccggtccgggcagggtttgtgtatgcgaaaacagccgaggctcccccaataatccaaattccgcagcgcgcgatacagtgccgctgtgaaacagccgtcgggatttcgccggatcattggctctccgggcgttctccggcgcctggacagaccaacataagctaaagtatatacttctctatatataaagtcaaaggataatttatgaaggaattgataaatttgtaaacaagccgtcaccggacagtaagaaatctgtggcgggggtttgccaaaagcgggctggctatggtatactgggcaggatattatatgcccaaagcagaatcaggaggaataaaacatggtaattcgtcatctgaaagcggaggatcaggcagtgttcctcgcgttttgtcaggatttctattcgggcggcgctgtactgcatgctgtggacccggataacttccgccgcaccttcgaagcctgcgtcagcggaaacccctataccgaaggattcctgctggaagtggacggacagccggcgggatatatcctggtatcccatacctggagcaatgaagtgggcggcatggtagccctgctcgaagagctgtacttcacacccgagttccggggcaagggtctggggacccaggcactggaatggttccgggaacagtatgcatcggcccgtcgtctgcgtctggaagtcaaccgggaaaatgagggcgcaatccggctgtaccagcgcaagggttaccacttcctggaatacctccagatggtggaagaacactgagctgattcccgggcaaatgcggttgtaaagccgactttggtatgatagaatggatttggcagcagatccggtaaatttttcaccgggctctgcaacagactcctgtttttttgacacagtaactaaagacggataaaccaatacaaggcaaaaaagccggttccattgggggggatcgcttggaaaccatcatcaccatcaaggatctgcgaaaggtctataagcttggcagcgaaaaggttgtagcactggacaatatcaacctggagatccagaaaggccaggtatgctgtattctgggtacatccggttccggtaagagtaccctgctcaatcagttggctggtctggaaaaaccaacccggggcgctgtttacataggcaaaaacaatatctccaaattcggagaggaccgtctggcggcattccgtcagcggaatatcggatttatcttccagtcctataatctgatgacttcccatacagcactggaaaatgtggcaatgccgctgatgttccggggcgtaccaaaagcaaagcgggaaaagattgctgcacagatgctgcgggaagtgggactggaaaagcggatgcatcaccggcccaatcagatgtcgggtggtcagcagcagcgagtgggaattgcccgggcgtttgtggcaagtcccaagatcatctttgcggacgaacccaccggcaacctggataccaaaaccaccattgaggtaatggcaatgatggtgcgtatgtgccggcagaacaaccagaccctgatcctggttacccatgactcctatctggcgcagtatgcggaccggattgtgacgctgatcgatggaaagatcgtcagtgatgtggaaaacaagtcgattgtggaccgcatgagcaatgaggagattgtggaatacttcctgtcggagaacgccaatctggcggagacgacggtgctggagagcgaagaggagatcgaagcgatccggcaggagctgcaggaagaaaagcaggcagaagggggagagccgccggtgggaacggcagcatccaccgcaggggaagaacctgcaccgaaagcggagctgccagagcaggagagcccggctgacaccgcagaagaaaatctggagggaaacaaacaatgataaaaaagacttatgtgcgggtgatcaccctgcttctggtcgcgctgatgatcctgggcgtgatggctccggcctttacctcgtatgcggcgagtgttctgagtatcacaggaacaacaaatgtttctgtcagcggcactccggacggatctaagctgactgaaggaaagtatgaattcaaagtccagggaagcgataagatttctcttcaggtcaaaacaggtgacagcggttatcagtctgcggacggcgccagttttgctgatggaaatgtcagcgtttcctatggcggcgtcactttcaagccttcgggaatatacagtggcgcatggcaagaaggaaacactttcagcatcgaagtccagagtgtaactgcggacgatgaaccgcagattacagcgtccaacattaccggttcttcccgtattaccaagggacgctcaatttccattgatgctactattcttgatacaaacttcatgtataccgaccaggtaacagaggagtatgttgctttcaagcagggggactttaagcgcggcactggtactccggctgactccatcactgcaagcaagggcgttggcggaaagctgcagctcaatgtgcatctgagcgatctggtttacaccggttccggcgatacagttgaatttgtgatcggttataaggtcagcggtgaagaataccgctatactatgagcatgaagattccgggctgcattccctatgtggataaggacgatccggaggaagatgatgaggataccaacctcgacccgctgatcccgcatatcattgtcagccagtatgactacggcaccacacaggtttcggccggacaggtcatcgacctcaatctctccttcgagaacaccagcacccagtatgatctggacaacatcgtgatgaagatcaccactcccgacggcttctccatcaccagttcgtccaatacctatcacttcgaccatctggatgtgggcgaaagcatctccaagaccatcagcatgcaggccaatcccaatgcggaagcccagagctatgccatcaatattgagttttccttccagtacatcgccaatgatacccgtaagagcggggagtcgtccgagagcatttccattccggtaacccagccggaccgcttctcggtggacgagatccaggtgccgaccagcctgtatgtaggcgatgaatacaatctgtcgatcaattttgtcaataagggcaagactcaggtttacaatgtcactgcggaactccggggcaatatgcagaacagcggagaacgcagctttatcggcaatgtagcttccggtgctgaagagagtgctgatttctatgttactcccaccgaggccggcaagatggaaggcgaagtggtcatcagctatgaggacgccagcatgaatgtacgggaagtaacccgtccgttcaccatcatggtagaggaaatgccctatgtggatccgggcattgatttccccgtagtggacccccagcccacagaggaacccagcctgtttacagtacagaatgtggttctgtttgtagtggcagccggagttgccggagccaccggatatatgactgtcctcaagatcaaggccaagaggagcgaattcgacgatgaagatctctgatctgattaccatgtgcgtgcaaaacctgctgcgccgtaaggtgcgtacactgctcaccgttgtgggtgtagtagtgggtacctgcgccattgtggtaatgatctccattggtgtaggcatgcaggccagtaccgatgccatgcttgccagtatgggtgatctagatctataactatggctcgggcggcggcagcaatacccaggccaagctggatgatgagaccctcaagcagatctcccagatggacggtgttgtagttgtaaccccgttctatcaggcctatgacatcaatgccagtatttttgccggcaagggcgaccgctatgagatgagcctttccaatgtagtgggtatctatcccgaagcgctcagttcgctgggaatcgaactggtggacggcaatggcttccccaccgagaacctcaagccctatggcattgtgtttggtgaaaaggcagcctatgccttccgggacaacaagaaaaagccgggctacaactatgtggattcctggcccgatgccaacggcaatgtaaaggacccgttcgtggaccttaaaaaggataagctgcgcatccagaccggctccaatgacgaggataaggaaaccaaggtctatacctacgatctgacctattacggacggatgaaggaggactacaacaagggttacgaaacctcgcagggcgcctatatggacattgacgatctcaagaagatccgcaatgactactataaagccaacaatatgaagctgccggaggataccggataccagaatgccaaggtcaaggtgaccgacatcagcaaggtatcggaagtgcagaaggccatcgaggacatgggcttttccacctggtccctggacagcatccgggaacccatggaggaacaggccaagcagcagcagctgatcctgggcggtctgggtgccatctcgctgtttgtagcggcgctgggcattgccaataccatgatcatgtccatctatgagcgtacccgggaaatcggtgttatgaaggtgctgggctgctttgtaggcaatatccgcaccatcttcctgatggaagccggcgccatcggctttatgggcggcgtcatcggcattatcctcagctatatgatctccttcgccatgaataccttcggcttctccatgagcggctcggatatgtcgtcctattacggcactgatgtatccattatcccgccgtggctggtagccctgggactgatctttgccacctgcatcggacttatatccgggttctatcccgccaaccgtgcagtcaagatctcggcgctggaagctatcaaaaccgacggttaaacgcacagaacatcacaaaaaaacacgggacaatcctgtcccgtgttttttcttttgtatggattaccggcgggtcacagccgaggtgtgatgctcccgcagataggtgctctccagatccgccaagtgcatcttcaccgccagggggtacttctcaaaggcaaggctcagagcaaagctgccgccccggaccgcgtcatcaaagccgcccatgtgccagcggatagccatggcctccgagggtttgagccgcaggaaccgctcgatgagatagaccgatttctccccgtgaccataggggaactgatcctccacagcataatagggaaccttttcccagctgccggtttcctcattcttcacattccgggtggataccttgtagaagttggctttgcacaggtcatgcagcagagcggcaatggcaaagctttcggggttgtcggtgccctcctcaaagtagcgctccatcagggtgtggtagacgctcagcgaatgctgtaccagaccgctctcacaggcacagtggaacttggtgctggcaggcgcggtgaaaaagtcggtggtctccagccaggccagcagttcccgggctccttcccgcttgatgttctcggtaaatatggcgataaattcttctttgggtgtcatggcgcattgctcctttcccgttctctatggtcagtataccagattttctccccgagaaaaagcacttgattttttgaaaaaagggcgttacaatatttttcggagtaaacatttattcagacagcttaatttttgtttatggggtgcggtatgataacagaacgggaaagacagctgctggactggatcgcggagaatccgctgatctcccagcaggagctggcagacaaggcggggatcacccggtcatcggtggcggtgcatatctccaacctgatgaagaagggctttatccaggggaaaggctatatcctgcagatgagcccctatgtagtggtggtcggcgctgtgaatatcgacatcgccggtatgcccttccgccggctggtgggcaaggattccaatccgggcactgtgcacatgtccctgggcggcgtgggccggaatattgcccacaatctggcgctgctggatgtggaggtcaagttcatccccgcctttggtgaggacatccatgccggagagatccagcacagctgccgggaaaacggcattgacatcacccacagccggagtgtgagcggggcatccacctccacctatatgttcatcaccgatgaaaacggcgatatgcagctggcggtttcggatatggagatctattcctatctgaccccggagtacattgcctccaagctggatgtgatcaacaacgccagcctgtgcgtcatcgacaccaacctgcctgctgagaccatccagtatctctgcgagaactgtacagtgcccatctttgccgatccggtatccactgccaaggcggtgaagctgctgccggtgctgggcaagatccacaccatcaagcccaatatgctggaagcagcactgctcaccggcattccggtgaccgatgagcggtcggtccgcaaggcagtggatatcctgctggaactgggtgtgcggcaggtgttcctctccatgggagcggcaggggtgctgtatggcaatgcccggggtaagaagcgcattcccaactacccggcggagatccgcaataccaccggtgccggtgacagctttatggcggcgctggtgatggcctatctcagtgagttttccaccgagaaggcagcccggtgtggactggcagccgctgccatctgcatcgagggggagaataccatcaacgaaaagctgtccagacaggccgtactggaccggatcagcgaaaactgagtgcattacaggaggaattttacgatgaagaatctggagaaatatctggttgtagcaccggaagtaaaagcagcactggaagccggcaagccggtggtagcactggaatccaccatcatttcccatggcatgccctatcccaagaatgtggaaactgccctggaagtggagaagatcgtccgggaatgcggcgctgttccggctaccatcgccatcatcggcggcaagctgaccgtgggcatcacccccgaggagatcgatcatctgggcaaaaagggcctggctgtgaccaaggtgagccgccgggatatcccggtggtctgcgccaagggtgaggacggcgccacaaccgtagctgccaccatgatcctggctgacatggctggtgtaaagatctttgccaccggcggcatcggcggcgtacaccgcggcgctgaaatcaccatggacatctccgctgacctggaggagctggcccatacttcggtgatggtagtctgcgccggcgccaaggccattctggatctgggcctcaccctggaatacctggaaaccaagggtgtgccggtcatcggctaccagaccggggaacttcccgccttctatacccgcaagagcggcttcaaggtggattaccgcatggatacccccgcagagatcgccgaggccttccgagccaagatggagctgggtctggacggcagcatgctggtgaccaatcccatccccgaggagtactcgatggatcacgatgccatctacaaggtcattgatgaggccattgccaaggccaaggagctgggcatccatggcaaggagaccactccgtacctgctggacgagatccagaagatcaccggaggcgacagcctggaagccaatatccgcctggtttacaacaatgcccgtctggcctctgccattgcggtagagctcagccgctgagcggtatcataacagaaaaaatccccctgctgcccttgagtgggtgcagggggatttttgtatgtttgtgcgggggagaggtcagcggtgcttttcactctgggccactgccagacggtcgcaccgttcattttccgggtgaccggcatgtcccttgacccagacgatctccacctgatggcggcccagctgggtgagcagctcctcccacagatcggggttgagcgctggtttgccgtcggattttttccagccgcgctttttccagccgtagacccagcccttctgcacaccatcgcagaagtacttggaatcgctgtaaacggtcaccatgcagggctctttgagtgccttcagtccttcgatcacagcggtgagttccatgcggttgttggtggtgtcatgggcgccgccgctgagttccttttcatgctcgccatagcgcaggatcgcgccccagccgcccggtccgggattgcccgagcaggcgccgtcggtatagagttccacttttttcacaggtttgccctccttcatgggggataactctgacagtatagcattccggctgtgggaaatcaagcatcctgcctgactaatctgtccggaagcagccatactaataaaaacgacaaattcagtacctttgccagttttgcaggggctctattgacagaattgcataaaaagtgtatgatagcgagtaagagagtgttcgtaaaattcagcggtatgcggcatcggagcggaacagtgcggtgtcgggttgccatacggctgactgtgctccccgggccgagaagtccccggggcgtaccctgtttgtgcggatcggacgggaagcgatccgtttgatgttttacagtacattcagtcctggatgcgttgcagacaggcttttttccgttacagaaaattaaatcgtacatcgatattttgaatgaaagagaatggaggaaattcggtggcagacgagaaaactatgaagcccataaacgaatcagaatcaaaacaggaccggcccaagcgccggtatcaccgcagaagcaataaggcagccaagcccgccgcggaggagactccggcagcatccggggaggagctggtatccaccccgaagcccagccgcagccgcaaaaagaccctggatgaggccattgccgctgtgattggcgccacagctgtttccgagccggaaaagccccgggagaagaagcagtccggcagccggaagaagaataaccgccccgccaaggagaatgctccggcagagcaggcagctcctgctgtacaggcggaggctccggctcaggaagcgccccgcaagaaccagaagaactcccgccgccggggtgggaacaacaataataccgaccccaatgcccgggtgcggatcattcccctgggcggtctgcatgagatcggcaagaacatgaccgtctatgagtgcggcgaggatatgttcattgtggactgcggtctggctttccccgatgacgagatgttcggcgtggatgtggtaatccccgacttcacttttgtggagaagaacaaggataagatccgcggaatcgttatcacccacggacatgaggaccatatcggcggtctggcctatctgctcaagactgtgaatatcccggtgtatgccacacgcctcaccctggcgctcatcgagggcaagctcaaggagcatggcctgctgggccgggtaaagctcattgaaaagcaccccggcgaccatatcaagctgggcggcttcgatgtggagctcatcgccgtgaaccactctatccccgacgcctgtgccctggcgatctccaccaaggccggcctgatcatccagaccggcgacttcaaggtggactttaccccggtggctggcccggtcatcgacctggcccggttcggtcagctgggacagcagggcgttctggcactgctggcagactccactaatgccgagcgccccggcgccaccaagagcgaacgggtggtgggcgatacctttgagaccctgttcaagaaggcggaggaccgccggatcatcatcgcgaccttctcctccaatgtccaccgtctccagcagatcgtggactgctgcgtcaagcacggacgcaagctggcagtttcgggacgcagcatggtgaacatggtggagcgtgccgctgagatgggatacctgaatatccccgaaggcactctggtggatctggatgtgctcagccgctaccccgacaacaagctggtgatcgccaccaccggcagccagggcgagcccatgagtgccctgacccggatggccatgaacgaccaccgcaagatcaccgttacccccaacgacttcattatcctgtcggcatcgcccatccccggcaacgaggagagcgtcacccgtgtgatcaacgcactgctccggcagggcgctgaggtgatctatgaaaagacctacgacctgcacacctccggtcatgcccagcaggacgagctcaagctcatgctggcactgaccaagccccggttcttcatgccagtgcacggtgaatacaagcacctgaagaagcactgtgatctggcagctgccatgggggttcccagagagaatatggtgatcggcgagatcggacgggtagtagaactctcgcctgaacagatcgccctgggcggcacggttccgtccggctctgtgatggtggacggcctgggtgtgggcgatgtgggaagcatcgttcttcgggaccgcaagcacctggctcaggacggcctgatcatcgtggtggtggcgatggattctgccaccggcgaagtggtgtccggtccggatattgtatcccgtggctttgtctatgtacgggaggccgaggatatgatgagcgatgcccgtcgggtctgcctgcgggcggtggaccgctgccgggagcaggaggtccaggactggggcagcatcaagaatgccatcaaggatcagctgggacagtttgtctggggccgcaccaagcgcagcccgatgatcctgcccattatccaggaagtctgatgcgttttcacgcagcataaacagcgttttaatataccacatccgtatcattttcgaagtgacaaatgagtgcgggtgtggtataatctttttcagaattaaaatgcgggttgttgccgctggacggcacagaccgcttttctgtaaaaattcccgcggcgaaccgcgtttcggaaaggaaggttcacggtgcgaaaacgactggcgctgctctccaccattttcggctcgatgtttctgctctgtgtggcagtaaccggtgtggctgccatggtggacccccggacactggcggtatcggtcagtgtgttcctggtgggtatgctcatcatcttcgtgcaatatcactacatcaccgtgggtaccagccggtacctgcatcagctgggcgaggaggtccatgccctgcagaccgaggcctccatcgggcatccgctggcgcttaccgtggtcagcgataccggggagatcgtctggtacaaccgcaaggcggaacagctgctcgacggcagcagtacgcttcagctctacggacgcatgatctccgattttatcggcaataccgatttccgccagcccacgccggagaaaggcttcggagtgcgcatcggcgggcggcagtactccatgtacgccaacgagtacgactcgggcagtgaaactgaaaagctctttgccctctatttcgtggacgaccacgacctcaagcactataccgatctctacttcaagacccgtcccgctgtgatgcgcatcatggtggataactatgacgagctggtgcagaatgcccgggaaagcgacaagacccaggtgctctcggagatcgactaccagatcacccagttcgtggagaaatacggcggcgtggtgagtcaggtggaaaaggaccgctacaatgcggtctttgaggacaaattcatgcagcagatcatccagaaccgtctggatattctggataccatccgcaagattgagatcagcgaccgggtaccctgtaccctgtccatcggtatcggacgggaggcgccctccatcagtgaggcggacgagatggcccgtcaggcgctggaaatggcccagggccgcggcggcgaccaggccgccgtgcgtaccaagaacggctacgatttctatggaggtctctccaagggcgtggaaaagcgcaccaaggtcaagacccgtattgtggcccaggcactcagcgaactgatcgcctccagcaagaatgtcatcctcatgggacaccggttcgcggatatggactgcttcggtgcggcagtggcgctgcacaaggcagtgacccagatgggcaagcccgcctggattgctatcgatcccgacaggaacatggtggatctgctctaccgccgggtggcggagaatggctaccgggagtatctcaaggccccgtccgagcttatggatgtggtggaggagggcaccctgctcatcgtggtggatacccattccaagaccatcatcgaatcccgggagctgtatgagaagtgccgcagcgtggcggtcatcgaccaccaccgcaagctggtggagtatatcgacaacgccaccattttctatcacgagccctatgcgtcttcggcctgtgagatggtcaccgagctggtgcagtatctcagcggcaatatccgtctgacccggctggaggccgaggctctgctcgccggcattatgctggacaccaagaactttgtttccaaggctggtgtgcgcacctttgaggcggcggcttatctgcgccgtctgggtgccgaaaccagcgatgtgcgcaagtacttcaacacctcgctctccgattaccagcagcgcatcaagctgatggcgtcggcggagctctatcatggctgtgcggttgccagcaccaaccagatgatcgaggatatcaatgtggtggcagcccaggcagcggacgaactgctcaatatcaatggagtggcggcgtcctttgtcatgtatgagaccgggcggggcgtgaacttctcagcccgttccatgggcgagatgaatgtgcagatcatcatggagagtctgggcggcggcggtcatctgaccatggccggagcccagctgtccgattgtacgctggaaagcgcccgtcagcggctgtttgaagccattgacgactatctgagcaaaaacccgagacccgccaagtaaactgcggtacagccgcagtccggcggacaccaaggaggagtattataatgaaggtaattctgacacaggatgtaaagggaaccggcaagaagggtgaggttgtggaggtatccgcaggctacgcccagaacttcctgctcaagcgcaagctggcagtggaggccaccaaccaggccatgaatgagctgaagaacgagcaggcttccaagcagcacaagatcgatctggaaatgcaggctgcccgggagaatgttgccaagatgaaggacaagaagatcatcatcaaggccaaggccggtgcgggcggacgcctgttcggttcggtgaccgccaaggagatcgccgaggagatggcaaagcagcacggcgtcaccattgacaagcgcaagatcgaactgcccctggaaatcaagtccttcggcagcttccgtgcgattctgaagttctactccggaatcagctgcgagtgctttgtagaggttgtagagggctgattccagcctgacccaccgggaaatttacgagagggaggaagaacggatggaccggaatgccagtgcggatgcactgctggaagcgcttccatacagtaaggaagcggaacagtcggtactgggtgctgtgattgcagatccggcacggattaccgatgtgctggaatatctcaagccggagagcttctacggcagctataaccgggagatattctcggtgctgatgcgcatgttcctcgcctcggaaaagatcgatgtggtcaccctgctggacaaggtgctgtccgagggcattttccccaccgagagcgacgccaagatgtatctggtcagcctggtggagatggtgcccagcacctccaatgtggcggattatgcccggatcgtccaggagaaatactacctgcgcagcctggcggagacctcccgtaaaatcctggataccatccgggagggcaccggcgatgccaagagcatcatggaccgggcggagcaggatatctttgacatccgcaagggccgggaaaccggcggtctgacccgcattgacgaggttatcatcgagacctatgaccggctccagaagctcagcggcgacgacaagagcgagtatgtgggtaccccgtccggcttcggggcgctggataccatcctcaccggactcaacaagtccgacctgatcctggtggcggcccgtcccggtatgggaaagacctccttcgccctgaatatcgccaccaatgtggcagtgcgctcgggcaagaaggtggcggtcttttcgctggaaatgagcaaggagcagctggtgggacgaatcctttcgtctgaggcgctgatccagtcgggcgcgctgcgtaccggcaacctcacccccgaggactggaccaagctggctatgaccgcccagatgctctccaaggcggagatctacatcgacgataccccgtccatcacggtggcggacatcaaggccaagctccggcgtattccggatatcggcctggtggtgattgactacctccagctgatgacctccggacggcgctcgggcgacaaccgtgtgctggagatctcggagatcacccgagggctcaagatcatggcaaaggaactcaatgtgccggtgatcaccctgtcccagctctcccgagggccggacagccggcaggatcaccgtcccatgctctccgacctgcgtgaatccggctccattgagcaggatgcggatattgtgctgttcctctaccgggacgcctattacaaccgggagagtgaggaacagaatgtggcggagtgcattgtagccaagaaccgtcacggcgaaaccgattcggtaaagctgggctgggatggtcagttcacccggttcaagggactggagctgttccgcaatgagggataaggtactggacaccattgagaaatatgaaatgatcgggcagggcgaccatgtctgcgctgcggtatccggcggcgcggattcggcggccctgctcgcttttttgctgtcgctgcgggagcctatggggctcacagtgaccgcctgccacctcaaccactgcctgcggggagcggaagcggaccgggacgaggcctttgtccgggagctgtgccagcgctggcaggtgccgctcaccgtggagcgggtggaagtggcagagctggcccggcaggagcatctctcggaggaaaccgccggacgcaaggcccggtatgccctctttgagcggctgcaccgggagaccggctgcaaggttgcgaccgcccacaccctcagcgacaatatggagacggtgctgttctccatggcccggggaaccggactgcggggcatgtgcggcatccagccggtgcgggactacctgatccgcccgctcatcgctgtcacccggcaggaggtggaggcctactgcgctgaaaacggcatcggctttgtcaccgacagcaccaacttttccgaggagtatacccgcaaccgcatccgtctgcgtctgatcccggagctgtatgccctcaatccggcgctgcctgaggcctttgcgcatctcatcgaggcgatgggggagggctacgagctggtgagccgggaggcagaacagttcctgggcacggcagaatcctaccggggccataccgcctatacggcggaggcgttcctggcactgccggcggcagtgcggcgggaggtgctcagccgtatggcagtggctgagagcggaagcctttcccaccggcagaccgggatctgtacccggctggcagccgagggcggcgcttcggagattggcggcggggtgcgcttctgcagccggggaggccggatctggatggagcgtccggcacagccggcagcgggcttctgttttccggtttctccggaagcgggggagcagcagtttttcctcccggacgggcggaaagtctgtctgattcctttgaattgtgaacttttagaaaaaattgtgaaagaacagtataacgccttaaaaaatgttcttgactgtggtagaatatatggtaatatcgttttgcgaagcagaaacagcggcgaccggattcgtccggcgggccggggcgtgacaaagacgctcaaaaaactgctcagcgaagccgggattccaccggagcgccgagacagtctggcactgctcagtgatgaccgcgggctcctgtgggctgaaggcttcggctgtgatgaacgggctgcggcagtttgtcctttgcagggcgatcagtattggatggtttgtattgaggggaaagattatgaataatgtaatggaacaggatatcaaaaaggttctgatctcggaagaggagatccgggaaaaggtcgctgaaatcggcgcccgtatttccgaggactacgccggcaaaaatctgctgatggtgggcattctcaagggttctgtggtattcatggcagacctgatgcgtgctgtcaccacccatgcccggattgacttcatgtcggtatccagctatggcagcggcacaaaaagttccggcgtggtgaaaatcgtcaaggatctggacaataatgtggagggatatgatctgctcctggtggaggatattctggacagcggcctgaccctgagctacctgcgggaactgctccgggaccgccatcccaacagcatcaagatcgtgaccctgctcaataagcctgcccgccgcactgcggatattcagccggattactgctgctttgaagtgccggatgaatttgtagtcgggtatggccttgattttgatgagcgttaccgaaatctgccctatgtaggcgttctcaaggaagaagtttaccagggctgagcggctatctgatattttgcagcggatgcagtgccatccgactcaactacgcccacagggcaaaggagtgaatacatttggcagtaaaaaagccttcgacaaagggacttggaatctatctggcacttttgctggcgttcctgctgatggctacgactctgttttcccagtcgtccacccagcagctcatcaagtattccaaagtgctggaatactttgagaacggtcaggtttcggaatttgatctgaacctgggcagcggcaatatgaccatgcttgtagagatcaacggaaagaagactgaggtcaactaccgtgttcccaatgtctcccgattcctcgatgacatcgacgatgacattgaggcctacaacgaggcccatcccgacagcaagatggtctatgacctggagcccgcagccgagatcccgtggttcgtttcgatgcttcccaccctgatcctggtgggcagtatgggcatcttcctctatgtgatgatgcgccagacccggggcagcggcggaatgtccggtttctccaaggccaagccccgtactccccaggacggacggattgtcacctttgccgatgtggcaggtgccgatgaggaaaaggaagaactggtggagatcgtggagttcctcaagaaccccgccaaatacaatgccctgggcgcccgtattcccaagggtgttctgctgatgggccctcccggtaccggtaagaccctgctggcccgtgctgtggctggtgaggccggtgtgcccttctattccatctccggttccgactttgtagagatgttcgtcggtgttggtgcatcccgtgtccgtgacctgtttgccgaggccaagaaaactgccccgagcatcgtcttcatcgatgagatcgatgccgtgggccggcacagaggtgctggtctgggcggcggccatgacgagcgggaacagaccctcaaccagctgctggtagagatggacggtttcggcgccaattcgggcgtgatcatcattgccgccaccaaccgcaaggatattctggacccggcgctgctgcgtccgggccggttcgaccgtcagatcctggtgggctatcccgatgtaaagggccgtgaggagattctcaaggtgcatgtgcgcaataagcccatgggcccggatgtcaacctcaagactgtggcaaaggccacggtcggcttcaccggcgcggatctggaaaatgtcgtcaacgaggcggctctgctggctgcccgtgccaataagcgtgccattaccatgaaggagatcgaggacgccaccatcaaggtgatcgccggccccgaaaagcgctccaaggtggtaaccgagaaggaaaagcgtctgactgcctatcacgaggccggtcacgctgtctgcacctactattgtcccacacaggacccggtgcacgagatctccatcattccccggggaatggcaggcggctataccatgtcgctgcctgaggacgaccggggctatcttgccaagactgctatgcaggagaacattgtcaccctgctgggcggccgtatggcagagctgatcgtactggatgacatctccaccggtgcctccaatgacctggagcgtgccacccagatcgcccgttccatggtgacccgctatggcttcagtgaaaagctgggcccggtggtctatggacaggatcagggtgaagtgttcctgggtatggacatcaaccgttcccggaactactcggaggaagtggctgctgagatcgatcaggagatccgccgcatcatcgaagaggcttacagccgtgcccgtgagatcctggaagcacaccgcgaccagctggaagtggtggcccagtacctgatggagcatgagaagatcggcgaattcggcttcaaggccctgatggagggacgggaggtgaacccggaggaagatcagcatggtatcttctccaaggtaatttccgatgcccagaaggaagcggcagcccagctggaagccgctcagactgaatcccagcctgagactccggcaacggagccggaagctcctgcggctgcaccggaggccggaaccccggaggaaccttccgctccggatcagaaggaagaataaatcacggttctgataaggcctgtggccctcaaaaaagggggaccacaggtctttctgttcgacggattctgccgggcagatttgacaaagcgtggtaaaatttgctttaataagagaagtttacaatgtaaaaagaaggggcgagcagatggcagcatcaaaaaacagctatggcaatgacagcatctcggcgctgaagggagccgaccgggtccgcaaacgcccgggggttatctttggctcggatggtctggagggctgtgaacactcgattttcgagatcctctccaatgccattgacgaggcccgggagggctatggcaaaaagatcaccgtcacccgctatctggactattcggtccaggtggaggaccagggacgaggcatcccggtggattataaccccaaggaggggcgctacaactgggaactgctgttctgtgagatgtatgccggcggcaaatacaataccaatgcggcggagagctatgagttctccctgggtctcaatggcctgggtctctgctccacccagtacgcttccgagtatatggatgtgtccatctgccgggacgggtttgtctatgagctgcacttcaaaaagggcgaaccctcggaggagatgaagaaaaccgccaccaagcggcgggataccggtaccaccatccgctggaagccggacctggaggtgttcaccgacatcgctgtgccggcggattactaccgggatattctcaagcgccaggcggtggtgaaccccggcgttcagttcctgctgcgcaatgagcaggaggacggcagctttgccgaggaggagttcttctacgaaaacggcatccaggactatgtgaccgagctgctgggcggggaagaacccctgaccccggtgcagttctggtcggctgccgctgtgggccgggaccgggaggacaagccggattacaaggtgcgcctgtcggtggcgctctgcttctccaataagctgagcctgaccgaatactaccacaactccagcttcctgga

SEQ ID NO: 3844 - DNA, 26365 bp, Unknown
  16S sequences of unknown bacteria
tacttctgatgatattggtattatagatgttcaaagcatttctacctttgtagatattttaaacagcaaaggtgatattgttttaaaagcgttgcagacaagaccgataaaaggccgtccaagacgtgtttccagagtaaatgattaaaaagaagcctgataccaattggtatcaggcttctttttataaatcttttttatccgattccaacataggaatatcgtctgcttctgtttcattggctattgcagatgacttttgtgctgcaagtaaatctctgatttctgtcagcaaaacttcttcttttgttggagcaggaggagcctcgggagcttcctcttttttctttctgtgtaattttccaattagtttaatgacaacaaaaatagagaatgcaataatcagaaaatccaataccgactgcaaaaataccccatattttaaaacaatcggttccataccttctcccgttggtagtgtaaaacttaaatcttgtaagcttacccgccccgtaatcaaagataaggcaggcataataatatcacttaccaaagaagatacaattttgccaaatgcggtaccgattacaacaccgaccgccatgtccactacattgccacgcattgcaaattctttaaaatctttaaaaaattgtttcattctttttttcctttccgactttatgatacaaatttttcatatatctttggtacaattgtaacatacgatagtgggaatgcaagagaaatttattcttataaaaaggttatatgtataatcaataaattttttaaagaaaagacttgtttttttggaatctttctaataattctatcaatttattaatttttgttttcttttgaatacaattatgatatattattatataagctaagtgtgaactgatgtaaaacttcatatatttatgaatatcattattaggagtagatcgaaaatggagcgtacaaaggcacgcacacagcatcttgacaataagattttgtttaaaattcaagaattgcatgggcctagattagacaaagcaatgaccttttttactttaatggggaacggtgctttaatttgggtgtttacaggtatttttattacgttatttacccaatataaatatcatggtgtattgctgattgtaacgattattatgacaactttttctaatatgtttattaagtcccgttttaatcgtttaaggccatgtgacatatataaggatgttcctatattaatcaggcgaccgatgggctcttcattgccttcaggccatactgcatcgtcttttgccagtgccacaatcttgttgcacatgaactataagataggtttgattgctttggctttggcgtttattatatctttttccagactgtatttatttgtacattttccatcggacgtattgtttggtctcctttcaggaattgctgtggcgttaatcaatattccaattgcattacgtttgatttaaaaaagaaccgacgcagatttatcgtttgcgtcggttcttttttagtagtctttatgaaaagtctctccgaacacgtactgcagcatactattatgaggagaaaaaggtatataggaagatgtagtacagaggataaattctgcgcaaaattttaaattttccaaagcccgaaaatgacgttctatcagatttgtcaggaatattccgaagttccggaaattcagctgcaaccggagaaataaagattggggttttgtcaggatgactttggcatgaaaagaggatattttctaggctatacagtagcaatgtttacgagatatatttgtatccggtaacgggtaagtgatagcatataagaagaaatttatatagaaggagaaaattgttttaagtacttttatttgaaaagagagcattttattttagatgcatttcaacgtacgaaaaggaacatattccaaatttccggtacaaatctaccttatatgtatttttatttgtattgaaaagtatgaagcgatgcaaagaaagaagcggtacctcggaatgtctttgcatactctttgaaagatatttaggaaatgatatcatgaaaaaaggaatcgcctgacattgcgattcctttttttgtttgggttcatctcatagactatgtttttgctttttttcgtccaaatcttcctacaatctttttaaagcttaaaataagaaccttgatatttagcaacagtaccaataaagtaagaataacttcgtaaataatccatcccggaacttctgtaatcataataatggcttgtgcaagagtgagtattgcatttaccccaaattttaatacgctatagttaatgcgtatgaattttcttgtatgaattgctctgattacaaaaacaataaagtaactgaaacatgtggaataagctgcaccgtttacaccgcaaataggaattaagatgaagtttcctacaatattggtaacagcggcaataatagaagtaactaaagtggttacacctttacgttcaatcatataaacactgcccataaattgaaccatacagttataaatggttgcaagcattaagaaaggaatgtatctccatgattcataatagtcaccggcaactaaaatgatggtacatattttcgaaaaaggaatcagcaaactgccggccaaaaagataatggattgatatccgcgaaatacgttggaaaagaatttggccaatgctttcctgtctttaatttccgatacagcacttacttgccatgcatccataaaaatggtggaaaccaacacgactatggttggaattttgtaagcggcggcatacaaaccgtttgcatcagctccaagcatataagtgataatatatcggtcggatacactaacaatccaccacagcaatgttgtaggaatcataggaattgcataacgcagcatcattttaaaggttcttttatctaatcctttaaatttgatatttttgtacagccttgctgagaaaaataaaaacagggaagataaagcgtctgttataataattgcagataaatatccgttaataccccatttaaatcccattaaaaagataatggttaacaggcatgtcataaaagtagttaaaaaaccatcaaaagcgtaaagttttacatatccttttgctctggaaaattggctgcacatttcacgcattgcagacattaatacaaaaaaataaagcattaccgtatgatcggaggtaactgatatcatatgaatgagaggcgaaaaacatagcaataatgagaatccgcctagaaaacatataataccggttgtaaatacgtcatttttccgaaatgacttatccaatccaaaccgtattaatgcattagtaacaccaagagttacaattggaaccaataaatttgatatttgttgtattaaatcaacagtaccatattcggctgtagacaacgctcgagtatatattggcatcattatgaataccaacaattttgagctaaatgtgcctattgcgaaaattgcggtattctgagctaagttcctgtacttattactcaatatcatctctcatttcttaatatttgtcattctattatgtcatgcaaatacatttttgtttataaaattcatattttattattataatacttttttgtaaataagtacactagtcaattttattatttacaaattgttacgtattggacattttttttcaatttatttgatcaaatttgcacattaagttggtataaacttactttatccccagtaagatttatgatataatttaacgagaaatcctattacgtttttgtcggcagccatatctatggagaaaagaagaatgaaagtattaattttaaatggaagtcctaaaaatgaacagagcaatactctaaaattaacaaactcttttttggatggcatgaaggaatatggagcaatagaggaagaatatattcatgtttcacaaaaagatatgaaaccttgtttaggttgtttttgctgctggaccaaaacgccgggacaatgtgtttatcatgatgatatgaaagaaatgattcctaaactgctggaagcagatgttattatttggagttttccgctttattattttggtatgccatccggaatcaaagcatttatggatcgcatgcttcctatgaatttaccgtttatgagcgaaagagaggatggaggttcagcacatccgccacgctatccacaaatgacacaggtaaaacatgttttaatctccacatgcggttttcattccaaacaaaataattatgaaggtttagaaaaacaatttgaaatatgctttggaaatataaatcaaggcagaaactttgaaaaaattttgtgtccggaaggagaactgtttcgtgttcctgagttacggaaaagaacaaacgaatatttagagtatgtttgccaagctggacgtgaatatgtgttatatggttctattacggataaaacacaggaacagttaaatgagttgttgtttccagcagatatgttcatgaaaatggcagatgccagttgggaaatttctgatacatctcaagcagcatcggcaggagtggcatcagcgcaaaattttccgtcagatatacaaatttctgcgcttggatttacaaaacaaatggctgctctatataataacaaatcgtggaagaaaaaagatattgttttggaaatgcattacaccgacttaaaccaaacgtatcaaatttggcttttagagcatggctcaaaagtggaagaggattccaatcaatttttaccgtatacagcacgtgtggaaacaccgttgactgtatggaaagacattggtacaggtaaactggatagcatgaaggcgctgatagagaaaaaatataaaattttaggcgaccttgcctttatgagtcaatgggaagaatattttggaggaacaaacgatactggaaagcaaaagaaagagaaaacaaaagaaaaacaaagcagtttgtggatattattacttccttggctaatggtatggattgcaattccaatacattcctattggggaagttttgcggcaatgctgggcagtgcggttactgtgctatcttactttttagttcgcttaacaccttatgatatcatcagtatttttgtttgtggtatgatttcagcactgggattgattggtgttccgattttgtggctgataccggcagcatatttgctctttggtctgttatggctggtatcagcattcctgtcaataccgttatcagcttggtattcttgtaatcaatacggtgggttgaagaatgcaaaagataatttattatttatttctaccaatcgtattttaacaatttgctgggggatattatatctttgcacaccaatttggactttttttcttatgcaaacagattttagcaaattaattagcctggttaattcagtttttcctgcattattgggaatatttacatggtggtttcaaaaatggtatcctgctcgcaaagcagccggtaaataaaaaacagcggaatacatccgctgttttttattttatgcgattactgtattttcactataattttcgggtagcaaaccaatccagcttttacctgcatttaaaaccaattcatttccattcttgtcataaagttttaaaggattgcttggtgtattgccttttttccaagtgatggtctcataggtaccattagagatataaaatccttctccgccgcttaaatccatatctacacgtccggaaccatcacctgcaatagtggatacattcatatacaaaccaattacatttgtaacagccatttgctggccgttatcatctttcattggtgtaccttcaatgctattgtagtataatccgtctgattcgtcgtatgtaaaagtatggttatatcctgcagtggaaaaaaatacatccacttgcttacaagtgccgtcagttagggtgcgtttttcattcggttttccaaacgtaaatggggaagcgtattgactgtttgcttttgtttcaatttctttttgttccattaaggtcaaaatattttcaccggtagtatatcctgtgtgctctatggcaacatttcgagtgttatcacggaaaaaatatgagccttcgtagctaagaccatcaagttcatccacgccatttgtagaaacagaagtataggcttgcggacttccgccccaatgcacaagcacagcatcaaaaccgtcagctatttctacaaagtcatggcgcatactgcgaagagaacctattttaggaacattgcttacatctgaaaacagccacatcatacgtgtactgccgccttcaacgagaccttcaattacaacatctgcagagcaaagtccccaatgtggccgcgcgttaggattgttattaatcataaaggcaataggacgttgacctttggcagatgtagcaagattgttttctcctgttaaaggattgatattttcgtatttgacttcggctacactgcttggggcggattcttctgatacaacagaacttgtgtcatcttgattaccgcaagcggttaaagaagctaccaataacagtgcagcagcagaacataaaatagtattgcgtaacatttttttctttttcaaattcaatctctcctctttatcacttataatttattatacatcataatacaatagtttcaaataataaaatgtctaaatattaaaattagtaagattgtacaatctgatttctgaaattttatttttattatctttttatatctattttaatagcgattactcactatattaagaaaacataaagcaatcatatatgaaaaattttttagatttgttgacaaatgtctaatttttgtatataatgccagtgtttagtattgatcgtagcataatatatgttattcgtaacattttatgctttattgataacattattctgctttttcttgcaaataatgataacctaatatgtatagttttgattattgtactattaatatatagtacagggaggattaagaaaatgtatgaagaaaaaaagaatatgaaaacattatcacttgatgaatgtgcagaagatgccgaattactaaaagcgttggcaaatcccacacgcctgagtattgttaatcatttacttgtcaataaatgtaatgtaattgcaattgaaacaagcttaggcgtaaaacagagtaatgtttcaagacatttatttgttttaaaaagtgcaggaattgttgaggggaaaagagaaggaaacgagatatactatgaggttattaaccagaaagtaataaaattggtggaattgcttgtggccttaaagtaattgagtacataataaaaacgttttgcatatgcaaaacgtttttattatgatataggaaaaaagtaatggtgtgcttttccggttaaatctctcttttgatagtcgaataagactgcggtgggtgttaacgcttttgtttcaggatggaaaggaaatacctgcatatgcacaatttttgcaatgcgtttggaactttcagaagtgtaatttggaagataggtctcaatatgttcctgtgattcataaaatgtggaaatccaatcacgatgttcatattgatatgcgttatctgtaaaagcaggaagttttttgggcttttcatgtaaacaaatatcgtaaatacataattgtttcatagtttcggtaaaaatacgattggtagattgccaaaagtaacacaaaatttcgtaatattgttcttttgaatgattggataggtgatatctgtttgcagtgtaaaaagaacccagttgagcaaaaaaatcgaatggtgtttcaaactcttgtatcatatatgtaagaatggtttgaaaacgcccactgttgtaataaatttcgaccatgtcttctatgtcttttaaaaataaaatatcatcaaaagataaccaattggtttgaagtacctcaaacggtgcctttggcgtgtataaaatgccatattcgctgcactgtctgtgtatagaggaacctttgagtacttttaaaaatcccagttgcagttgctgtggacgaatttggaatacttgattaaaagagtgtcgaaatgagctaatatcttcgaaaggaagtcctgcgattaaatctaaatgaaggtgtatattgccaaaggaatctatttctttacatatttggagcaatttgtttgtatctgtttttctcgtaattgctgataatgtttccgtattggtggattgtactccaacttcaaactgaaattgctcttttctgacggtacttaaaaatgaaattgtctcttggtccaataattctccggcaatttcaaagtgaaagtttgtaataccgttatcatgctcttttaaatagttccaaatagagaaagcgtaagctttattgcagttaaatgtcctgtctacaaattttacctgtggcacgtccttggataaaaataaatctaggcattgatatacttgttctaacggcataaaacgaacgcccttttcaatggatgacaggcaatatccgcattggaagggacaaccacgtgaacattcaaaatatagaatacgtcctttttctttttccaaatcaggatatggaaagggaagctgtgacagagaaataggggaggcttgttctgtttctgcaatgtgctgcccaattcgataggtaaaagaaggaacagacgctgccggagtttttgattgcaagtgtttcaataatggaatgagagctgcttcaccttcgccgcgtatgattccgtcaataaaagtatattgttccatgatttctgtgctgttatagctgacttccggtccggctaatagtagtttggtgtcgggcatcacttgttttaattgacagcataggtccaatatgatgtctatattccaaatataacaggaaaaaatcatatgattggcttttgtaagatatagttcacgcaataactgaggcatacgttgattgatagtatattcagcaatttcagttgaagtataaccgttttgttttgccagttcatgcatataacgaacagccaaattggtatgaatgtattttgcattgattgcaacaaatagtgttttcataaaagtcctcaaaatataaatttcgttttattatagcatagaaaaaatttcgaagcaatttttttagcagatgaaggctaaaacgttcttgccaacagccaaagccttagttttgttgctgttgcaaggttgttataacataaaagaaattgcggagcaatgttctaacttataaatgtcaaaacgttctcataacagtcaaaattttaattttgttgctgttttgaggttgttatagcatagaaaaaattgcgaaacaatttttagcagataaatgccaaaatgctttcgagcaattcatattataacttatccactagtatgtagttgtgataacataaaagaatttgtacggcaatttccaaggaataaatgttgaaatagtttcacaacggttcgtatttgttttgatgttgctatgaggttgatacagcacaattttgacaacatggatgaataataagaaaagctctgcatatgcagagcttttcttattattcattattttttgtttgttcatccagtttttctttggcgatagacaacattaatttaattcgattttcttgattgactcttgttgcacttgggtcatagtcaataggaacgatgttggctctgctgtctacttcgttaattttgcgaatcataccttttccgcaaatatggtttggcaggcatccaaagggctgagcacaaacaatattttcatagcctgcttcgattagctctaaaatttcagctgtaagcagccagccttcacccattttatttccatagccaattacaccttttgctaatttttttacatgataatagtcagcaggcgccagtacttccgggtgctctttaaacgctttaatcataacagtttgtagggatagcaaataatccaataaaattttattaatttgatatttaatcgtattgccgccatatagttttatatcatccaaacgattgtcaattttaaagagaacaaagtttacaattcccgggacataaacttcgcagccttgagactttaaaaagttttcaaggtcgttattggcaatcggagcatattttacgtagatttctccaacaacgcccactttaatttttggaactcggtggatggggatagaggcaaagtcttttacaattttttttgcgttattaccaaactgagatttggataagccttcgcccttcctaagttgtttggaaagcagcccaatccatttttctaccattttctcagcgtcacctttgtggtcttcatacggttctatgttgttttttagttgcatcaaaacatcgccatagtataaaacggaaatcattttgcgcagaaatggaatgcttgcagaaaatcccggatttttttccatgccgtttagattcatagaaataacaggaacttgaggatatcctgcacgaattaacgctttgcgcagcagatgaatgtaattggaagcacgacagccaccacctgtttgtgtaatgataagcgctactttattgacgtcatatttaccactgtttaaggcgtcaataaactgcccaattaccagcaaggccggatagcatgtatcgttatgtacgtattttagcccttcctgtgcaatattggggctggatgtactgagcaattctactttgtagccaaagcttttcatcacttccagtaccagacgaaaatgaatttcaatcatggtagggcataagatggtatattcttctttcatttcttttgtaaacagcaaacgacctgtttcgtcataaaccaattcagccatgtaaaagactcatctcctttatcaagggcgtaatatcatgaaatgctgtgagcccttttcatacagcatacattcatacggatatatggaaaaataacagttattgttccagcgcggcaaataagctgcgaagcctaattttaacagcgccaaggttagtaatttcatcaatttttatttgtgtgtagattttaccgcttttctctaagatactgcgtacttcatcggtcgtaattgcgtcaattccgcatccaaacgaaaccagctgtaccaaattaaactgcggtttatcacaaatatattctgccgcagcatacagtctggcgtgatatgtccattgattcaaaacggttgtatttagtttctctactttattactgatgacatcttccgttacgatacaggcgcccaagcttgtaatcagtttatcaataccatgattgatttcagggtctaaatgatatggtcttccgcaaagaacgatgatgggcatttgatttgcttcggcctggcgaatcatggcatcgccttctttgcgaatggtatccaaatagtgctcatattctgcatatcccttttcggaagctgtttttacttcctttaagctgatgccatcgaaatattttgcaaggactccatgcattttttcagggaaatcttttttacgatgtacacccaaataatcgttaataaagtttagaccttccaattcagatacattggcagagattacttccggataatatgcaacaacgggacaattataatgattatcgcttaagccttcatcgaaattgtatgtaaggcaaggataaaaaatagtttttactccttcatcaattaaagcacagacatgaccatgcattaatttggcaggaaaacacacggtgtcagatggaatggtgtgttgacctttaatatacaactcacggttggagaggggagaagttactacttcaaagccaagagatgtaaaaaatgcatgccagaacgggagcatttcataaatattcattcccataggcaatccaattttccctcttggtccgggaacaggttgatagcttaaaagcgtcttcattttaaacgcatacatgttaggagcatcaataacctctttttgtttaatcggtttgtcgcatcggttaccgcctataaatttgcgatttccatcaaacatatttaccgttagtttacaatgattgttacatagtccgcaagtgactagttttacttggtgagaaaaatctttcaattgctgtaaggttagcatttggccttttgattgattgtgttcttttgcatataccgcggcaccgtaagcacccataagacctgcgatatcaggacgaatgacatttacgcccatttcctgttcaaatacgcgcaacacggcgtcatttagaaaggtaccgccttgtacaacaatatgttttcccaattcttccggagaagcggcacggattactttataaattgcatttttgacaacactgacagacagcccggcagagatatcttctgtggtagcgccatccttttgtgcttgttttacagaagagttcataaaaacagtacaacgggaacccaaatctacaggacgttttgcaaataagcccaatttggcaaagtcttgaatctcatacccaagcgtatttgcaaatgtttgaagaaaagaaccgcagccggaagaacaagcttcatttaagaaaatattatcaatggtatgattgcggattttaaagcatttcatatcctgaccgccaatgtcaatgataaaatctacttcaggtaaaaaggtctttgcagcagtatagtgagcaatggtttctacaataccatagtcaagaccaaacgcatttttcagcagttcttcaccatagccggtaacagcgctgcatttaatttgaatgtttggatattgttcatataaatgaatcaaatgttctttgataatcggaattgggtcacctgagttactctgatataactcgtctaaaatttcattgtctgaaccgataactacagctttaatggtagtagaaccggcatcaataccaagataagcttcgccttgataatttgcgatatctccacgctttgcaacatctttgttatggcgttgtgaaaattcttcatactcctcttgggactgaaagagaggtggaatggataaaaattcaccggactgtgtataattttttacactgtctatagctttatccaaatcaatttcttcactgcagccataagctgttcccaacgcaacaaagtacaaagaattttccgggaaaataccggttacattcaaagctgtatcaaaacttttgcgtaattcggataaaaaggtgagaggaccacccagatatacaacatttcctttgatttctcgtccttgagctaagcctgcaatcgtttgatttgcaaccgcagcaaaaatacttgcggcaatgtcacttttacgggcaccttggttcaacaatggctggatatcagacttggcaaacacaccgcagcgagatgcgatggtataaattttttcgtgttcttttgcaatattatttaactcttcgggggataaatgcagcaaagtagacatttggtcgataaaagcgcctgtaccgcctgcacaggaaccattcatgcgaacttccatgctgccgcttacaaacagaatttttgcatcttcaccgcctaattcaataataacatcggcattcggtattaattttttggtagcggttctggtagcatatacttcctgaacaaaaggaaagttacattcctgagcaatacccattccggctgatccggaaacagccagctggacaggttgctgtttaacaacctcatttttaatttttgttaataaagccgccattttctcagtgatttgagaatagtgtctttcgtaggattcaaaacaaatttgttcgttttcatccaaaacaacgcatttgattgttgtagagccaacatccaaaccaatcttcatcatttttcttcaccatgtttcttttcttacaaaattcattatctgcgtagatactaatttatcatattaggtgtgcatttcatttagcctcatattttcttttaaaatcgcatttgctttacatataaggtgcaacagctgttcaaagtcttttgtacccattttggtacgtattaattcaatggactttgtatactcattacatgctgtttctattaatttttttcctttttccgttacggttatggtatagcttcttccgtcaacctgagagggacaatgctctatgtactcatgttcctttaaaatttttaaaatagcggttgcggaaggtttggtaataccaaattgattgctgattgtaacgggagtgacaggttcttttgcaagatttgcataaattaatacacccatttcgctatgccgaattggtatacagcactttttatttaggtttaatctacaaaatagagcaacgttcattgcagccatatttgtattatgatccatgtttacatctcccaagaattagttagctaaactaactatatagcaatcttaatcttaagcaaaaaagcacggaatgtcaataggtttgatgaggttttctttaaagtggattaattttgtatactttaactacaattttaagaaaaatttatatcgtcatagggaatggtaaagtaaaaacaaaaagaaccgccccaaatcgttagaagaagttctaacaaaaaaggagtcggttcaaaatatcaatatttttatgcttgcattctacgtggttcggaagaatacaaggtaatacaatctttaggacaaacatccacacatgcaccgcaggcagtacatttatcaggatcaataatagcgcggaagttttcaattttgattgcatcatattcacaggcttttacgcatttcatacatgcaatacagcccactttacatgctttgttggtgatgttacctttgtcttggctgttgcatcgtacaactgcctgctcttttaaagtaacaagacgaatcagatttttaggacattcttttacgcacattgtacatgcagtacatttttcaggatttactacggcaacaccgtttacaatgtgtattgcatcatattcgcatacattgacgcagtcaccaaaacccaaacagccatactgacaagtttgtgtaccgccggacatcatagatgccgcagcgcatgatggaatgcctttgtaatccattttctgagaggtgtgttccggagtaccgttacagtgaaccattgcaactttaggtaccagtgtaacagcacctccacctaataattcactgattttttgaacaacttccggtccgcccggggcgcaaagaccattttcggcactgccttcacatagggcagaggcatagccggaacagccggaatatccacaggcaccgcagttagcacccggtaaaacttctgttaccgcttctacacgttcatcaaccggaacatgtaaaataattgctgcaactgccagcacaaggcctaatacaagaccaataccaacaacaattgcaataggaataaaaatttcatatgcccacatgatttataccaacctctcttaacctaacataccgtctactaaaccttggaaaccaaagaaagaaacagcaagtagagatgcagcgattaatgtaattggaagaccttttaagaaatcaggaatatcgcaagtctccagtttttggcgaacgccggcaaatagaaccattgcaactaaaaagcccataccactaccaaaagcactggtcatagattctgcaaagccataatgggtaatggggtctaaagtattctcaattaccaatgtagtaataccaagaacagcacagttggttgtgatgagtggcaaatagataccaagtgaattataaagtggaggcataaacttgcgaagaaccagctcaatcaactgtaccaatgcagcaatgataatgataaatacaacggtttgtaaataatcaaaacctaaaggcatcaatacatacatgtaaatcggccaagttactgcagttgaaattaacataacaaaaataactgcagcactcatacccacagcagtatttaactttttagaaacacccaggaaaggacaaatacctaagaatttactcagcaaaaagttttcagttaaaataccggcaaggaaaatgcttacaaggcttttaaacattatcatctgttccgcactctcctttgctaatctttgaacaagatgcactcatcggacatccaccacagcccagttcggcttttttgcctttggttaatttgtttacaatagcaactaggataccatagacaaagaatccacccggagcaagaataaagataataattggatccataaaggaaatagttacaggtgcgccaaagatagtacccgaacctaaaagttcacggatgcagcccataaccagcagggcagcggtaaagccgatacccattccaagaccgtctaaaacagaaggaatcacagggtttttgctggcgaatgcttcagcacgaccaagaatgatacagttaacaacaattaaaggtaaataaataccaagagatttatcaattgccggtacaaaagcttttaccagcatttgtaccacagatacgaagcctgcaatgatggtaatgtatgcaggaatacgtaccttatccggaataattttacggcatgcggagataaccaagttagaacaaattagaacaacagtagctgccgctcccatacctaaggcactcattgcacttgtactaacagccaaagtagggcaagtaccaagcaccaaacggaaaacagggttttcctttaaaataccttttgtaagttctctaccataacctttgcccaacttaagcacctcccttaatttcattatattggtctattgcagagtttacagcgtctgtaaccgcttgagaagtaatggttgcacccgttaaagctacaatgtttccatcacctgctgtaccggatttgataacgttaaatccaccttccggtacagtttgtttatacatatcggtaaaactggcattttgtgcattcatacccaatccaggagtttcatccaaagagagaattgttacaccggtaatttcaccttcggtattaatacctgtcattacttggatagtaccgccataacctttggcagtagtggtgaatacataacctttttcagaaccgtcatctgctttacctacataataagattcttcagaatctccagcttcaaaattggctgcatcaggcagcacaacagtgcgggcttctttttcggtttgtaaatttagagcttcaatagtgtcttttgtaataaagtttgttacggataatgcacctgtaataatcaaacaaatagcacatagtatcaaagcaggaacagcaatttctttcggtttaaacttcacttcgtttccgctcctttctggctttgataaaaccaaaggttttagaacgagtcaaactctcaatatgcggtgttagaatattcattaatacaatagaataagaaacaccttccggcaaagaaccaaataaacgaatgagcattgtaatgataccgcatccgattgcaaatacaagtttacctctccagttaataggggtggttgcatagtctgtcgccataaagaatgcaccaagcatcaaaccgccggaaagaatgtcaaccaaaacatcgcgtccggtaacggcacatgcaatgcctgaaatagcagctacagtacctatgtaagcaaacggaacgataggattaatcacacggcgtgcaattaaataaataccaccaagtaaaattgcaagagcgcttgtttcacccattgaaccgccaatgttaccgaggaacatatccaaataagacggcatcgtaccgcttccttcagcgataattccaagaggagtagctgtggtcatagcatccacactgccggtatagaaaaatggtgttgcccaagttgtcatatgaacagggaaggataccattaaaacaatacgtgcggtaagtgcagggtttacaaaattttggcctaaaccgccaaacatttgctttgctacaacaattgcgattacaccgccaaaagcagtaattaaaggattaatgttggcaggtaggttaaatgccagcagcatacctgtaacaatggcgcttaaatcgccaacagtttgttcacgcttcataaccagacggcatacaaattcagatagcacacaagaagcgattgcaactgctaatgtaattgctgcccaatacccaaaaaatacgatggatgcaattgcagcaggtatcattgcgatgataacatccaacataattttttgtgtcgaagtgtttcgtctcaagtgaggcgaggaagacacaatcaatttatctttcataatacattcaagcctttccaattgatatgctagtatttataaagtaacgttgtcgcttatgtactttataaaaagttttatttatgttcagcctctacagcttcaatcgcagcttcagtttttgcttttaaagcttcttgtcttgctttttccgcagcatcgtctttgcgaattaaatttttgcccagacgaattgagtgtaccaatggtctatttgcaggacatacaaatgagcagctgccgcattcaatacaggtcataacagaaagtttacgtaagcgttcgataattcttttttcaaaatttttctctaacgcatacggttccagatgcataggacatacactgacacaggcaccacaatgaatacatgcggttgtgtgttttttgattgcttctttttcgctgaaaaataatacgccattggattgtttcataatttgaaagttatcagacggaatcgcaattcccatcataggaccgccaagtaaaacttcgcgtaattcctctttataacctccgcaaaatgcaatcatatcttctaaactggtaccaatgggagcaattacgttttttggtgttgtaacagcagaaccgtcaatggtaacgcgttttgtaatcagcggcataccggttcttaaataatcggcaataaagccagcggtagtaacgttcattacaatacaacctaagtcagcaggaagtttggaaggattcagctgttttcctgtagctgcctgtatcaaaactctttcagcgccttgcggataaatagcacgtagagtaaggacgcctgccatgccgtttttatttcttgggtctgaagcaagcttttcttttattaatttgattgcgtccggtttattgctttcaatgccaataataatacgttttatatctaaatattttgctactgcaaacataccgtcaatcactcgctcagagttttccagcatttctctgtggtcagctgtaatatacggctcacattctgcagcattgattaacaaagtgtcgaccggttttggtggatttacctttacatgggttggaaaaccaccgccgccaagacccactaaacctgattctctgattgcttttacaaagtcttctctggagtgaatttcaggaggctgaacctcaggagatacagcgttttcaccgtcagatgtaatgacaacagcatccacactttttccgtcagtcatcaccagtttttcaattgcggttacttttccggaaatggttgcatgaattggtgcggaaataaaagcatcgctatcgccgattttttgaccgacaagtacttgttcaccaactttcacaagaggtttgcagggagcaccaatgtgcatttgcattggaattctgactttttctggtgtaggaatcacctcagaaggtgatgaaccagtatgtttgcgatgtggaaccttagcaccaccaaaggttctgaatggttttaatggtatagacaaattcatgcttatcctcctaaatgtaaggtttttaataacaagtgccataaacctttcattaacagatgaaacttgtacaaaagaaattatgcaagtttaaacgtatctgttgtcagttgtacggattcttttaaattatccgtaacggtaacattgttttctcggtcaatgaaaataccgcctgcattatattgttctagcagggacatgcccttttcttttcccaataccatacaggcaagggcaagagcatcgctggtaggtccgtcggcgtgggtaacggtgacagacaccaaatcagtttctacaggttttccggtagaggggtctaaaattccataatacgttgtgccatcctgaacaaacgagttttgttctaattgacatgtggaagcataaccggactctatggtaaaagtaccgattgcaagcagctctgtgtccgtgacatcaggatttttaaccgcaagtgtccatttggaaccgtctggttttgttccgtatacgccaactgaattgccgacagtgatgatgccggcagtaacaccggaagtctggtaagacgatactgcactttcacaaagcgcgccattgtaaacaccgtcaaggctgacggaagaatagctcattttgagagaggcggtattttcctgtgtatcaacgcgtaaattttggtaatcgacatagggtaaaaactgttcgattttttcttgcgttggaaccgaaggattcgatcccgaaaatccccacaaatttaagataggcacaatggtaggggaaaaagcaccgcccgaatcttgggcaactttttctgctttatctaaaatggaaattgtacgtgaatctaaagagatccagtcaagcccagcagcttgatttagtttttgtatgtctgagtcatcttcttcaaatccaattaattgtgatagctcattcatagcattcgctgcatcggtagcagctgtctccgtgttttttccgtaaagtgtttggtatacggtgatatcctgtatggtatcttcacgggaataaccgttcaatggagtttcctctttctttgtaaacataaaaacgaggcccacggcaactgctattacaacagctgtaagtgatatggccacaatttgtatgattctttgttttttatgctccatttttgtaacctcccttttgaattcatagtttcccacctgttaatagggagttaatatatattttaactgattgttacggaaatagcaataaaaaatacaaaatcagtatacgaaatattgtataaaaatttaatataaatatgcttttgtgtgtgcaatatgtttatgaaaattgatttttatagacaaaaatatggtgttgttaatttttagttaaaaaatcaggttttttattgttaaatttactacaaacaaaaacagtgacaattcgataaaaaatgtcactgtttttgttactatattttatataaattaatgtaatagattttaaattccggatttaattttagcggcagcgataatcatctcaacagaagcgtcaacgccaaatcttgaactgtcaatggtcaaatcataattttcaattgctttccatttttggtcagtataaaagctatgatagtgagcacggtgtttatcttgtttatgtaaaaattcttcaatttttttcggagatataccataatgctctactgcacgtttttttctaaactcaatatctgcatgtacaaatacatttaatgtatgtttgtgctctcttaaaacatagtcggcacaacgtccgataatgacacaaggacccttttcagcaagtgaatggataatttgtgattccaataaataaagctggtcgttgattgttagttcatttgcattatatgcttggtttgcaaaaaagtaggaaccggccataaaattaccaaagatactggtggttgcaatttcgtcattttcacgtaatacttcattgtttaatccgctttttttagcagcaatttctgtaatttcttgatcataataaggaatatccaatttttctgccactaatttgccaatatcacgtcctccactgccatattctcttgaaattgtaattacagtgtttatttccataatagagccctcacttttttctttatcgataattttattatatctctatccactaaaataaatattctaaattagaaatataaataatttcctgttgatattatacatgtatacgtcaatttttttcaaaatagtgttaaaagattctaatatttgtttttattaacagaaactatattctaacactcatataaaatggagtggtttgattctaacaagaaaacaagaaaaaacttgacaaatgatttttatcaacatataatgaagcaaagaatatataaaccgatgattaagagtagtaagctgattctgcttttcagagagccgccggttggtgtgaaggcgacagagcatggcagtgtgaatggacttatgagggcaaagcgaaaggtttaaccaagtagtatttgacgggatttccgcccgttatcaagggaacatacataattgtatggataaagtgggcagaaatgccaatatgggtggtaccgcaggagttacgctcttgtccctgttttgatacaggggcaagagctttttttatactcaaatgttaacagatttgtatgggggtaaaattatgaaaaaaattatcaaatcaatcgcttgtgctttggctgcaagtgctatgctgttgtcttttgcagcgtgcagcagttctgaaacaaccaattccggcggcgcaagcacaaacatggctaaagttggtgtgattcaatacgctacacatggctctttggataactgctaccaaggctttaaagaaggtcttgcagaaggcggttatgtagaaggagaaaatttggaactgttattccagaatgccaacggtgaaaccagtacgagtgatttaattgcaaaaaactttgtatctcaaaaagttgatttaattggtgcaattgcaacaccggcagctatgtctgcatatagtgcaacgcaatccagcggtaagccaccaattgtatttacagcaatttccgacccggtttcagcaggtttggtgcagtctttagaatccacaggtgcgaatattacaggttcttgtgacgtgcttccattagaagcgcaagtaaaaatgattcgtgcttttttaccggatgcgaaaaaaattggtgtactttatacaaccagtgaaccaaactcggtatctcaccttgcaaagttaaaagagattgcttctagctatggttttgaagtggtcgaacaaggtattaccaatgcttcagaagttgcaacaggtgtaaacacattgattgcaaagggtgttgattgtatcaacaattttacagacaataatgttgtaaataacttaacaattgtattacaagctgcagaacaagccaaaattcctgtatttggctctgaagaagaacaagtaaaaaatggctgtcttgcttccgaaggcattgactatgttgcactgggtaaagaaacaggtttgatggctgcaaaaatactaaaaggcgaagcaacagcagactctcttccggtagtaaccgcaaccgaaagcaaacccttttataataaagaggttatggaaaaactcggtttgacacttcctgaagaatatgcaaatgcaacgaatttagcagaataattttacttcatttggatgaaagaaaaatgggagagggaacatctgataaaaagatgtttcctttccgtttttcataaaatccgctcatacaaatttgtttttgaccttatcatagaaagcgggtaactgcatggatgtatttattagtttaatcatcagcatttttgaagaaggttttatatacggtattatggcaatcggcgtatatattacctataaggtgcttgattttcctgacttaacggtagacggttcatttccgttgggcatgtgttttacaggattgttaatatctgtaggggtagacccttggattgcatgtgttttatcatttctggcaggcgctgtagcaggtggcatcacaggaattttacatgtaaagtttaaagtaaccaatttactgtcaggcattttggtaatgacagcattgtggagtatcaacttagtgattaccaatggcagtgcggtgttgtccttctttaataaaccaactatttttaattccggtatcggttcgttgtttacaggtgttatgtctgactataaagtgctgattatggccggtgtattggtaatacttgtaaaaattatcatagatttatatttgaaaacaaaatcgggtttgttactgcgcgcatcaggaagcaatccgcagtttgttacttctttgggaagagattccggaaaaatgaaagttctgggattggcaatcggaaatggtttaacagctctatcgggcagtattttggggcagcaatccggttcagccaatattaacagcggtacaggtatggtcgttatggctttggcatctgttatcattggtactacactgttcaaaaagattaccatcatgaaagcgacaacagccgtgattttaggaagcattttgtataaagcatgcttgagcattgcaatgttaatcggattgccaaccaattatttaaaattgttgatggcaggcatctttgctgtggttttgatttcgaataatatgttgacaggaaggagaaaaaaagtttatgacaatacaaaaaaatagtataccggaagcgtataacggacctatggtcagcttacagaatattcataaaacttttaatcctcactctgttaacgaacttactatatttgaaaattttaacttggatattttaaaagaccagtttatttccgtaataggaagcaatggttccggaaaaaccactattttgaatttattatgtgggagcctgcctgtagatggcggaaagattttggttaagggacaaaatatcacaaaaatgaaggaattccagagggccaaattcattggccgtgtatttcaggatccttcaaaaggtacttgtcctgaattaacgattctggaaaatatggcaatggcagaagcaaaggacaaacattttggtttaacctttggagtaaacagaaagcgattggatttttacaaatcacagttagagctattaaaattaggtttggaggataaacttcatattcaagtaggaagtttatcaggtggacagagacaagcgcttgctttgctcattgccactatgacgcccattgaccttttggttttggatgaacatactgcagcgttagaccccaaatctgcggataatgttatgcgtttaaccgaccagtttgtaaaagaaaaacatttgactgcattaatggtgacacataatttaaaatttgccatcgaatacggcaatcgtttgattatgatgcacaagggtaatatggtaatagatgctgcctatgagaaaaaagatgccttggatgtagatgatttattaaatcagttcaatcaaatcagcattgaagttggaaattagtaaaaggcgcctgcaaatcgcaggcgccttttactatagaccggcacaaaaattagaatcatcttgtttgttgaattcttctttcatatgcttaattgttgtttttttcagtgattcttctatatttttgtctatgacatcccaaacctcttctcttagaaaagagcgtaaatctgtttcattttcaggttcttccgagcctgtcatggataattctccttccaacactttcaaaatatcatatagattcatttcaaccgcagttttggaaagagtatagccgcccaaagaacctgctgttccaattacgatacctgcacggcgcaaataagagaaaatactttccagataattaaatgaaatatcttgtcttgcggcaatttccgctaaggaaacgcagcctttttcttcttgcatggcaaggtctatcactgcccgcagaccataccggcctctggtggatatcttcatgttacatttcctttccgcttgagatattttacttttaaatcttccaaagtcatattatcaaccgtatcttcaattgcatttgttaaacgcacccatatttgacgattcacacagctggaacgtaccttactggtacaagattccaaatcgtggacgcattttaccggcgctaagtcatgctcaattgcgcgcagcaccataccaactgtgatatccttaggactttgtgccagtaaaaaaccacctttggcaccgcgtactgttaacagtaatcctgcttttttcagcagaaaaaagatttgttccaaataggcaacggtaattcccgtatcttcagcaatctgcttgatacgtattgcctcatttggactgtatattgcaatataaactaagccttctaatgcatatctgcttttagtggaaagcttcatatatcaaatttcctcctgtaatggtcatatttatgatacattactataatactatgttttttatttcgaatcaacatgtatttacaatttctagtactacctactactggtatataataactaca

SEQ ID NO: 3845 - DNA, 15381 bp, Unknown
  16S sequences of unknown bacteria
tccataagagcggagagaccaccccagttttcctggaagatttcagccggcatgagcttagggccgccttccggaatgatcggagcgaattccatgttcggaaggatatctttttcgatatcaacgccaggagcgatttcgatcagcttaaggccttccgcgcaagattcaaatacgcatctctccgtgatatagagagccggcttaccgttcttcactgctaaaggagcatcgtaagcgatctgttcggacttcttaacgaacttcttgagctgaccttcctgatcgataacgagcttgccgtcttcgatatgctcttttaagcctttcgctgtgaaagtaccgatgaagcaagctttcttagcgcctgcagtgatgtttgtaaatccgcctacgccgagagttacgccgttgagtttggatacgttgatggaaccgtcttcctgtgcttcggacagaccgaatacaccgaagtcaaggcctgtgccgtcaaaccagtcgaagtgatccttctggtcagtggagcattcgttattgaagtggcatccgaagagcgggccgccgccaggaacgccgcctaccgaaccggattcggaaatcatagtgatggaatccatttcgccttcttccgcgagcacgccgccgcagaacgtaggaagaccgataccgaagttacacatcatgcctctttcgatttccataacagctcttctgatgataatcttcttaggatcgaaaggcattacttcgatagcgtctacaggcaccttcagctgaccgttgagacccatccagaaattatcgtctctgtcgccgttatttgtaagcgcacggccgatctgacccggatagttacctactacgatatagtcgacgagatttctgcctaccttaacgagcttcggatttaagcttccgcccttagcgactctttccacttcgataataactttaccgccgcaagctttagccgcacgtgcaactgcgcctaactcgaggtttaagcattcgttttctacagtaacgtttccgttttcatctgcagttgtcgctctcatgataccgaagtcaatcttaggaatgctgtagaataagtattcttcgcccataaaatcaggaacatattctacgaaaagtctctctcccttagccttctgtgcttcgtcatacgcttttgcacttgcattaagagcaccgccgtcgaaacgtgcgtccatgaatgtaccgagaccagtctttgtcagtacgccaggcatacctctgccgatttcagtatacatctggagcatagaacctaaaggcatataccaacctggaagcttatcgtcttcgatcatcttcgcaattttcggtgtagtggattcatgagaagaaatatcgagagcgagcagaccttcatgagcccagcagttacctgcacggaaaccagctgcatgaacattgatcatgtttgccggatgtcctgtttctaagaatctcttttcaactgctttaccgattaattcaggccaaccttcgctaccgaaagatacgccgactacgcagcatccatcgaagaacagttcggctgcttctgcttccgtaataaacttagccatttgtttttctcctttgcctgacgccatcagaatttacggcgtccactcttaacaatacttactttaacactcttaaacaagccgcccgcagattaaaccaatatacgaagcgactgtattttatacgaaacccgcataaaatgaactgatacacaataatgtacaatgataaaactacctattgcagatcagatcggaagagcttatcacatcttgtataaaattaggcaatttttgtacaatatttcacgcagcgcacaaaatatttttacttatggcagtaagaccacttacttttttgtttgctctaattctctttaaacaatatactctatgatatatcgtttgtcaatactaagtatgcaaattcttcgtgcgcctatttcactttgttgtatagacaatgtatttttcaattattaattccgtaatgtgaaacagaaacttttttaaaaatttgattctgatcattaaaataatttcgattcatcgctgattcgctttattatcagaggttttcaatcatatagatgatatgatttctatcctgttccttatatatttgtatttaaaagataattttttcacgataaaaatcataaaaaatcctccgcggcagcacgccttcaagcctgtctgcacggaggaagatccaaagaagaattccagaatctgcaataaaaaaaatattgacttgtttttttccatttgataaaatagcaatcgtattttgagaaacgccacaattctcaaaataccgatgtttttacatcaactcaaactcagacgcctgattgttctgcttggaaccagaattttcctctgtgctttccaaagcagaataaatcaggatctttacattcttcatccaaggatacaacaaaccaaccacaaactatacaagaaatattaaaagggtcagtcaaatcagctgacccttttaatatttttaatgaacattcacagaatttttaaggagctttttataatttcacgatctgcttctgcttaactgtagaagtaattcttcaggccgccccatgtttcctggaagatttcagccggcatgagcttagggccgccttccggaataatcggcgcgaattccatctgatcgagaatatctttctgaaggtctacgccaggagcgatttcgattaattccaagccgccctcgactgctttgaataccgcacgctcagtcacatagataatttcttttccagatttgacagccatcggagcgctgaaagaagtctggatacattcattcacgaatttcttgaattttccttcctgcttaatcaccaacattccgtcttctacggctgtcttgatgccggctgctgtaaaggtacccaaaattacagactttctcgcagtagagataatattcataaatccgcctacacccagcagagttccatttaaaaggttcgtgttcatgctgcctgtcggatcgacttcggagagtccaaaacctgcacagtcgagtccttcaccgtcgaacagattaaaatgatcgccctgatcgcaggaagcgatgatattataatgagcgccgaaatcagaaccgactgcaggaactccgccgatggaaccggattcagaaatcagcgtgatatcatgcgatactccctcttcctccatgatattgcctacattctgaggcataccgagaccgagattgcctttcatgccgcttctgaattccatcgcagctcttcttgcaataactttaattccatcgaaaggaagcggccgggaccccgtgtttcctaatgggacacgacattcacctgtaacggacggattatacattcctcctacagtaacaactttgttcgggatatctttttcatccattactacgatatagtctacataaagacctggaaccttaacggacttcggattaatagtacctgtatttacgatcctttccacttccacaaatactttaccgccgcaggctctgaccgcctgagccactgtcagcatttccaggttgtaagcttctttttcgatagagatgttgccgtcttcgtcggcataggtgcctctcataaaccctacggtaagcggccagcccttatagcaaagccactcttctccctgaaaatcaggtacatactctacaagctgctcgtcgctttcaaatgcgagcttcgtaaccttaccgccgtctttgcggggatctacataggtatcaagaccgatcttagaaagacagaaatttacacctctcgcctgttctttaaagatttgaagaatcgttcccagcggaagattccatccggcaattttatcgccttcactgagatatttctgcgttttcttggaacatccgacatgggatgcgacccatttcgtcatgagaccttcatgcatcagacagtcttccccgcggctcacgtgaggagagaaatcaccggaacccgccgcgtgaatatatgtaagatcctttggatgaccagtttccaaaaatcttttttcaatcgccttcatgatagattccggcacgcctgccgcaccaaacgtcgctgctccgattacatcgttgtcgttaattaatgccgccgcttcagcagccgtgattacttttgccacaagaaacctcctattttatttactcactcaaactgcgccatcttgttctttcatctgactccgcgtctcacatcagatcgcggggaaagtaaagatgaacttttatctgctttcattttattagtatgcttataatatgtcaactaattacttttttgtaagtaataagtatacaatatatacgttagacaaaaatggcggaatttcaatgtttttcctgatatttatgcaaatattaaaaaaacagaaaaattcgtctgccaacataatagaatcctgcaaatatcagtgataaaaaatatccgcgccgcgatacatatatattttatgatcgatctgcgccttctatgagatcgtaaaaacagaaattctcctctaaagcggcataaaaattcaaaagaacggtataaaagctaaaaatatgagctttcccggtgaaaaggaaaaaaaacgccggctgatttcagacatgcgggccgacccgcgatgagatctccgcctgatttgtcagaccgatcttcagcaggccgaaaagacaaaaagcggaaactaagactgtttccgctttctcaaaaaacatatttaattatggaacgtaacgatttcttccatgttctttcttccggggcttttgagctcaccgtcgggaactccgatcggcatcatcgccgcaagaaaccatccctctctctggaatccgatttcctcttccacgagtttctcaatatctttatgcgcccagttctgactggtcatcatcgtcgtaccataccccatttccatcatcgtaagcacggcgtgttccagcgccgcgcccagtcccatcatcgccgggctctgaaggaaaagctcatcgatatcctcctgaggtcttttgatgatattgtactcgcgataagccgccggcagcgcgctgaaagaataaaccattaccagcaccggcgctttcagagcaaacagagtaaaaagtttcgtaaatttttcgaatctcttcgcctgcttttcgtcagatacggcgacttcggctgaaattttctgctgccctgcggtgatcacttcgcctaattttctcttgaactcttcatttctgaccacgataaaatgccagttctgttcattttcagacgacgggccgactctcacagcatcgagaattttcagcacgtcttcatcgggcaccggagtatctttaaattttctcacactctgccgcgaataaatgaggtcatgtaattccataatgatttcctccgctttcatcgaatcttatctgatcggatcttctttactcctctgcttcatcgcatccgacgccgttttaaagttgataaaatcctctccctgcttccggatgaatgcggtattcacctcagcgtcgagaagcgggataatcgattcatcgaaattcgccacgacattcagagggaagatatttgaattttcgatattcgccgaatattccttgctctcatctcccgcaaaaaatctccatcctgaatcagggaagtttttaaacggctcttctctgtaaacataacacggcttcgcaccgtcgatactgatccggtcggacacaaagcatccctgttccgtattgacgagttttctgagattatctttgtccaatgtagggaagtagtccttctttttataccagctgtagaccttccagacattcacagattcgtctttaaacaatctgcctgccagttccatcagctcgtcaaaaacaccctctgcttctttcctgctgtatccggaattcttataagtagagtacgtgcctccggcgataaagctgaccgcaaaatctccccagttatcgaacattttcagcagcggtttcatcagatcatccatcatcttccgtgccgtaggttcgtcaaaataatcacaaaaaacggactctcgaatgatatccactccgagagcgatatcccaggcgaaaaatccggattttcccaccgccggtttaaagagatccgcaaactccttacatttttcaaaactgtctctgcctgcagggctaagcttctccatttccttgcggaattcctcatcatcgtacatgtcaaactgcgcatactgccagtgagttccgcggaagctcgccattcctatactctgcatcgcagattcattatcgagtattccgaaattcttttccaggttttcggagaccttttcgcggtctgcgcccacaccgctggaatccttcaactgaattgaagtaaaatcgttatacttcatcagggaatgaaccgcagatgtcagaatctgaaagtccggatatttcgtatattgaatatcgtttttaagatcagccacagattccttaaacgcagtcaattccgctgcaaagtctctcgtagaatttgtattttccataacattacctctgtattcctaccttacactgattaatcaattcagccgtcacatgttaaaaatttagcggagatatgacaaaatatccctgtatccccagcaatataccggatcggaagacacccatatctttgctttttatcgcgcttttctccggcagataccgatgacagacaccggaccggcgctttgatttcacgatgaaaacggcgcatgccggaatttccgcaaaccggataaaaaattacaaaaaatgagatatcttccacttccatatgataacacaactctcgttttaaaaaaagctgcacccggataaaacctggtgcagctttcaatttctaagctaattccaacctgctggaatcacgctgttttccgtatgtttctgcttatgcttcctttgtgagtgtagcagtccagcttggcatagggaacttttctggaacttcccagtcgatcatatcgtgcatccattctgctctctgtacgaatacgtcgtgtgcgagaggtaccggcggatggcagatccatgcagggtcgaattcgttcttgaccttgagcaaccataagtggtaattcggaccatactgaggaccagtaaggaacagaggctggtgagggccgaggtgagacgaatagtaattgttttcgatattcatcttcgaagtctgcaggaagaatctgtcgacataagaggtatcttcgtcctgatcccagtagataaggaactcggagtaaccctggtgaccgttttcgaagttctggaaccagcctggatcgccgaagtccgggaagagcggcggcgtatattcggaagccttgagggctgcgaaagattcaccgtgctgtacagactggttgagagattcgataacgaattctacggatacgtaagaaccggtcatcagccacatgcccgcagagtctgcgttcttgagccaagattcgtcggaagcctttgtacgtctcggtttaccgctgcattcctgcatgatatcgtcgagtaccgccagttcgtaatccatctgttcttcgtttgcgtaaccgattaacataactcttacgaggtggaagttagccagggattcttcactttccttgagccagatatcccagaattcttctttatcttctgccttagcgatcgctctccagaatacaggaacctttgtgcaggcagcgccgatttcagcagcaccgatttcatacatagcctgaacctgatcagccttagtaggaacctgatagttgatccatctgattcttctttcgtccagagccagggaagtattaggagcgataccctgaggctttggagattcctgaatgaacggcagatacttaacagccattcttgtaacgatacctaagcagcctctcagacctgtaaaacctctgaggatacatctgaggtcaggaccaggaccttcaccccagaacgggtcgtcgcagttagccagggaacccatctttacgagttcaccgtcaggcagtacgagctcagtaccgagaatacgtctgtgcggaagaccgatcttcagagagattggagaccagccgtcgcccaggaggtttgcgatagcggaacactgtgcaccaccgccgccgattacgccgtagcatcccttattgaatgcttcctgctgcaaggaagagtaaacgataccaggaccgatatctgcatacatatgcttttcatcccattcgaaatgctgcatacgcttcatatcgatgatcagttcgtcatctacatggcagtgagtcttaggaccatagaaaccggtagcgtatggaacataagggatattgtatctgctgcagatcttcacaattctctgaacttcatcggtatctttagggagaataactgcagctggaagaactgtcataactctttcgtaaccgagacccgcttcataaccgccgggaccggatttgtaaccctgcatgataactggatcttcagagatatatttagcacctacgattctttcgagtgctttgtaagcctgtgttgaaattgccatttatttttcacctccggaatgcttaaagcgctttaacgataagttcagtaatatcgatagcttcaatgccgtcctttgcatctgcataagtgttgaacgcatctctgcactgcggatctgcggatacgattgtctcgataccgcattccttagcttcgtcaaggcggtgacctgtagcgaacttagttaatgcagggaaagcaatgtctgtaccgcgaccggcgcagatatcgaaagcattttctctgattctgatgaattcagtattatcagcacctggaaccgccgccatgatcgttcttgcctgagcatacagaccttctctgcctctccttcttctctgacccggatagatcatacccatccagcctctttctcctttataaggagtccagtcatcgcacagtcttgatacggaagaagcatcgtgataagccattcttgtatcgaccggagttgtgagtacaagagtcccttcttcgattgccttcgctgccagttcgaggatatgaactacttcaaatccgaggtcagctgtagcaatatccaagagctttggataatcaaccttgatcattctgtaagcttccgcatcggatactacgactctctttgcgcctgtagccttgatagcttcaacattttcttttgcgatctttctcgctgcatcgaccataccgatagagaacatcacattaccatcattctgctccttgtcgagaagcataaattccacaccgatcttatcgaggatcgtagcagtcgctttcgcaatctgaggattcttataggaagtgttgtcgccgacataataaagcgtatcagccttagcagcaacctttatatccttagcccatgctttacgatcagacttttcaccgtaaatattcccagtttcgataatcttatcgacagcagtcttatgtgccggaagaggtgcaacgccatcctgaacagccttaactctcagagcttcgagagacaggttgatttctaagtccaggtttctcttacatgctacgtcgcatgcaccgcacagcgggcaggcataaagtacactgagaagctcaggagaccattcgagggatccgtcgataagtcccagaccgattctcatcttaccgaaagcgccgtaagcatcgaagtcgttccaaaggttggacggacatcttacattaaatttcacaccaggattatatgtatgttctacccaataacaacccttacatttgatacagtgatccatatcatacttgaagtttttaatttcttcaatattaaattctaaaggtgttcttggcgtattatatctgccgtgggaattacctttaccatcaccatattctggatcgattacagacattttgtaacgatcacctgttaatctcttatcttttgcgacttcagcagcatactccatgttctttttggtaactgataagtcgaaacgatcatctcttgccatagtatatgttcctcctttccattagaaacacaactttattagaaacataatgtacccggatttaagatattcttttcgtcgaagatgttcttaacccgcttgagtgttgctgtatagccgccggctctgtcataaattacaggaacgaggtttccataaggtcttgtgaactgagcgccgcgattcatcatttcgataccagcttcgtaaacaatctctgcgatttcagccttttccgcttcgtttgcaggatcgtagaagaatgtaaattcgatctggcaagcacggttatgttcgatcggctgaatgtaagcgccaaccatagtatgcggataagtgtgcttagcaacgacctttttcatgatttccatgtactcacttgccttttccggacgagcgatgaagaacatatcttcgtaagcgccgaagacctttgtcttccaggaaggtgcgtcccaaggagtcttcaggatattcagaagttttctaccgagaccagggaatccaggcaaagcaggtttgagagagatatccttaaatgttgtattgatcacatctgtgagatatttttcttcgtaagcgatcttttcttccggacgtctcttgagaccgctcagtaccatagccagcgtccattcagggagcttgtcgcagagtgcaggaatatcttccacttcatcggcgatcactgtcgcgagatcaaccttgttgagaaggacgatttcctgaccgattcttctcggcataatcttatataaaaattcattcgcataatctaaattatcgatcggagcaaagtaaatcttgtcgatcttgctctttaattcgagctttgcactcatccaagtgatgatacccatcgtaccctgagcgccctgtacgattctgtagaagtcgagtcccgggccggatggatctacacctctggacggtgtgtagagaccgtgtgacggagtgttgtctgctgcaaaaccgtgaacggaaccggaaccggatctgaatacggaaccgtcgccccatacgatttccagagactgtgtaacttcaccataatcataaaccgtatttgtgattaccgcacgatcgagcgtgtcggagagaacggatctgttgccaagcggtgtgaacggcatcatgaaacgggcaccgactttgtcaagctcttcatacatctgattccaagtaacacccggctggaaacgaacgaacttatgcttaagatcgatttcgaggatcttattcatattcttcatatcgataacgataccgccctgcttaggaatcgtgctgccgtacatatgcgtctgggaacttaccggaacaacaggaatgttgttttcatatgcgtattttacgactgcagaaacttcttctgttgtttctggccaaacgacagcgtcagcataacccgccggcagaagactcatatctcttgcgtaaacctcaagatctgcagccttgtcacttgcttttgcaaccagcttttcgagttcattgattaatgacataaactcacttcctcctttcaaactgaattacgatacaacgtcttgcttcacattaccatacaattatgaactgtaccttaaacgtaaatcatctctatgccacttaccggcactctgttttccgtaacaactatcattcgtttacccgttggtatcttctgcccgatgtatcacatcaaactctgcaacattctgtgcgtgaataattttttcggaaaatctcttactctcagtaggcattcacaatgtaaaataatttaagcagtatcataaccacatgagcaaaatgctcttctatacaaataccgaatgttatcatccggcatttcttaaacctatatcacgatgatatagaaattaagacaactttatgactggaaatctgaccggaactttattttgtccaaatttccttcgaatcgacaaatctctctcagatcatccataaacaaaggaatattctgaacgccatttcatgcagatacttataattttacgttcagatatatttcgttcagatatattaatcatccatataattcgtatgctttttatatctgtttcaaattatatgccttgatgaataatatgtcaacctattattttcatttatcgttatattatttttactctaaatgctaataggccggaacaaacaaatttctccaaatttttcaatatttgcatcttaacatcacttcttaaatatgctattatccaaatatatccgcatcgtttcaacggttttttggatttcatcttgttttcgaatttattttatcgttatactaataatatgtcaactgattacctttttgtaagtggcatgtatttatattcccacggaaaaggctcccatttgccgccgctaacccggaaaaagcggctgaaaagaagatccttattcccggaaaaatggaaggtgagatatcgaagaatggaaaaaaagaaagttcaacgaagtaaaatgcagaacggatcatttccttatgatcatttttttgacatcctcagcggtaagtggaaatcatgtatcatgatcgctatcgactacgaccgctgcattcacttcaacgcattccaaaaactctggggcatctccagcaaagtcctctacacacagctggcagacttggaaaaagacggcctgatcgttcgccagaagctggataccgatgaaaaacagacgacccagtacgtcatgacggaaaagggcaaaagcgtcatgccgattctgaaggaaatctatatctgggcgatgagagatctggaggataaaaacatgaaaatagatccccgttctttcgaatactacatgccgaaagacagaaaagaccgcggcaagcacagcggccaggaaaatccgaaacccgcggagaaagaaaaatactcagacgataccgaggaaaaagaaccctcgataatataacggaacgtcccccctcggcagtcggtctctctccgtccgctgtgaacagatatcatcattaaaatggcatcagacgacagttttttacagcgatatttcaaatttacaatttgtttagatgtttatatgcgtatacattatacatagttcatgatcgtttcgtaattgaatcaaatcataagatccaatgattcaggaacgctttattaaatgaggaaaaagatcggggatctgcaaaaccgtcattgttccgaacagccgtcccctgcagaatcattgaagcctataaaaccgacggtctcccgataaggcaaaaaatattttcagatcataatgtaaaatacagagataaaccaaaccggtagcaaaaaatataaaatcaaaaatttctcagatctaatccctgactcagacttccttcaaatcgagctgaaacaacagctgagaattcccgcgcaaatgaaaaatggcggcagatgcattgcatctgccgccataatctgcaattttagagaacgctctgaactgctttcctgacagctccgccgtccgccaaaccctttaccttcggcataacagcgcccatgagtctgcccatattcgctttgccgtcatcgattcccagttccgctttcgtatcgcatacgatctgtaaaatctcttcttcagtcagctgtttcggcagataagccatgaggatctctatctctctactgtagttttcgatcagatcggttcttccggctttttcaaaatcagagagggcatcttttctcattttcacctgtttcgtcaaaatgtcgattatgccttgctcgtcaagttcaaccctgtgatccacctcgtactgcttgatagccgcacgggcaaggtttatcgtgttttttgcaacttcatcgtgcgccttcatggcgtctttgaagtcctgcatcagtctgtcttttaaagacaataacaacacctcttttaatatttcttagccttttttctagcggcttccgacttcttctttctctttacgctaggcttctcgtaatgttctctttttctgagttcggacattacgccgtctctagcgcaagaacgcttaaatctcttcagcgcgctttccaagctttcgttttctctaactactacctgtgccatattccttatccctccctccgtattctgaaattctaagttgcgtaaaaaccgaaatagtctacagcgcgtacaattatatattttttttgcgaataaatcaagtatattttttgattttccgcttttgccgcctttaacccggaggccacgtcatttttctgcggcccagcaggtgaaaatgcagatgctttaccgtctgctgaccgtcttcaccgcagttatttaccaggcgatatccgtctccgagctccagctgtgccgcgatatccttcactttgagcatgatatagctcagaagctcggcgtcttcttccgatgtatcatcaagtgaagcgatatgtttcttcggaatgatcagcacatgaaccggcgcctgaggcgcattatctttaaaaacgcagattttatcgtcttcatagacaacctcggacggcagttctttctgcgcgatcatacagaatatgcagtctgacatctttatcactcccttctcttcgatagatagattgattttaacatacttcggacttcttcgaaatatgtaaccggaaattattttccggtatcgcaaagttttcctcagggacatacctcactgacaagataccctgtacggctctgtccgcgtctgtaacggcctttttacacaatttcgccctccagtccgccttcccggatttccttcagcagaacgtcggaaaatccgttcacaaatttttccgcctgttcccggggcatgcggcagcaggtatggatataattgtccgtaaatcccgtgagcatcgacgttttttcatcatatcgctcgaagagcacctgacgcactttccctatattgcgctcaaaaaaacggttcgcttctctctccgccagttccatcatccgttcgacgcgcagagatttcacgtttccgctgatctgatccggcatctgcgcagccctcgtaccgtctctcatcgaatatttaaaagcgtgaactttactgaatccgatccggcgtatcgtctcgagactctcctcgaattcttcttccgtctctcctggaaaacccgcgataatatctgtggtaaccgcaaattccgggtcgaattgccgaaaaacatcgacgattctccgataagtttccacgtcgtagcgccggttcatcctccgcagaaccgtatcgctgccgctctgcagcgacagatgcatatgaggacacaatttc

SEQ ID NO: 3846 - DNA, 21351 bp, Unknown
  16S sequences of unknown bacteria
gaggaacttagatggcaacacaaatcacaaattatcaatgtcccgcctgtacggggccgctccattttgtaggagaatccggcaggctggagtgcgactactgcggctcaagcttcgatgtcgcagaaattgaagcgctctacgcggaaaaagaaacaaaagcagcggaagcggcgcagaagcaggaagaaacagaagcggctcaaaaatctgccgaagcggaaaaacaaaaggccgccgcaggcggctctgactgggacacttccggcctgaacgaggattggggcgcggacgcggctgacatgaaggcttacagctgcccgtcgtgcggtgcggagctgctctgcgacgcaacgactgcggctacgtcctgcccatactgcggaaatccgtcggtgcttccgggtcagttcgccggcattttgaaacctgattttgtgcttccctttaagctgagcaaggaggatgccatcaaggcgctgaagaaacactatcgcaaaaagccgctgttgccgtcaacgttctccaagtccaatcatcttgaggaggtcaaaggcgtgtatgtacccttctggatgtatgacggtgcggccagtggaagcgtgcagttccatgctaccactgtacataagtacacctcgggagattatgaaatcacggagacaagccactacgatgtgcgccgcgccggttctattggctttgagaaaatcccggtggacgcgtcaagcaaaatgccggacgactacatggattccatcgaaccgtatgactatacagacttaaagccgttttccacggcatatctgcccggatttctggcagacaaatatgatgtgagcgttgaaaacagccgggagcgggcagacaagcgctgcgcgggttcgctggtgtctgcgctggaaagcacggtttcgaattacaccacctgcaatgaaacgagccgagacatccgcttgaagcgcggcaaagtgcattacgcgttgcttcccgtctggatcctaaatacaaagtgggaaggaaaagatttcctttttgccatgaatggtcagacaggtaagttggtaggcaaccttcctgtcagcacgaagcgggttgtcggtttgtttgcagcaatcgcggcgtcactcagtgccatcggcgtgactgcgctgctgcttttggcacactagggagggcggaaaaatgaaagaaagaatacgctgtctcctgctgacgtttataatcgcgcttgtattctgcgtgaatgtatccgcaaccgagcagacaggtgcacagctttattatgtgacggatgaggctggacttctcaacgaaaacgaaaatatgatgctggaaaagatggcggaaaccgtctcccaaaaatacggcatcggtgtatatatcgtaaccgtggaggattatcgtgacttccattctgaaggtgtctataaggcaacctataccatctatcacgaatacacgatgggcgaaggaccggaccgcgacgggatcatgctcctgctcagcatggatgatcgcgactgggcgatattctgctacggctcacgctgcgagtatgcgttcaatagctatggtcagcagaaactggaaaaggtattcctcgataacttcggtgaaaacgactggtacggcggctttgaggattacatcaaagaatgcagcgtctatctggaaaaagcagcctcaggaaagccggttcgagcgagtttgttttttccgatccttatcgtgatcggtctttccctactggcagcagccgtgatcgtcgctgtgatatggcagaaaatggaaaatgtatcaaaaaaagcaaccgctaacgcctatgtttccgcgggacttcagcttacagagcaaacagatcattttacccataagacaacctccagccggaagattgagcgcagctcttccggcggcgggagcagccacagcgaatccggcggaggcggttccggccgaagcggaaaattctgaaaggagtggctatgaaaacaacacccagacgcatgttcgcgctattgctggcactggttctgttattgtcgctctgcgcctgtacacagaagacgcaaacggtgcctgacgaacccaaaataaatactgcccacaaaaaaactccggaaagccaacaggaggaagctgtattacagagcaacgggaacgattttgtatcacaggataaggccgtggacacacctccggtgcaatacgcgttttcacaggaggcagagacatcgcttggatggttgcgcgacaggatggattttccgacgacaatgtttggcgcggcgtatctcggctatgtcggcggtctgtttgatgagggtttcgaggcgggtttccctgcgtggctgcaggaaaccaatgaggcaatgctcctcgaatacccctttatcgcagagatcaacgatgagcacatcatcggcagcgcggggcacctgtactgcattgtgccggtcgacgagaacgcgacggttgcaatcaaccgtgtgcagtggaacgaaaaaacacagaccgatgaggtcacggaggttctctaccggtcagagagcggcgaaccggtgctgctctttgcgaatcttgacggcattgcgcatgaggctgacacccaggtctttatcaccgacaacaacgggaacacctgcgaatggtatccctcgcttgatgcgacgagccatcttgcaccgtgtacatcggaagccggtgattatctttcgttcgattttacggaatatgcctggtatgacatcccatccgaatttgccggttggctttctgacggctggacaggcatgaccgcgcttggccttgccggatcgcagagtacaggcatgggctggatcacagaaaccatggtagagaaaaccggccgttatgcctatttctcgctgcgcttctatctcgaggatgagacggggggtacagtcgatctggagtggacatacgaagacagcgacgacattgaggagatgtggagcggcttctgggcgattcaaacgattccggacgggccgagctatgtgacgctcagcttgtcgcttgtgggcggtaacagctatggtgtcacggacggcccggtgtatctgtgtgagacgtatcctctcctgatcagcccgagcggcacggagctgctggtcggcgcaggtgagagcggcgtgtgtctgccgttcatgtcacaaagcacaacggcatatgtgttgacacaggccgcaggatagaaagcgtgcaggaagcaaactgctttgaggtttgcattcacgaattctgtttggtagcaatctaccgtccaagtccatgtccgggacaataatctgttcggctcacagtatcaatgtaagctaccgctcaagacacagcttccctcggagatcgccgctgccgcatttcggagttttaaaaagcggtattcttggaacacgaaggtcagagcggtcaccgtccgttccattgaactctcgcccaaagacagtgccgagcagctcacgctgtttgataatgtccagcaccgcatggcaatggagaaagtacaggatgctgtggaggagattcgtggtcgctttggcaaaagtgccatctcttacgcttgtctcatgggcgatttaaaaatgcccacagacggaagagataaagtcaaaatgccggggctaatgtatcaataaacgatgtttttcaaatattttctgctttatgtccgtgctatgaagcgctgaaagcgaaagcggagaagtttgacgaggcggaagaagcaggaaagaccgatttgcaaaaggcgcagggctgccgggatttccgagcgagctctgcgccttttttattttcagaaaaatagcaccccgggccgaaggatgggtgaccgcggggcgcttgacagatttacaattgaattatataaaagcgcagaggaaatgtcaatagaaaattcgaaaaaatgtggatatttttcatgtttttaacctgcttttaacgtattcttttcttttacctttgcagaagtctattgccaaccgacacgcagcgtggtacaatcgacttaaagaagtacgtggaggagattttgtcgtgaatatgaaaacaatcggttccgccgttgtaatcatcttggccgccatagtcgggctattcctcggcgctgccatgaacgacgggttaagcggctccatactgctcgcggtcatcgcagggttcgtctgtatgatctatacgattgaaaacagtggcaagaagtaggggattttttatgattttacggtttaaacagcgctttttttcatggttcgacagctacgatatttatgatgagaacggcaacacggtgtatgtcgtcaaagggcagctctcctggggacactgcctgaaaatttttgacgcttacggtgaagagatcggcacggtaaaagaacgcattttcacgttcatgccgaaattcgaaatgtattttaaaaaccaatatgtcggttgcatcagccgcgaatttgcactttttaagccgaaatacaacgtagaatgcaacggctggcatgtggagggcaacgttttggagtgggattataccgttgtttccggaagcggtcacgatgtggcaagcatctccaaagagctgttcaactggaccgacacgtaccttttgaacatatacgaccccgcagacgcactgtgcgttttgatgatcgtgcttgcgatcgatgccgaaaagtgcagccgaaataacggctaaacgctattttctgtaaagaaaagacctccgctcaagactgtttggcccgagcagaggtcttttcttttcccaaaatttaaaatgcgtagaacaaaatgccgagaccggcggaaagcacgatcatcaaaatgggcgagggtgctttctttttaaagtgcttatagccaaagtgcaaagtaatcagcagcagcaaaatcacaacaccgcgcagatcgacctcgggggcgcttcgtatggtcgtaaagccgaatagcgtgctaaggcccatcgtcagcgccgtagccaaaatgagcgccaccacgcacggacgcacgccggagaggaatgcctgcacaccggcgtatttcagcagattactcaacactgccgcaatgagcaaaataatgacgaacgaggggagcactacgcccaaagtcgcgagcaaactgcccaacacgccgccttgcgaagatccgatgaacgtcgccatgttgacggcaagtgggccgggggtcgattcggacaccgcaatgaagttgatgaactcgctttccgtgagccagtgattcgagagcacggcttcgcggatgagggagatcatgccgtagccgccaccgaacgacactgcgccaatctcaaggaaggtcaggaataatttaaaatagatcatttcacgtcaccgccttttccatgcaggcgctgtatgaagtaggccgcaagaccaaccacaccgctaagcaaaataaagtagatagacgaaaacgaaaccgcgaaaacggaaaacgctatcatgcaaaccgctacgcctgtgacaagcacggtattgaacgccgtcttttcaagacttttcagcatgcgcacaccggcggaaaagatgaggtacacaacgcacacctgaattccgtggaacgcgcaggaaacgaatttcaagctcaaaaactggtcaaagaatagggaaatgaggtagatgatgacaaacgaagggatacacaccccaagcgtggccgtcgccgcgccgggcacaccggcaatgtgataaccgatatacgttgcgctgttaatagctatcgggcccggcgtagactccgcaatcgcgatcatgtcgaggaactcttttttatcgatccactttttctttgcgataaattcattttccagcaaggcaaccatcgcatagccgccgccgaacgtgaaagcgccgatcttcaaaaatgtgaggaacagcatacatagttttttcatttttcaaccccattttctgctgatttaaacacgataatcatacaccgtttcaccgaaaaaagcaataaaaaggaagcaggcgcacctttcgatgtgttcctgcttcctttgctttattttaaattacttagagaagaggtttgccacacggttccagaagctgtctttggtttcagtctcggtcgtggtttcttccgtggtgctcgtgctgttgctgctcgagtccgttgcggtgcgcattacgtagcttacggtcatatccgtaccgtctgcgcggccggagcccttgaagctgtccgcacgatccttcatgatgtcaatcacgcgtgccagcgtggaatccggatcggtaatttcgctgaggccgtcgagcttatcattgattgtatcggagaactccgtcatgccgtcactgagctcggacgtgccgtctttaagttctgcgccgccggtctggaactgaccgatcgcattcgatacggtcttgctggaggaagagagcgtctccatgccgccgagcagttggttggtgcctgcatcgagcgtgcctacgccggttgcgaatgcagaggtgccggttgcaagctgagaagcaccgctgccaagctttgcagcaccgtcggagatcgcgttggccgcaccgacaaccgtgtcggtatctgccggattctctgcgttatacagcgcgccggtcagcgtatcaacactgtccatcatttcgcctgcctgcgaggagaggtctttgaattcacccatcaaactcttgagctcatcggtgttaatatccgggattgccgccgcaacctgctgcacagcgctctgctttgccgccgcaagtttctcggaagacgttactttttccgtaacagccggggcaacctgttcggcaaccttcggaccaaccgtgcttgcaatcgtatccgaatcaatatcgcttacaacctgacccattgccgcttttacagcaactgttgctgcgccggaaagttttgctgtaactgtatcggtaatttcgctactcggggaagccggagcatcgatttttgctgaaattgcatttatttgatcctcagtaaggcctaaactcggatcacttaaaagttctttgagtgccgtcttataaccgccttggaatacatcggtcgaaagtgcaaccgcctgatctgctacctgatctgcgccgactgccgcatcatcggctgccttctgaacgttgtccttgatctcttccgccgtcttctgggaagccgctgttgccgcattgcttgcagcagcttcggaagccgctttcgctgcgccgctcgccgcgccatcgaaaacctgttcagcgcctgcgccgagctgtgctttgagtgctgtcatatccgggatttcaacggtctccagcttgccggaaagctcggtcattttgtcttcaagcgcggtcttcttttcggaagcctctacaaggcccgggacaagctgctgattcatgacgcccgcaagctgtgcggtactgttctgcagctgaatagcgccgagggaaagctcgccggtcttcgttgccaagagctgtgcgttttcaagcagattctccgtgccgtttgcaagcgtctgcgtgccgctcaaagcgctgcccacgccggcatcgaactggctgtaactcgaagcaaacgtgtcaaggctttcgacaagtgtgcccacagcgtcatccagtgcgccggaaccatccttcagctgatcgattgcatcggtcaactcatccatcgtgtcgccaagctcgtcggaagcctcatcgaggtcgaggtcggaaaggttcggagccgcggcgaagagaaacgtcgggacggtgcagtccgtaacatccgcttcgagggtaagggtatcgagcatcaggtcgtcgagcttatcaaagctgtcggggagcaggtcgctgacggcttccttcatgcccggcatcgcaaggtagcaggcaacctgcgttttggaatcagactccacaagaccgtgctctgtcgtgatgttcttgaagttttcgctcggcagcacagccgccgcaacggtgaagaacggggtatagacggtgcgctttttaccgtttacggtcacttcttcgccggtgttgttcgtcagcttaacggttgcgacaaggtggccgctctggcccttgagttcatcggccgtaaccgccttgccgtccagcgtatactcgatggaaacgccgaccggcgcctgtgcgctgttcttgccctgataataaatatcggtttcgtccgtcgtccacttgagcgtattgccggactgttccggcatcacgtcgctcttgaggttctggatatcggaaaggccgctttcgtcggtaacggcatcaaaaccgtcatcgctgtgcagccaatcgctggtgatctgctcctgcacggaaccgtctgcgttcaggatgagataagaggtttcttttttctcaacggtagcatccgccgcgaaggccggggcagcgcagccgaggaggagaagtgcggaaatcgtagccgcaacggattttgtaagatacttactcatattgatcgagatcctttctctgaatcgattatgcctttttctcggtgatttcgggctttttcagccaatggaacgtggtctttctgagaattggttccgtgatgacaagcagtgccggcaacacaagcaggataaccgccatactgatgagtgcgccgcggctgatgagcttgcacagcacgccgatgagttccatacgggagacgagggacacgctgaacgttgccgcgaagaaggtgagaccgcttgttaaaatactctgactgcactgttcaacggcaatttgagccgcttcctttacagtgtgacccgcgttacgttcttcacggaaacgcgtagtcatgaggatcgcatagtcgaccgttgcaccgagctgaatggtgccgataacgatgcttgcgataaacggcagcgtcgtgccggtgaaatacggaatgccgaggttgatcatgatggcgctttcaatcgccgcaacgagcagcaccggaacagaagcggagcggaacacgatggcgataatgacgaacacgacgatgatacttgtgatgttgacgttattgaagtcgacatccgcaacctcgatcaaatctttcgtcatcgcaccttcgccggtgatgacgccgttcgggtcgtactttttcacaatatcgatcatttcggagagctggttattttgctcgtcactgccgctcttataggaggagtttgcaaggatcatcttgtggccgccggcctcgaagatatcgcgcacgtcgtcaggaataaacatttccgggatcgcgccgccgacgaacttttcatagctcaaaacctggtgaatgccgtccacgtcgctcaactcatcggaaagatcggagagatttttttcggaaagggtatcgtccacaatgatgaagtgggacgttgtcatatcgaagtcttccttcaagcggttcgtacccgcaatgccgggaaggtcctgcggaagcgcatcaaagatcgtgtagtaaacggaagtctttgattgtgcaatgaagaacggaataaagattatgataaacgcaatcaaaatcggcacacggtgcttcacgacgaagttcgaggtacgcttgagcttcgggatgaacgtgcggtgcgtgtgcttttcaatggcatgacggaacgtcatgataagggacggtaaaaccgtgatggtgcagataacgccgagcagaacaccctttgccatgacgacgccgatatcttcgccgagcgtaagctgcatggtgcacatggcaaggaagcccgcaatcgttgtaagggagctgccggtaatggaggaaaacgtctttttaatagccgccaccatggcgtcctcatcggatgccgccgtcagcttttcttcttcgtaacggtgcagcaggaagatggagaagtccatcgtaacaccaagctgcaggaccgttgccaatgcttccgtaatgtagctgatttggccgaggaaaatgttcgtgccgaagttatagacgattgggaacagcatgccgagcatgaagataagcggcacaatcgtttctttcaggctgaggaacagaatcagcaacgaagcgcccacagcgcaaaggatatacaagggcatttctttattgatgaggctcttggtatcttccaaaatagccgacataccaccgatgaagcaatctttattcaagatgttcttgatttgcttctgcgcgttcatcgttctggcatctgcgctcggggcatcgaactgaacgatgagcatcgttgcgccggaatcgttatagaagaacttctgaatatcgctcggaagcatttccttcggcgtcgtcacatcgataaaatcgctcgtccacatgaccttctgtacgccttcgaccccttcaagatcgcttttcagttttaaggtatcaggcgtagacatgttttcaaccgtaatcatggaaaccgatgccatattgaagtcatcctccaaatacgtctcgccgatcatggaatccagatctttcggcaggtaggtcaaaatatcgtagttaatgtaggtgccgagcgcaccgaacaccgagggaatcaaaagcagaaccgctaaaacaagaatcaactttctgcgcttcacaatccatcgtgcaaagtgctccatttagcaccgctcctttcattcgggaaccatcccgtttatttcgttatgtagtttagtccaaaaatgaccaatagtcaatattaaaaatgacgaactgtgtgggcaaaataaattgactattagtcattttattcaaatctgtacaaaatgttgtttttggcttgctttttacggtgtatccgccttatactataagacaaataaagggattacacagttagatttgaatgttgggaggccacagccatgcgcggcggtgttgaacagaaaaaagaacagaaaaaggaggggctgctcgaggcggcctatcagcttttccttgaaaagggcgttaacaagacctcggtcgatgagatcgtaaagaaagcgaacgtcgcaaagggtacgttttatctgtattttcacgataaaacccagcttctgcagcagctcacataccgcatttccgcgcgtgttttgagtgaggcctatgaatatgcagaagagcataagaccggcgtttttgtagaagacatcatcctcatggtcgattacatcgtggaatactttaaaagaagccgtctgacactgcggcttttagagcgcaatttctcctggccgatgattgaaaagcagcttgatctaagagaagacccgttgtgggacaagcttgtcactgccattgagagcagctcgctcgccgtgggctgcacagaagatgtcttatataaacgcgtgtttttggtggttgagttcatcggttccacttgctttgccacgatgattgaaaataagccggatacaatagacaatatgaaacccgtgctttacgacatggtgcgtaagatgcttgcgtaatgtaaagcgtatcaactttgcaaagttgagttgctttgtaaagtcatattggcttacacataaacctcccggggctggtttaaagatcgccccgggaattttctatgttcgattgaactttttcgcaagatatagtaaaatagaaaccgaaaaatgagaaaacacagaaccaacagaacggagatcatttgaacctatggataaatcggaaattcttgcactgcgtcgcgcagtgctggaaaaagactttgcacgcatgaatgaccgccaaaagcaagccgtgttcaccgtaaacggcccgctgctcattttggcaggcgcaggcagcggaaaaacaacggtgctcatcaaccgcatcgcgaatatcctgcgctacggcgacgcgtacaacagcacctatctgcgcgacgatctcgatgaaaatgatattgccgcgtgcaaagcttatattgaaaacggcacgccgctcacaacggaaacacagaagcatttgagtgtttccgcctgcgcgccgtggtgcatcatggctattaccttcacaaacaaagccgcaggcgagctgaaagaccgcctgtgcgccatgctgggcgagaccgccaacaatatttgggcatcgacgttccactccacctgcgcacgtattttgcgccatgacggcgagcgcatcgggtattcctcgcactttacggtgtacgataccgacgaccagcgccgcttgatgaaaagcatcttaaaagagctcgacatttcggaaaaaaacatcacgccaaaatcgattttgaacgagatttcccgggcaaaggattctttaatctcgcctgctgagtacgccctcacggtcggcgacgatttcagattaaagattatctcccgcgcgtatacaacgtaccaaaagcgtttgaaagacgccgatgctatggactttgacgacctcatcaacaaagtagtggagctcttcaaaaagtgcccggacgttctggaacgctaccaggaccgtttccgctacctaatggttgacgagtatcaggacacaaaccatgcgcagtacacatttgtgcgcatgctggccgaaaaaagcggtaacctctgcgtggtcggcgacgacgaccagagcatctacaaattccgcggtgcgacgatcgaaaacattctgagctttgaaaatacgtttcagaatgcgacggtcattcgtttggagcagaattatcgctcgacgcagaatattctggacgctgcgaacgccgtcattgagcataacaccgagagaaaaggcaaaacgctgtggacgcagaacggcaccggcgccatgatccacctgcacacggcggaaaacgaaacggatgaagccgagcgcatcacgaagatcatcttagacggcgttgctgcggggcggaaattctccgattacgctgttttgtaccgcatgaactctcagtcgctgacatttgaacgcaattttgcaaagtccggcgtaccgcatagaattataggcggcacgcgcttctacgagcgccgtgagatccgcgagatgatcgcatatttgagcgttatcaacaatccgagtgatgaaatgcgcctgcgccgcatcatcaacacgccgaagcgcagcattggcgaccgctcggtcgaagtcgcggcgcagatcggtcagcagacgggtgagacactgtttgaggtcgtctcgcacgcgaaagactatcccgcactgtcccgtgccgcaaacaaaatgacgcttttcgccgcacagatgcagggactcatcgagctcaacaacgatgaaaaagtcacgctcggcgagctttatgacgagcttgtggagcgcatcgattacctgaattttcttaagaccgacgacccggaatccgcagaagaccgcgccgcgaacgtgcaggagcttgcttccaacctgcgccgttttgaggaggagaaccccgaaggcacgctttcggattttctcgaagaagtttcgctcatcacggacatcgataattacgataataacgccgattccgtcgtgctcatgacggtgcactccgcaaaaggtctcgaattcccggtggtgttcctgccgggcatggaggaaaacattttcccgggcatggcgagcgtatatgtaccgtccgaagtggaggaggaacgccgtttagcgtatgttgccatcacgcgtgcaaaagaggagctgtacattttccacgcggaatcccgcatgatcttcggcatgacgaaccgcaaccgcgtttcgcgctttgtggaagaaatcccggagacgctcgtcgagcacacccgctcccgcgattacagtgcgcgcccagtctctatgccgagcttcggcggtgcgaagccgttcggggaagcaccgaaaacaaaatccgttgcggaagccggcggattcacgccgaagccgcgcgtaaagcccgcgcctgccggtacataccgcgtaggcgatactgtcctgcacaaggcgttcggcacgggtctcatcgtttccgccacgccgatggcaaacgatacgctgctcgaagtcgcgtttgataaagtcggcaccaaaaagctgtttgcaaacttcgcaagactgacaaaagtataaaaagagtaagccgtgcacctattttcaaagtgcacggcttatattattcaaatgcggttctaattttgtctgccgcagccacagccgcagtcgctcgctttcggcgggaaaaattcgtcggtcgggaaatcaatcttgcggaacagctcgcaggggttgtcgccggaggtgacgcattccttatccggaatgcagaaatcaaatgcgggaatgagcatctgcacattccgcacaatctgcacgatggtaaacaggccaatcgtcacgtatacggtgtttttctgctctaccgtttcaaacgcgccgccgtaacggcttgcaatgcagtccgggattacgcagcagggctcgcagccgcagcggcagtgctcgcaaagctttgcggaaagcgctaccggctgcgcgacctgcacagtcgccttgggtaagaccttattgccctgtaaatcggcttcgtcacggcagctctcgcttgtaaacatcttcacgttgccctcactgccgtagagaatgaccttcttattgaaaattgaaataccgctcacgcgttcgcagcccactgtcgcgccgccgtacagctccaaagatacgtcaaagaaaaacgtgagatcaatggaataatacccgcggttaaaggggatcggctgcatatcaatgtacacagagattacatcaacgtcccgcacccgcacattagcggaagcgtccacaacgggctgcaccgaggcgggaaacagcacacgtaaatcctctaagcagtctttatcataacattgcgcaagctataagtacaggcaatgtaaaaaaacctcgagggtaaacccttttggttgaacgcctttttgcttgttatatacgatcttatcgatgatggatttcagtagttggttcttcgtgttgaagtcggcggtggggtaggcgtcgaacacggcttcaatgttggcacgcattttttcgaggtcgagctgttggggcgggacaaggttcttacgttcatcttccagcgccgatatgcggctgagcaaggcgccgcgtcgctcgttgaacacctcgatggtgtacacgccctgttccaccagatcgtacaggcggccgagctgctgatgtgccgtactgatttcggcatctatggacttcgccatggctgcgtagtcaatttggctttcctgctgcttctgctccgcgttggcgcagagcttatcaaactccttttggatttccagcagaacggcttgctcgacgtattcgagcttgctggacacgatgcacccgggcacttggcagccgagcaagggccctccggcagactggattgcaatgcgctgcaaaggccgcccgcagtttccacaaagcacgagaccggctaaggggtttatgcgcttgccggtgtttgcaggtgggtgatagtgccctgcaagaatccgctgcacggcttcaaactgctcgttatcgataatcgccgggtgcagcccgtcaacaacagtccacttttcgggggcgttgtagatcgtgaggtgatgctcgtttccgcgctgtccggggcgcacgcacgtctttcggttccagacgatcttcccgcggtatacgtcgtttttgagtatcttgagtattgtggagcgcgcaaaatgctcgccgcggcgcggctttgcaccgagccggtcgatcgtcgttgcgatggtcgccgtacccatgccgctttggtagaggtcgaaaatcatgtggataaacttcgcttcggcttcattgatcttcagcgagggcgttttgccgattttggttttatcgtagccatacggtgcgttcgcgatatagccgccgttttcgatcgtcgcgttcaatccgcggcgcaggcgctttttgatcatcttgtactcctgccgtcccataaagctctcaaattcggtgtatgtctcgtccatatcgttcgagaggtcgtaggtgcgcgtgggggtgatgatcttcgtgtcagaccacttgaatgcgtctaagatcatgccctggtcctgcatggaaccgcgcccgaggcgctgtatatccacgcacagaacgccggtgtatgtgcccgcttcgacgacctcgagcagacgcagcatttgcggacgcgcgtaaaggctgtcgccggagacgacttcttcaaaaacgtcttcgtcctgcacggcgatgtcgtgctgctgcatatatttttcgagcatctggcggtggcgctgcaaggtcacctccagcggctcggacgtatcatccgcacggcttttgcgcagatatatcgcgtatctcattgtttatgtacctcctgtttttatccgttctcaattatatgcgtttaaaattgggcataaaaatgcccgggctattgcttttgcccgggtcaggtggtacaatatagcttgtctgggacttatattgtccacccggttcgccgggcggcctcgtcggtgttggtagcaccggcggggcttttttatttttgtgttgtggcgggcttcaattcatcggcacgctgtcgatataacactcatctgcacaaaggtcaactttattgttccagaccttattgctgtccacattcgggtcaatatcccacgcgatgctgtgggtatcatctacatagacccggctgaaattttccatatcggtgaacggctcaaaaacggtaccttttttgagaagcggtcgcatatcgtaaagccgtttttcgccgttatcgaagctgatcgtcagggtgaagtcacggttggcaacgacaccgacgatctttttctttccgcctgcaaaatactctgcagctttgtggtcaaatcctttggaaagataatattcaactgtgtttgccatggtataacctccttatctcagcggctcgatggagaacagctcctgctgatttcttgcaagctcccagttctcgcggagctcctcttgatggaacgctgcccagcccagaagcattttcagctgcttggaaggcattgagccctctaacacttccaattcttcgatggatacgaggacttcggcaccgccataaaacgcatggaaatgcggcggcatatggtcgctccaataaatacaaactttaattcctctgaacattgaaatcgtcggcataaaatcaactccttctctatgattattataacatgttgagtttccatttttcaactttttgccccacagcggggctttttcttttttatccacgccctccgggtggagggcgacaaacaaacttgtgcccgactgattatctgcgaaatttctatccacgcctttttctcaaaaggcgactaaaattcagttattgttcaacaagctcatagctgtcgccggaacgaacgtaggtatgaatgctttttaacaatgcaccgtctttatcaatttcaccgtaatcaaaaacggtagtattgcagccggcaaaaacaagtcctgtaccgtccattaaatcgatagtgaaccagttataatctttaccctcgattttttcatcgacgaatgatacaaactcttcttcggtgctcagcttaagaacttctttaccaacgatcacggaagctcgtgtgccgttggacatactatattccgtaaccggaaggttgagcaagaaggtattcggggtactttcggaagaagtctcggttgtgtctgtttcagaagaaacggcgctatcgtcggcttcaccctgcggcacttgaccgtagtagagaatctctgcgaccttgccttgatttaatccaaacgcaacagagaaaacgccgtccgtcaagcttacatctacaccgtcaacgtagagactaacaccaccagttccgtcgccctgcatcatggtcagctttcgggtgtcggaattataggagcaccacgtgacaatcatcagatatgagtcagcaggaatttcatctgtgtgccgaatacggtcttcaagggacgtgtatttttccatgtatgccgtgcccgcatttgtggtgtcggtatcttcgtcaaaatacacgtcggacatggaaaagtcataattttcaagaagtttctcagtggtatcgccgattttgatgccacgatacgtgtgaagcggtccgagttctttttcggcttcggaaacagaagtccacattaaatttgacgaatattcacattcatcatcttcattccacatcaggaagtcatcgatagaccagcttgctgcggcttgtgaagaactttcagtgtcgtcacttgtttcttcgcttggcataaacgtgctttcaataagaatactggtcgatatgtactccactttgtcgttatcatcgtacattacagaaacttcaccataatgccaaagttcctcgggatcagcggtgacaacgatgctttcgttataaggcacattcatatcgatgctttcatcgatcgtggcatcatcgttcattttagccgcgaacattgtgtagtcatcagaatcagaaactttgtcactgagcttttgcagccttttaaccacgctttcgtggctatctccacaatgaataccgcaaatctgatacgtttgggagtcagagatggaaatgctgataatcgtgctgtcaagttgttttattgtcacaccgtcgtaaccccaaagcacacaatcgtattcgtccgggtccgttgtaaattccggctcaccgaggtattcaaccgctttgtcgatgttgtcgccgaggactatttccttgccgccatactgaaatgagaacttctgtggaaacttttgcgaagccgcgcccgagcacccgcaaaccgcacaggcgacgaagacgatgcaaagaactacgctcattacctttttcatgtcagcatatacctcactattcaattttcttctgtgctttttgaattcgcgcttcaaacccgccctttgtgctatcttccaacttatacctaagagctaatttacatatttcaatcaattcatggtatttcccttgcttatcataaattttagcgagaatttcaaacgaaggaatccgcggtaaaacatgatcgtttgggtaaacttttggatatgctttagcaaaatctggaaatatccgcacgtcttctaagcaatacttttcagttcgttcgtagttcttttcacgataagccgcgttgatttggtctaaaagttggtaatgacgattaactattctctgatcgttagaaactacgctcttttttggagaaatacttgtcctaaaagtgtcaagtaaacccataaaatatacctctcttattcatttttgattaaaaccaatgcgtaaaaccgacggcgagcccttcaatggctacgtcttctaagtcggagagtgaataggtgagcgggggatagcttgcgtttgcaggctggagtaccattgtatttccgttgatatacacgcgctttaaggtcgcttctccgttgatacgcacagcggcaatttgtccgttttctacggtcggttgcttacgaatatacacggcgtcgccgttcttaatgccggcatcaaccatgctgtccccctcacacagcaacgcgaagtctacttgacggtcaacgggtacatctatatagccttcgaggttttcttcagccgtgatcggcgtaccgcaggcaatgcgcccaacgagcggaactttgtatgttttcggcagcggaatgaagccgggcgggataggggagcttgaaacatcccaacccatgatccattcgggctgaactcctaaagctttagcaatgagttctaccttatcggaaggaatattggaaaccagaccactttcgtatttatatacggtttgcttgctctcgcctatcatgtcagctaaagcaacttgcgtgatgccgagctcttcgcgtctggctttgatacgttctcctttggtcaatttaattcacctcctgtttgacttcattatatcacgaaaaagttacaagtcaagaaaaaaatatcttgacaagttactttgcgcgtgctatactcaaggtaacctaaaaagatactaaaagaggtgatacaaaaaatgatccagactgacgaactgcgcggcatcattaccaagcgcaatatgtcgcaggcgagtgtagcaaaagctattggtattacgcctaaaacattctatgggaagatgaaaaaaggcgttttcggcagtgatgaaatcgataagatgatttcgctgcttaaaattcaaaacccagccgaaattttttttgcacgcgggtaactctaaaagataccgaattatggtaaagagtgagaggaggggaggaagtgaacttagacttgattgactcggtattaaatatgccgagtggagaggagaaagaaggtaaacattgaaaacttgtctgtggatacttatccttgttgcgatactctcaatcgttttgatcgggaaaggaaaaagagtggctatggctatttacagcgtcggtgtgatttgtctatttgtgcttgcgtatctcgcaattcacggctcatttgcctaagcgcatatacagcataattccaaggagactcgccgttgaaacacacgttgcgtacgccgagtaaagcttcttcggttttttcatcgcagagtattaaagcacggttaaggagcgaaatcaattttattcgatcatatccgttcccgttgctatctaccaagcgggataactcggatgctaaagctaaataagcctgctgcttttccgggtataccagtttcattttttcgattgatatatccaatttatggcggcggttttcgagcaagccagttacacagcttgttataaccggcgcaatgattgcagcgattgcagcaattaaagccaccaaagttgcactgtcgagttccatgattacacctactttcatttttttattattgtaacgtcaactcgacaaatttgcaacccgccccgcagccttgccccatgccgcccggaacttacctcccatgatttcattttgtttgcgccgaagtgattattttcttgtcattgaacgggcggcaggtgggagggctgcgggatatggacaaaccgacaccgcataaaaagaaaagaggtgattttcatgaaagaaacgaccgcgaagaaagcccctaaaatacgcaaggagcgcgacctcggcacgccgacggtgattgtacgatacttagacgagacgccggagcaggtggcgcagaaccgcagatgcgtggaagcggcgctggacatgatgtggcgcaaaacttatggcctgcatctgacaaactttgactggggcgagaagccggaaggttacggcaggacccgcgtgacccacccgaagatttagggcagcaccgcacaattgctgaggcaagcgctgtcgaatcacccatcaggcagga

SEQ ID NO: 3847 - DNA, 2857 bp, Unknown
  16S sequences of unknown bacteria
aaatccgtactgcgcacagatgcgctccaaaggtagcctgcggcagcatctgccctttccccctgcccccttccccggtgcggggaaggggggctctatcagcaatctctacataaaaatgcgtctgcggctccttataagcgtcgtcgcgtcggacgcaaccttcgcttaagtcggactgaccctacgctttgctccgggcagccctccccgctgcggtgcatcctcctttccccacaaggtcttacgaccttgcgggggccccgattatacggggtgtaccgacgcgtcggggtctcggggtcctccccgagtgacttttggttacttttcttcatagaaaagtacccccgccggggaggcgtacaaatgaataccttttgtaaaacttcgcgacgccgctaggcgagataaaaccatgttatcaaacgccccggcggcgagccgtaccggctatgcctttgcaaaaggccccgccccgccgaaggcgagatgaaactttggcataatttgtgtcatcaatccctccggctcatttcattcgccacctccctttacacaagggaggctttcgccgccaggcgaccacaaattcggccccaatatgatttgcgaaatatacaaataagcaagacgactaagggacagaccggacggcatatagtggagggtatggcgaaagggggaaagcgcgatgccgctgcaaaaatcgctgaaaaaggccggggaaacgctgcgggaagcggcagccgacctgctgccgccgatgcgggtggagctgctttccgaccgggaggccgtggtggatggctgccggggtattctggagtacaacgaatgctgcatccggctgtgtaccgggccgctgacggtgcgctttaccggggagggactgacgatgcggaactttggcagtctgggcgcggtggtagagggaaagatcaaatcggtggactttgggtaggatggcaaaagccaggggcttggtgcgtagggcgggccgcaggccaaaccgtccggaggacggtttcagcgggcgaagcccgctggccccggctgtgccggggcggcctgcggcccgcggcccggtctctgctgaaatgtgccgaggaaaaccgatctgccaaaagggggcggaaaaatgctgatgaaaaagctgatccggtactgccgggggacggtgcagtttaccgtagtggggccgtacccggagcgatttttgaacctgtgcagccaggggggcgtggggctgtggtcgacccgccgggtagaaaacggaataaccgcctgctgtgcccagtgccaccggccccggctggaatattacgcccaaaaaagcggctgtgccctggaaataggtcggtgcagcggcatgaaaaatacagcccgccgctaccggcggcgcaccggtttatggatcggggcgggactgctggtggtgggactgctggtcatgagccgctttgtgtggcgggtggaggtgcagggcaccgagcggctggaaccggaggtcattacagcggccctggcggaatatggggtgcgttccggggctttggccagcgggatagatgccaggacggtggagcggcaaatgcagatccgctttgaggaaattgcctggatcactgtgaatgtggagggcagccgggtcacggccatcatagaggagacggtgccgcccccggctgtggtagaggatggtattccgaccaatctcatcgcggcggaaaccgggtttatcaccaaagtggaggtgcaaaatggcaaccccgtggtaaaaccgggcgacagcgtgcaggccggggatctgctggtgagcggcataatggacaacaaggtgggagaaagccgtaccgcgcacgcgcgcgggcaggtgtatgcacaggtgcgcgcgaagctggaaatatttacaccatacgagcagagcgactatgtgctgcgggggatcgcccggcggcggtacctgaggatttttggggtggaggtgccattgcagataaagggcataccggatgggccgtaccgggtggagcatacggcaaaggaaccgcagggactgtgggcgctgctgccggtggcgctgcgggaggactgctatctgctgatgagagaggtgaaaaagaccgtgacgcaggaggaggcgatgcggcaggccgaaaaggcgctggcactgcgggagcaggactgggcggaggccaaaatcatcagccgggaggcggtggggaccgagagcccggagggctataccctgacggtggagtacctgctggagaagcagatagcagtggaggccccggtgcagacggaggaacggcagaaagcccccataccggaggggaaagcccggtaaagctgtggttggtattttattcagttttcaaggtgcaggtgggaggcaggttcccgcttaaggcagaccaccaaattgcccgatgaggtctgctgagaaattatagaccggcgcccctgtttgaccggtggggccgaaaggctctcgatttattgttcggggagagaggccgacgcgaaaagattttttgccggcgagaaaaagtcctttcactaatacggcaaaatcgtcccttttttgcagtccaaaggttaatatttcactttttttaatggaaagtttacagaactggggattgttgggcgagaattgcataaatagtggattttattgggggagtgaggctgggaattattgtacgaattgagggcgggtttgtgggcacctggcggcggggaggggccttttgcaaggctttgggagcacgcctacccggctgggggttactcttctatgaagaaaagcaggcaaaagatttttaggccaagctggtgatcgcctagc

SEQ ID NO: 3848 - DNA, 5854 bp, Unknown
  16S sequences of unknown bacteria
acaggcccatatctccgcccggagccggagttgtttcctttacgggaatatcacaaaccaagctttcggttgtcaacaacatcgaagcaacagacgccgcgttttgcactgcagaacgggatacctttgtcgggtttacgatcccgcgttccatcacgtcgcaatattcatcatgcagcgcatcgtagccatagccaaccttaccttcacgctggatgttttcgatgaccacagaaccctctacgccagcatttttcgcaatctggcgaatcggctcttccaaagcacgggctaccaacatcataccggtcttcatatcgccctcttctttttccgccgcagagcgaattgcctttaccgaagccaacagctctgtgccgccgccgggtaccatgccctcttcaacggccgccctcgttgctgccaaagcgtcctcaatacgcattttgctttctttcatttccacttcggtagctgcgccaacctggatcacagctacgccgccagccagctttgccaagcgttcttgcagtttctcacggtcataatccgaggtagtttcttcgatctgcgctttaatcgcattgatacggctcttgatttcttcagagctgcccgcaccttcaacaatggtcgtgttatccttgtccacgatcacctgacgagctgtacccagcatatccatcgtggtctctttgagatccatgccaagctcttcggaaatgactgttgcgcctgtcaaaattgcgatatcctgcagcatcgcctttctgcgatcaccaaagccgggcgcttttaccgcaacagcgttcagcgtgccgcgcattttgttcacgatcagggtagccaacgcttcgccctcaatatcatccgagatgatgaccagcttacggcccgcctgcacaaccttctccaaaatcggcagcagatcctggatcatggtgatcttcttatccgtaatcagcagcagcgcgttgtctaccaccgcttccatcttatccgtatccgttaccatgtaagcggaagcatagccacgatcaaactgcatgccttctacaacattcagctcagttttcatcgttttgctttcttccacggtgatgacgccgtcattgcccactttttccatcgcctcgctgatcagctcgccgattttttcatctgccgcagaaatagaggcaacctgtgcaatgctttgcttgccctggatcggcttgctgatggctttcagctcatctacacaaatatccacagccttttcaatgccgtattttaccatcatcgggtttgcgccggccgctacgtttttcaggccttcccgtaccattgcctgggccaaaatggtagccgttgtcgtaccgtcgcctgcaacatcgtttgtcttggtcgcaacttcgcgcacgagctgagcacccatattttcaaacggatcttctacttcaatttcttttgcaatggttacaccgtcattggtgatgagcggtgcgccatatttgcgttccagcacaacattacggcctttcgggcctactgtgatttttacagtatctgccaacgtgttaacgccgcgttccagcgcccttctggcatcttctccatatttgaattgctttgccattgtcttttacctccttaatcttccaccacagcgatgatatcgctctgacgcgtcaatacgaaatctccgccgtccaatttcaaatcggtgccggcatagcggcgataaataaccttctggccggctgttaagcacatcacgatctccttgccgtctaccatgccgccaggacctacggaaacaacctccgccatcatgggtttttctttggccgtgtcagggatgatgattccgccagtggaaaccttctcctgctcaatgggcttcaacaataccatgtctgccaacggtgttactttcattttggtctgcctcctataaaaattattgattcacacgctctctgttagcactcatttattacgagtgctaacacatttataatatagtcaactccaagcaaaatatcaagtctttttttacttttttttcatcgaaataagagtttttgtctactctgtctacaataaccagatttttcctaagtcatgcatcggttttctccgattttcagctatttacaaatttctcttgccaaccaacgaaaaatcagccaatataaaaggaaatagaaggagatgaaaccatggctaagtttgataaatgggatcatcggtttatcgagatggtaaatctggtagcccaatggtccagctgttttcaggaaaatcgaaaaattggagctgtcatcgttaaaaataagcgtgtgcttactaccggatacaacggagcacccgccaacacgcttagttgtgtggaaaagggagaatgcctgcgccgaaagctaaatattccctctggcacgcgccatgagctatgttatgccatccatgcagagcaaaacgccatcattcaggctgctaaaatgggcattgccattgagggcgctactttgtattgtacgcaccagccctgtgtcatctgttctaagatgatcgtgaacgcaggcattgtaagggtcgtgtatcagcatccttatcctgatgattttgcccgcgaaattctctccaccggcggcgttgtcacggagcattatcagcccgaagaggagcaataaaccaatggaaaaggccgcatgtgctgtcttgcccatcgccggcaggggggttgtcctgttgccattctttcatcaggggtaagcgcaagcggattccaatgcatatttggaggtataacagtgacggcctatacgtttcactatgattctcctttgggaggcatcacgttggcaagcgatggaacggccatcaccggattgtggttcgacggccaaaaatactttgcttgtacccttccctcgcagcatattgaaaaagatctgtctgttttccgtcaggcaataaactggctcgatatgtatttcggcggcaaagaacccgattttaccccgccactgtccataaaaggcactccgtttcgcaagcaggtttgggatattttgcttaccattccctatgggcatacgatgacctacggtgacatcgccgccaaaattactgtgcaaacaggcagccatatgtctgcacaggcagtgggcggcgccgtcggccataaccctatctctttgatcattccctgccatagggtcgttggaagccatggcagtctaacaggttatgctggcggcatagacaaaaaagcaaagctgctcgcgttagagcaggtagatatgtctgccttttttatcccgaaaacgggaacggcgctatataatcgttgatacgcgcataaatccgcattgtcacacgatttgacattcaatggaagacaaaaaaacagcacggcaaatcgctatgctgttttttatatagtcacatccatttggttttgcgtatgctttattttttaggctcgcttttttcttgagacggtttctgctcttcagtcgctttttggcgtatttgataaatgcgctgcatcagccctctggcagaatgctcctccaaagctttggcctcaacgccatccggcggcacaaaaccggcgtcctcaaagcaggtgccatcctcataataggttgtcacacgtcccatatcgccaagcacttgatgcatcgttcctgttgcccgcgacaaagaggacaattgttccttcatttcctccaacgctttttccatctcttgctgggatttctcatttttttcggccagcgtttcctccagctttcctacgcgttcccgctcttcatacaacagcttttccaaatcgcgaatgcggctttgtgcagaatacatcatctccgcagcatcctgatacccggcgcgcgctaccttcaattctaccgaagtgcggacattttcttctaccacctccgcaatcctctgttcatattgatttccgatttcatccagctttttttccagcgatacgatatattcgtctacctggctttttttatatccaaacaactgctttctaaagcaatggtgcatctgctatcctcctacctattcatgcctgatgggagatggtatgcgcctcaatcaaagcctgctttagctcgtagagctgctcggacaaatctaccttatatagatgcggctttgtcaagcgtttgtattcttcccacagcgtttgcatttcttgctttgcataagcacaaatatcctgcaggcaaggagaatgatacacctgtttgcccctcacaaaaacaggcaccagcaattccctcagcgtatagtttgttaagcgcagctttttccaggtatccacaggatcaaagatggtaagtggttttgtttcgtcatactgctcttcatccaagcaaatcaaatccgccaaggctttgtgcttggctttatcatagattcttaatacctttttataaccgggatttgtgatctttcctttattttctgaaagtttgatcttgggtatcatttccccgttcttttccagtgcggacaacttatatacaccgcccaaagacggcgcgttttggctggtgatcaatcgcgtgcctacaccccaggtatcgatcttggcgccttgggcccgcagatcgaaaatgacttcctcatccaaatcagacgaagccgtgattgtcgcatttgggaaccctgcttcatccagcatagctctggcctttttagataaataagccaaatctccagaatcgatgcgaatgcccaacggctcatgccccttggccctcagttctttgaaaacagtgatggcattgggaatgccctggcgaatggtatcgtaagtgtctaccaacagtaagcatgcatccggatacgtatccgcataggcgcggaacgcctccaactccgaatcaaagctcataacccagctatgtccatgcgttcccagcaccggaatatcaaacattttgcccgtcaaaacattggaagtccccacacagccgccaatcatcgccgccctggccccataaatgccagcatccggcccctgtgccctacgcagcccaaattccataacagtaccattttctcccgccgcataacaaacacggttggcttttgtcgcaatcagggtttggtgatttacaatggtcaacagcgccgtttccaccaactgcgcctgcataataggcgcttttacgcggattagcggctcgccaggaaataccggcgttccctccgggatagcatataagtcgcctgtaaaagaaaaatctttcaagtactccaaaaattcctgcgagaaaagatgcaagccgtctaggtaggcaatgtcctcttctgtaaacttgagatcgcggatatactctatggcttgctccaaccctgcaacgatcgcatagctgctgtttcctgtaggctcccggaaaaacagatcaaaaaccgcctcctcttttgcatttctcataaaatgcccatgcatcatcgtaagctggtaaagatctgtcatcatagtaagattgcgttgtgacatattgattaggcctcctgtgcaggttctttctccttgggttttaattgataacgctctggtacaccgggtcctccatatccttttctcttatgtacccgataaaacatgatccaagcaaaaactgcaatgacgacgctggcagcctgcgaaacgcggatggtgccaaaaatcatcagcgagaattccgaaatacgcataccctctagaatagcgcgtgctgaggcatacagcccacaatgcagccaaaataccgatccacgctccaagggccgctttttccaatacaacatcagaatcccgaacacgattaggttccaaacagactcgattaaaaac

SEQ ID NO: 3849 - DNA, 4988 bp, Unknown
  16S sequences of unknown bacteria
attcccgcttgtgcgtttttacttcttttaattcgtcgtgtatgaacgacaggcttatttgtttgttcatagatttattataccacttttttcacgttttttcaaggcccccgttttgtgcggtgttgccttaattctttatctgccattcttctctttccgtccttctgtcaaattgttctgtcataccgacggcatttcccatattcaagcctaacccgtggaacagaattggaaaaaccgcgcgatgaatctctttcgcagaagctgcgtcctgcatgatatatcaaaaataaattctcactgccgcagaaaccgtttaataggctcgctcaaagagtaccgtaggatcgttacgcgcttcgaaagctcgcttccggatttcttgccttcattcatttggcggctgcgctgctctggcttgcataattttgccttttaaaaaatagtataccatacctgcgtatatttttaatgtaaaaattattagaaaaataatactaatactattactattactcaagcaactatttcttttacaaatggcttatccataattgcaattcgcggataaaaaagaaagctccggattttgatataacgagcaaacggatctactaggcgcatatgccggaacgccccaccgtcaacgtggattttctgtccggtgaatacacgccggcgcaaattatccgttcacgccgaacagcccgtcgatggcgtccgcgaacggtctgatacatatgtttcaggactgcggaagcctcattgccgcgtctccgaagaccgccgcgggattcggggttgccgtaggagatgtgcacgataaagatcgaggaacatctcggcatagaaatcaagacgatctgccacggatatatcgagacaatattcccacatgagaacagcctctacggcttcgcagctcaggcggcgtggaagatgacgagcatacccacgtcctgcaatcagtatatcgttgaaaaaagacggaaagtaccagctcgcgctgaacagtgaaaaaatgtactggatagttgaaaagatggacaatcttttcaacaaatccgacagctcttacatctggacatcgatcacagactggaacgagacgcgggccggcatcatatatgaccacacacttttgagctcgcgccccataatgactccgctgtctacagaaagagcgaagttgacttcggtatacttcccttcccgaagtatgacaaaacacagaaggagtacatctcaattgactggcgcggactcatgtgtgttcagatcacgatcgaaagaaccgcttagcggaaaaggaaagagcgctgacttcgcgtcctgctatcagaaaaacgctccagaggttgaaaaacgctgaacgaacttatagagaagctctgataaagcgtgccacggcatcagcgcctcatgtgagacgaaacagaaaattatcgcacagggctgacgtttcatctcgtcagccctgtgcttttaggtgatttgtatttttaatatgggtcaagcgggcaaaatcccgtttttatgattgacatacggtcgatgatgtgataaaatctgtgtatacgggtcgcctggcgcaggcggcggaactctatatggggttatcgtatattaatgtcggaaggattctgacgtcaaatgaacaaattacctataaatctcaacgaaatgccaatcagcaaggtactgagtatcaagggaaacccaaagatactgaagcacccatcgaaggctgaaagatacatactcacgaaacccgtctggatcggcggagatgatctcattcacgtgatcttcatctcgtcgggcagcggtcagctcgcgatggacggcggggtacacgggatcagccccggaacgctcgtgcttcttgacgcggctgagcgaatgaagctgacgcccatctcgaccacggtggtctacgggtgctcattcttcccgagccttctcatggaaaacagcgacgccgccgacacgtcgatcatgagtctcagctctgacagattgcttgagcccttcttcgccgcttttgatcccgggctcaccgtctggcggatacaggcgcacaagacggacacctttctcggcattttcagcgatatgatccgggagactgagtctccgtccgggatacacgacggaatcatgcgcctgcgcgtagccgaactgctgctgagaatcccggaaacaatgcgaagcggtcatgaggagacagcggaatccggagacgacaccctgacacgcgagataacggcgtatctgaaagcaaattttgccaccaagataaacagcgacgacctcgcgagacatctctgcgtgagccgctcgaagatgttcaccgtctttaagaacgcgaccggcaaaacaatcggcaagtacatcgaggagcttcgcatcggaaaagccgccgatctgctcgccgggacaagcgacacggtctacagcgtaatgacggcggtcggctacaaggacatgaagatgttctgccgccgcttcagggaatacatgaactccactccgtccgaataccgcaaaagagcgtcgggcagggaaacaaaatctcaggaactctgatatcaaggatgcaatttatggaaaacaagaattacaaaacctactgtaacccgctgtcaatcccgtcaatcccccgcgggaccgacgggtggcagataatggatttcaccggagaggaaccgtccgactaccgctcgatcagcgacccgtcggtcctctatgagaacggcagatggtatctctacccgagctacggcatggcgtatgtctcgaacgatttcacaaactggaagcatatccgcacaacgccgtacgatatgaaatacagcccggtcgtcgtgccgttccgcgggagatatcttatgacgtcgcattcgcacgggctgtacgtgtcggattcaccgctgggggattttgagtatacaggggacttcattctgccggacgggaagccgtttcgtccggtcgacccggctcttttcgtcgatgacgacggcagactttatctctatttcttcatgatggagaaaagtcagcacaagcgcgcgtttataagcggctcctgcggtgtcgagctcgacggcgacgacccgagaagaatgaaagacgaacccgtaatcctgtcgcgctttgacaggaggaatgtctgggagcgcttcggtgagcacaatcaggacacgctgtgcggctgggtcgagggacagtggatgttcaaacggaacggcagatactatctcatctacgcgtcctccggaaccgagtacacaaactactgcatggcggcgtactattcagataaaggaccgctcggggggttcgtgcttcagaagaacaacccggtgacgataagccgctcaaagctcatatccggcgcggggcacggatgcgtcaccgagggaccggacggaactatctgggcgttctatacgatcgcggtcgcctgcgcgcatctttacgaaaggctcatcggcatggaccttctcgcgataaacggcgagggcgagctttacgcgccgcacggcgtgaccgatactccgcagtacgcccccggagtcagctcttcaccggaggtctcgaacgccacgggaatgctgccgctcaccgagagacagcgcgcgatggtcagggtatcctcccacacagaggggagggagggattttacgcgctcgacgggaccctcacaaccttctggcgcccggcggacgatgatgaaacgcctgtcatgacggtcaatcttcaggcgccgtatcttgtcggcgcggcgcggataatctggcgggacatcgggcttgactatgacggcggggctgttcccggaccaatcaggttcatactggagggcagacccgacaacgacatcgacaaatggataacgctggtcgacgcgtcggacaacgacaccgagctgcacgtggattacagggagatcaaacccgtctcctgcgagagcgtcagactgcgaatatgcggtcatccggaaggtcttcgccccggcgttaccgacttcactgtgttcggcgtcagggacgagagcgtctgaggcggtggataatgaacgaaaacaggatatttgaaatgagccgcgccggtgtcctcccggacacgacggctgactgcaccgacaggataggcgctgtgctcgcggaaaacgaggagaatgtcacatatctctttgagaagggagtatatcgcttccacgcctcgaacggtcttatccgggagtattcgctctcgaacacggacggcgcgcagtatgagcgcaccctttccctgcttataaaggaccggaagaacataacaatcgacgggggcggagcgacattcgtgttctacgggcatctacagccgttcaccatagacggatgcgaaaatataacgttgaaaaacctcgtgatagactgggaaaagccgctcgtgtcggaaggagaaatcgtcggcagaagcgcggatttcatagacgtcaggataaatcagaacctgttcccgtgccgtgtccgggactacagcatgtacttcgacataggcgacggagaagaatccgagctgacctacggcgaccacacgatctataacccggatactcttaaagtaaccccgcggagcagcgacattgtgaaagtcaagagcgtcgaggctctgtctgacgacaccttccgtctgtacaccgatgatatactgccgcctggctctccgccgcgcgtcggggatcttatcgtcctcagacacaacaagcatatacattccggtattttcgcggagaacagcaccggaatcatctgtgagaacctgactctgtattcctgcggggagggactgctgttccagttctgccgcgacgtcacctgccgtaacataacgatcgcgccgaaccgcggtatcgggcggaagatcgcctgctcgcgcgactacggcatacaggtctccggctgcggcggggcgcagccggagacctgta

SEQ ID NO: 3850 - DNA, 32759 bp, Unknown
  16S sequences of unknown bacteria
aacatatgtttttatgtacagaagcgatttatcgtctgatccagtcgtatcgctgcactgcgctgctctgtactgcgacgcagccgggaacgaaacgtttttttcacgagatgacatgtcgtgagattatcgaagatacagaaaagttgttcgagcagcttaaaagagtctcctatcacgaaatcggacgcatagaggaagaagagctcgatgtacggctgaataaacacaggcaagttctctgtatcgtaaatacaagaaaaaaagcgcttgttttgttatgcagtctgctcctgcggcttggtcgccctccgtgaggagggcgtggattgaaatccaccaagggacatagtcaaaatacctctcagctcaagtcgccctccgtgaggagggcgtggattgaaatcccatatgcttggaagctttgtatatccacttccagtcgccctccgtgaggagggcgtggattgaaataagtgccgtacctccttacaattatattatacgcgtcgccctccgtgaggagggcgtggattgaaattatgagcgagggcgtgaggtagaaaaaggtggatggagtcgccctccgtgaggagggcgtggattgaaatgtcctttggcagaaaagtgatacaggacgcgctgtcgccctccgtgaggagggcgtggattgaaatgtatttgaagtgtcgttatatgtctgatcggttgtgtcgccctccgtgaggagggcgtggattgaaatctatcgacggactcgcggaatcgatcaatgagacggtcgccctccgtgaggagggcgtggattgaaataaggggaacgtggagaaaaaggcgatactggtcctgtcgccctccgtgaggagggcgtggattgaaatttccacataatttgctacggccaagggcggcacgcgtcgccctccgtgaggagggcgtggattgaaatcggattgattagattatacagtttgtcctgattagtcgccctccgtgaggagggcgtggattgaaatgcgccggggttgtcgttgccgtaaccttccaaaaggtcgccctccgcgaggagggcgtagattgaaataatctgacaaaacggcagcttatttgttttgacacaacttatggcgaaaaatattgaatagacaagataaaattgagaacatatagacacttttataggaatggtaattaaatagtggagttggatttgacggtaaggtttcgactaattttattaggcattgaaataatcatgttatcggttgaaaatgcagcaattatggagattgaataattattttctgaattagtacataatcttaattaatttaaaaaacttgatgttttctctgtatagggttataataaaaaacatatataattgattttatttaataaactcattactgacttgagaatcgtatgatttgtatagcatttgggcgtttatgttgatccgatgttttcagttttatttgaaatagtgtagaatctaatgatagtttcagagatcgtttccgtgcaaagagtacggatctttagaacggtatctaaaagtatgtatcctgacctgttccgcccgttaattttacagtgagaattccaaattatttatctgcggcatataaactaagaaaaaaatcataaaatctccttcatctcctcaaatttcttttatcctccactcatctttatcgtctaaattagacagtagttcgggagggggtccggggtgaaattgtaacatcgtgtcagaatatcacgaacgatttcaccttgcggaattccggacgatgtagaaagatagaatgggtagtggagaaaggatttgattttaatatgacatatgaagaattttacggggctgattaccgaaggctgaaggctgcggaggcccatctgacacagagtattttaaaatatcagtgttttttagaggagcagaatgactatcctgtgatcgagttctgcagatccagaattaaatcgccggagagcatggcggcgaaattgaggaaacggggatttccggtgactccggaagcggcgctgacaaaagtcaacgacgcgctgggagtacagattgtgtgcgcttttttcgatgatatctatcgaacagcgtcctggctgaggcatcatccggattttcacgtgctgcagataaaagactatatcgcacatccgaagagcagcggctaccgcagctatcatgtgattttggaaattctcagcggagaaggaaagggaatgaaggcagaagtgcagatccggacagtagctttggatttctgggcggatctggaacatcagctgcagtataaaaggcagaacggcgccggtaaaccgccggcagcggctttgaaacagtgcgcggaagatctgatttcagcagatctgtcggtacagtcgatacgaaaccggattatcagagattttaaaaccggaccgcgggggcgcgctgtgtatccgtcaatgcgataaaaaatttttagaaaggcagatttctccggagacggtgagtctgcctttttcggcgtttttcttcttaacggtttgcgtatattgttacaaatgcactttacagatgagagcggatcatatattatattttaagaaaaacactatatatagttggtgcatggaatatatataacaatataccgaggtgccgcccttttacagggatgcggcgctgcggaaaattctaaacgaatatcgcagcggctttttcccggggagcagagggcgatattgttacagggtaagaaagtttaagaagggaagcggaaaaagatgggtcagatcagacagataattaagagagacggacgtcatgtcccgtttgatcaaacgaagattacgaatgcgatttacgcggcggctaccgtacttggaggtcaggacagaagcacggcggagcagctttcagcggatatcgtggcttatctgacagatgagcagcagattgcggaacctaccgtggaacaagtgcaggatgcggtggaaaagattctcatcgaaaaaggtcacgcccgtacggcgaaagaatatattctctaccgcgcggagcggacccgcatccgaaatatgaatacgaaactgatgaaaatttacgaggatctcactttccgcgatgcggcagagaacgatatcaagcgcgaaaatgccaatatcgacggggatacggccatggggactatgctgaagtacggatcggaaggggcgaagcagttctatgagatgtacgttctcgatccgaagcatgcggaggcgcatatcactggagacattcacatccacgatctggattttctcacgctgacgacgacctgctgccagatcgacctgaaaaaactgtttgagggcggattttccaccgggcacgggttcatcagggaaccgaagcatattcagacctattcggcgctggcctgcattgccattcagagtaatcagaacgatcagcacggcgggcagagtattcccgatttcgattacgctatggcgccgggagtgcgcaagacgtaccgcagtctctatattcagaatctgggaaagatgatcaatctcttaaaggacatcgaagacggagaagagatcgccggctctgttttgaaacagatcgaaaaggagaagggggcagttccttccatggccgacgaatcggattacatcgctgtggaaagggaatatctcaaggaatatctgaaagaggacgagatcgaaaaagtccagcgctatgcgaaaaaatatgcggataaggagatcgagagatcgacgtatcaggcgatggaggcgttggttcataacctgaataccatgcattcaagagcgggagcgcagattcctttttcttctattaattacggtacagatacttctccggaaggccgtcttgtgatggaatgtgtgctgaaggctacggaggccgggctgggcggtggagagacaccgatcttcccgattcatatttttaaagtaaaagagggagtcaattacaatccggaagatccgaattacgatctgttccgtctcgcctgcagggtttcggcgaagcgtcttttcccgaatttttcctttatagacgctccgtttaatctgcagtattacgatccgaaagaccataatacagaagtggcgtacatgggctgcagaacccgggtcgtggccaataattacgatccaggacgtcagacgacgtcgggaagaggaaatctcagtttcacttctgtaaatctgccgagaatcgctatcaaagccaagggagatctggatattttctttgaggatcttgaccgtaaaatctctctcgtcgtcgatcagctgttagatcgatttaagattcaggcggccaaaaaggtaaagaattatccgtttctgatgggtcaggggatctggctggattctgagaaactggggccgaacgacgaggtgggggaagtgctgaaacacggtacgctgacgatcggctttatcggtctggccgaatgtctgaaagctctgatcggaacgcatcacggggaatccgaggaagcacagaatctgggactggatatcatcggatatatgagaaagcgggtagacgacgcctgtaagaaaacaggactgaatttctctctgatcgctacgcctgccgaggggctttccggtcgttttgtaaaaatcgaccgggaaaaatacggtgaaataccgggagttacagatcgggaatattataccaattcttttcatattcctgtgtattataacatcagcgcattcgataaaatcaagctggaagcgccgtatcacgcgctgaccaacggcggccatatttcatacatcgaactggacggagatccgctgaaaaatctggatgcattcgaagctgtggtgcggtgtatgaaggaaagcggcatcggttacggttccatcaatcatccggtggaccgcgatcctgtctgcggttttacaggaatcatcgacaacgagtgcccgcactgccatcggaccgaagaagacggtcagggcgatttcgagagaatccgccgcatcaccgggtatctggtgggtacggtagaccgcttcaataacgcgaagcgtgcagaagtggaagatcgtgtgaaacactctgtcatgcgttctcagaattagatttatgtgactgggctgacgctgtcgggagaggatgtcagcaaactgacggaaaatgatacgtcggcagcggagaaacagaaagagaaaataggattcagcgtcgggattctcctgcgctgtagcgaaccctccgcggtttctgaaagagcagatagatctccattgccccgattggagacgcggaggaagaagacgggcgtcgcttatttgaaaagcgccgcccgtctttgcgtgtgtggacatatctgtattctgcggcgaaagaaccggagggatgcggaaaagtgacaggggattgccttattgccggaagaaaaaacgaagacgaagctgcatccggatatgataagataaaagaaaaacggcgggaacagtcacggaaaagccggtgttttttccataaaaaaaggcggcagaaaggcggaagaaaatgaaggtcagaaaaatttacgcggtgtattttagtgcgacgggaacgacggagaaaacggtgtgtcgcgcgtcgcaggcggcggttcggaccgttttttcgccgtctggggattttgacaggaacgaagcatacaaaaaagccgccgacacggaaagaccgtgcccgtgttcacagaagacaaccggcggagttcagaatgggaaaaatagtttcgaaaactcgcctgcagcgccggtaaaaatctgttttaactctccggattttcggcggagaaatctgtctttcaaacggggagatctcgtttttttcggcgttcctgtctatgcgggcagggtgcccaaccttctgttgccgtatctcagagaattcatcagcggaggcggagccgccgctgtacccatcgtatcgtacgggaatcgaaattttgacgatgcactgaaagaactggcgcagcttttagagagagccggcttttttacagcggcgggaggcgcttttgtcggagaacatgccttttcggaaattctgggagcgggccggccggatgcggaggatctggatctggccgaccggctggggattgccgctgtgaaaaaggtctcatcggaaaactggccgcggcagcctcatgtccctgtgaaagtaccgggagaggaacctctccgtccgtattatgtgccgagagaccggaggggaaatcatataaatatcctgaaagtaaagccgaagacggatcggaaccggtgtaccggctgcggactgtgcgcgtcgctctgtccgctgagttccatcgattcgggggaaccttctcttataacagggatctgcatgaaatgcggcgcctgtattaaaaagtgcccgaaacgggcgaaatttatcgacgatcccggatacctctatcatagaacagagttggaagaagtctatgcgagaagaagcggcagccggatttatatttaaatcttcggcagcttccaaccgggaagagtctccgacagcgttgctctgttttatggtgcagaagcgttttttttcttccggaagcgcagataatagagaagccctgccagatctgcgagaaaccagccgatagggacagaagcccagatgcctgtgacaccgacagacggcaccgctgacagagtgtaggcgagaacgactctcgtgcccagtgagatgacagtcaggatcagcgacatggagggcttttccacagcgcggtaaaaaccgtaccacaggaaaagaattccgatgagcagatagaatgccccttcgatgcgaagataagagacgccggcggcgataatttcagtctctgtctgctgaacaaagagtcccatcagaggtgcggcaaagaggaataccagggcgctgaccagcaggctgaagagcgcggtgaccgtaaccgcgctgcggataccttttctgatccggtcctcttttttcgctccgtaattctgagcggcaaatgtggagaaggcgttgccgaaatcctgcaccggcatataggcgaaggaatcgatttttaccgcggcggcgaaagccgccatgacgacgggaccgaaactgttgacgattccctgaaccatcagaatgccgaggttcatcacagactgctgcaggcaggtgagtacggagaaaccggagatctcagcggctgcggaccgctgccatctcatctgttttcgggaaggcatgagctccggaaaacgtttcagagcgtagactgcgataccagcagccgagacgatctgtgccagtacagtagctgccgccgctcctctgacgccgaaaggcagaaagacgacaaagaggatatccagcaccacgttcagaatcgatgagaccgccagaaagatcagcggcgatgcggaattgccgatggaacgcagcaacgctgtgaaaaaattgtatacgaaaacggcagggattcccagaaaaatgattttcagatactgacgcatgggcggcaatacctccggagggacgttcagcagattcatgatgcagtcggtgcccagaaaggcgagaattgtcagcagaagcgtcagcgcggaaatcagtgtaaaagagtgaaagatacctgacttgagtttgtcactgtccttcgcgccgaaactgatggaaaaactgacgccgctgcccatacacaggccgatgagcacagaggtgagaaagaccatcagcgtgtaggcggaacctactgccgccagcgcgtcgcgtcccagtacccgtccgacgatcagcgtgtctgctatattataaaattgctgcagcagattgcccgccgtcatcggcagagcgaaaagcagcagcgaagatgtgatttttccctgtgtgagatctcgtttcataccttatataccccagatttccggatggatgatttttctgtctgcaataaatcatagcaatgcggttttctaagatcttatcatatctcatctgtcgagaattcgcaatgtgtcgcgggatttgcgttttattgtctcttattctcagggaaaattctgttaaatttatagaaatgatgcaaatgcaacagaattttagacgaaaagatatataatgatattgaaagaaactatgttagacaatattttaatgaggaacaggataccgctgtatccgccggggcggaaagcggcggaggtatcgtcgtgatacccgttgtccggaatttcggcggcaggccgcagtctggtgtgttatccggaaatgggactttccgcgggaaggggcaggcagtcccggattttaacagtatagattttgtgaaaccgcagatctgcggattttgcggtatttcacgggaagataagcgggccggggcttcaggagctttttcggccggagggattttgcggaagccgtccggcagaggcacaggagcggtaaaacggccggagaagaaaggagtatagtcttatggattacaagaagctgaatgacagtctgtattggacaggggttctggacaaagatctccgcgtattcgacattatcatgtacacggaattcggtacgacgtacaattcctatgttttaaagggaagtgagaagaccgccctgtttgagagcgcgaaggcgaaattcttcgacgattatctggagacattaacccagattacgccgatcgaggatatcgaatatatcatcgtggatcacacggagccggatcatgcgggcagcgtggagaaactgctggaaatcaatccaacgatcaaagttgtgggttccgctacggcgatcaccttccttcagcatatcgtcaacagagatttctattctgtagtggtggatgatggagatactctcagtctgggtgataagacgatccgtttttactcagtgccgagtcttcactggccggatacgatctactcctatatcgaggaggacggcgttctcgtgacctgcgattccttcggttcccactatgctcatgacggaattctccggagtacggttaccgattacgaagggtatatgagagcgacaaaatattattttgacaacattctcggcccgtttaaacagcctcatatggcaaacgcgctgaagctggtgagagaagaactgaagcctgtgatgatttgtccgggacatggtcctgtgctggacagtgatctggaagatctctatgagaagtatgaggaatggtgcggacagccggcggaaaatcagccgaagaaagtagtgattccttatgtcagcgcttatggatatacggcacagttagcggaaaagatcgccgaaggcgtgagatctgccggggattttgaagtgaagctgtacgatatggtgaccgcttcgaaagatgaggttctcggagaaattgccggagcggacggaatcctcttcgggacaccgacgatccttcaggaagcgctcaatccgatctgggatctgaccatcaacatgtatcctccggtgcataacggaaaatatgcggcggctttcggaagctacggctggagcggcgaagcggtgcctcatctcaccgaacgtctgaagcagctgggtctgaaagtgatggaaggtctgagagtgagactcaagcccgatgaaagagatctgatcgacgcttacgatttcggctgcggcttcggttactttatgcaggaaaaagaacctctcaaagccatcgaaggcacaggattcgtgaagtgcatggtctgcggcgccgttttcgacgcatctgtcactatctgcccgacctgcggcgtaggggcggaaaactttgtgccggtacaggtcaatgacgtaacatacagcaacgacaccgaaaaccgttatgtcattctcggtgcgggtaccgcggcgctcagtgcggccaccgccatcagagaaagagacgcttccggttcgatcctcatgatttccgaagaagcggagctgccgtataaccgtccgatgctgacgaaaaatatgtttgcgggtccggagccgaaagtcttcacgattcacgataaagcctggtacgaggaacagcggatcgagctgatattcggaaagaagatcgtatctctggatccttccgcgaagaaggtcgtcatggaggacggtcaggtttatgaatatgacaagtgcatctatgctctcggttctcatttcttcgttcctccgtttgaaggacatcaggatgagagagtgacgacgatccgcactctaacggacatcgccaaggcggcggaattcctgaaagacggtaagcaggctgtggtcatcggaggcggtgtcgtcggtctggaagcagcctgggaactgaaaaaatatcagtgtgacgtaacgattctcgaggcgatgccgtcactgatgtcaaataaactggattcctccgcatctcatatgcttcaggagatctttgaggcaaacggcatccgcattctggcgggcgcttctacaaagaagtttgaagacagaaagatctatcttgaagacggtactgtgattccggcggatctggtggtagtatcctgcggcgttcgcgccaacagcgcgattgcagcggatgcgggagtggaaatcggcagagcgattctcgtcaacgacaggatggagacgaatattccggatctgtatgcggcgggcgattgtgtggaatttgaaggcatgaactatgcgctgtggccggaagcgacagatcagggagagaccgcaggtgcgaatgcctgcggcgacgaagcgcactaccagtctcagatcttcggcatgacgatgcatgtggcgaatacagaactctacgccatcggaaaaacggcgggtgcagaaccgttccgtacggtggaattcagggatccggtgagaaatacgctgaagaagtatttcttcctgaacaatattctctgcggcgtgacactcatcggagatacgagggatatgattaaagttacggatcaggtgaaccgaaagacaccttttaacgaaattttctgagaacggagcgattctcctttccccggtgattagagcgcggggggatagcggtgatgaaaaatcgcttttcagagccggcggcgttttttctccgcaggcgaaataaaaaattgtggcagcgtgcctttagacccggcggtttgcaggatagatgcagtccgggcttagccggcgctgtatgcatactctgaacaaacaggtctgacggcgtttcgctgtaagtggaatgcttgaacagaggcagaaatgatacggtgaaaaagcggtgaaatctctcgaagaggtttcaccgtttttcgcgcattgttctcagataagatctgaaaagagatccgaagaagggaaaaattatttcccgcggttccgtgatcaaattgaatcctgtccgtcagcaggatataatagatttgatggctgtgcagaacaatcaaagggccgaggactcggatccgggagaacgtcagaggaacagaatctctgatgcgggcaggcagcttttacgagagcagcccggtctgcggaaaggaagagaatgatgggaaacgaaattgagctgaaaatcgcaggagtcatagatgaatccatcgtggacgggccgggaatccgctatgtcgtcttcgtacagggctgtccgcatcactgtgagggctgtcataatccgcagacacatgatttctcaggcggacagaccgccgatatcccggggattctcggggagatcgaccgggaccccatgatttccggcgtgactttcagcggaggagaacctttctgccaggcgcggcagctctgtgctctggcggatgaaatcaaacgcagaaaaaaggatctgttgatttattccggatatacttatgaacagctgacggaaatggcggagggggatcaggcggtggcgcatctgctgaatacggcagaccgtctgatcgacggtcctttcctcatggaacagagagatctggagcttcctttccggggaagccggaatcagagatacatcgatttggcccgatcccgggcagcgggagaggtcgtgccggcggatgaacagatataaattcagagacggcaggcagcttcgctgcgggtacaccacgggaacctgtgccgcagcggcggcggaggctgcagccggatttctgctgacgggaaaaaagacgccgtctgtttcgatccttcttcctgcgggtagtacggcggagctttccgtggaattttccgaactggaatacggggaagaattccagttcgcggcagccggggcaagtctgccggccgacgccgaacagaaccggaaaatttttaacggcgtttcgccggctttccgttccgccgggaaaattacgggcagtaccggagcgagatggaattccaatgcggagaaacgtgcgatggcggctgtctgcggcgtgagaaaagacgcgggagatgacgcggatatcaccgacgggatgctgatctgtgccagagtgcgactgacggaccggaattttttcgcaggagaagagagaacgtctttttcgcaggaagagaaagacggcatttttatcaccggcggtgacggcgtcggccgggtgacgaagccgggattggatcagccggtgggagcggcagcggtcaataccgtcccgcggcgcatgatatccgacgcggtgaagaagatctgtgacagagaaggttacgacggtatggttttcgtggaaatttttgttcccgggggcgcggaggcggcgaaaaagacgtttaatcctcttctgggaatcgaggggggaatctcgattctgggaaccagcggaattgtggagccgatgagcgacagcgctgtcgtcgaaaccatccgggcggagatccgtgtgaaagcgcgggaaagaggaaattttccggaaaaagcagctgaatttcccgtttgtctggcggccgtaccggggaattacgggatgaaattcgcctgtgaagaactggcaatttcggaagacaggatcgtaaagtgcagcaattttatcggcgatatgctgaatgcctgctgggaataccggctttccggaattcttctcatcggcaatgccggcaagctgatcaagctgacctccggcgtgatgaacacccattcttctcacgcagatgccagaatcgagacggtgatcgcctgcagtctggcggcgggagcgtctttggatctcctgcggcagatcagcggatgcgtgacgacagaagcggcgttttctcttttgtataaagaagggcttgcacagaaaacgatggatatcgcggctgagcgtgcggcggctcatatggcgcgccgtgtgagagatcagctgaaaacaggagttattctcttttcttcctcctccggaatcgcctctttcggaggggcggcaaaggggcttttggaagaactgagaaagcgggaaaggaacagatagaatgtcagcagcaatcgtacattttgtgggcgcgggaagcggcgcgccggatctgatcaccgtcaggggcatgcgtttgcttcaggaagcgaaagtcatcgtctatgccggatctctggttaatccgcagctgctgcagtacgccccgaaagactgtgaaattcacgacagcgcttatctccacttggatcaggtgatcgatattctcagccgttctgcgaaacggggacagaataccgtgcgcctgcataccggcgacccgtcgatttacggggccgtacgcgagcagatcgatcggctggcgcagttaggcatcgacagcgacgtgtgtccgggagtcagcagttttcagggcgcggcggccagtctgaaagcggaatatacgcttcccggagtgtcgcagacggtgattctcacgcgcctcgaaggcaggacaccggtgccggatagagagaatttgcgggagcttgcagcccatggcgcatcgatggcggtatttctaagcatttcgatggcggatcggctgcaggaagaactgctggcctccgggggttatgatgaggatacgccctgtgcggtggtatataaggctacgtggaaggaagaaaagaaatttgtcacgcggctgggagagctggcggagacagtgaaaagtaacgatatcacgaaaacggcgatcctgctgatcggcggttttctcggcggagaatacagtctgtcgaagttatacgacaggacgtttaccacagaattcagaaagggacaggaggcatgtgtcagacaggagcccggcaaaataaaataacgccggaaagaaaatgcggcggacgcgatgtgatttacgctgtatcggtggcgtttaccgacagaggcaaacttctgagccgaaaagctgaggatgcctgccggagacgggcggaccgggaaattctgtggagagatctgacggagatcgatgaagaaacgtttcggaatgcggacgtgattttctttttctgcgcctccgggatcgctgtgcgaaaaattgcgccgtttctcgcagacaaaacatcggatccggccgttctggtcatcggagaggagggaagctatgtgatctctctcctgtccggtcatctgggcggagcaaaccgctggacgcgggagatcgcgggtattttgggcgcgcagcctgtcatcaccactgcgaccgacggaaggaaactgccttccatcgatctctgggcttcaaaatgcggattgtcgatagacgatataaagctggcgaagcgggtgacggcgtatctgctgaaggagaacagtaaatccggcagtttggaaactgcggattttccttatcttttcgatcagccggattcccgctgttcgtccgcggaggcgagtcttctgccggctgccgccggaaagatcgcctctgccttgagaaacgaaagagtcggagaggaagtctcctcttcgggttttcctgacaaagaatacggcagggcgggagaaagagcgcaatacgccatctgcattacagagaatcttcagctgttctgcggcgaaaatactctgattctgcggccgaaacgctgcgtcctgggagtcggatgccgccggggtacagatgcgggaaagatgagagaatttatctttgagttcctgaaacagagcgggatcgatccccggctggtcgaacggatctgttccatcgaccggaaaaaagacgaggcttgtataaaaacagcggcgcgcgcgctgaatgttccttttaccgtattttcggcggaggagctcgcagctgtgccgggcagtttcagcaggtcggattttgtagaagagaccgtgggaatcgacaatgtctgcgagcgggccgcggtctgcggcgccggtccggagagccggctgatcgtgaaaaagacgattgctgacggtatgacggcggccgctgctctgcggccgcctctgacggaggacgctctgattctgacaccggaagaatggctgaagacagcgtcggggcagatcgaagatattgaaagttaagcggcagaacgatggaatttacttatgtatagtgtatcgctgttttacgatttagctttggcgggcatcgtcgtattcagggaaaacacgcagtaagacgcagtatattatctgactgcgaagaatcaaaatatgcagaaaaatatccggctgtaagccagacggaaagacgatattattttgtggcggacggaacggcgggcgtatccgggacaggggtctcgcagaccggaaaaagtgggattcagcggcgcgcaggcagaacaaacgccggcagatcagatagaacgaaagacagaagagagatgcgtattatggaaaaagagagaaaaggagaacgggaaaaagcggcggcaggcagagacaggaaaagcccgtacacggcgaatgccgcagattcggagcaaaaggaaacgatcttctgcgcagcggcggaagaaaaaccggagacagaagaaacccgtttctgtgcggagagaaccggaggaacgggattaaaagaaaagactccggatacggcaaaaggaggaaatgcggcggaagcagcggctttgtccgaggaacggaagggcgtcgatctgggaacgggaagcacaggccgtctgatgctgcggctggccgttcccgcggttacggctcagttcgtgagtatgctgtataatatcgtagaccgcatttatatcggacatattccggaagcggggtctgcgccgctgaccggcgtgggactttgttttcctctgattacgctggtgatggcattttcctctctcgtctgcgcaggcggagcgccgcgggttgctatccgcatgggacagaaagacgacggcggagcggagcggattcttgggaactgtttcagctgtctgcttctgaccgctgtgatcatcacggcggtatatgagatggcggcggaacctctgctgaatcttttcggcggaagcgaaaataccctcccctacgcggtaagctatatgcgcatctattctgtagggacgatttttgtcatgatttcgctgggcatgaatctgtttctcatgtctcagggattttccggcatgagcatgctgacgacattgatcggtgcagtgctcaatatccttttggacccgctgtttatctttgtctttgatatgggcgtggaaggcgcggcggtggcgactgtcatcagccaggcggcgagcgctctatgggtacttttattcctgacgggaaagcggacgaaactgcgtctgaataagacaaatctgagactgcgcaaagaaatcatcctgccttgcctggctctgggtctgtctccttttgtcatgcagagcacggagagtctcctgaatatctgttttaatgtcagtctgatgaaatatggaggagatctggcggtgggcgcgatgacgattatcgccagtacggcgcagctgctggcggtgcctatgatcggaatctgccagggcggtcagccgatcatcagctataatttcggcgcgggaaaaaatcagagagtaaagaaagtggtaaaatgtcaggtagccgcctgttttctgtatgcggcgtttttcttcggaatcgctatgctgataccggcggtgatggcagggatgttttccggagaccgggaactggtggattatacggtgcgctttatgcggatttatcatacgggggctttcatgatcggtgttcagatcggatgtcagcaggcatttatggctctgggacaggcgaagatcagtcttcttatggcatgtctcaggaaactgattcttctgattcctctgatctttattctccccgtatttttacaggacgatgtcacggctgtatttctggcggaaccggtgagcgacgtgcttgcggcgctggtaaccggcatactgtttttctcaaaacttccgtcgattttgaagaaaggtccttctgggcagggaggagtttaggataatttcatgaataaattatacatcgccggcatcgggcccggcggaccggaatatatgacacgaaaagcataccgcatcctgcaggaggcagatctgatcgtgggttatacattatacaacgacttgcttcgccgggagtttccggataaaacatattattccacagccatgaccggtgagcgggaacggtgcctgtacgctcttcgtgccgcggaggcgggacgaaaggcagtggtggtatgcagcggcgacagcggggtctacggtatggcttctctggtgctggaactggcggaagaacggggatttgacgtggagatcgaagctgttccgggtgttacagcagcgctgggcgccggtgcactggccggcgcggcggtttccggagattttgcagcggtgagtctcagcgatcttctgactccctggaacgtgatcgaaaagcggcttcggacggcggcttccggtgatttcgtcatcgctttatataatcccggttccagaaagaggcgggatcatctgaaaagagcctgcgaagtcatcggacagttccgggcttgggacaccgtgtgcgctgtcgcggagcggatcggcagagagggcgagaatgtgagatttctttcactggaacagttatcgtcggcagaagcggacatgtttatgacgattctcatcggaaattcttccactcgcatggtccggctgagcggcggcgcggaaaaaatggtgactccccggggataccggatcggtgagccggcggacctttggaaaaaggagagcctgccggaaagaaaaaatgccgggagagaacgtatcgtaattttcggaggtacgacggaggggcggcagctgacggaatttgcctgtgagaaaggagtgccggtatttctgtgtgtagcgacggcatacggagaacggatggtgaagcctcatcctcttttagaggtgaattccgcgggtctgggacagaaagagatcgaagagctgctcacggattcccgcattctcgctgtgctggacgctactcatccttatgccgcggagatcaccgaaaagacagcggccgcctgtcggaaaaccggccgcaggtatcttcggattctgcggaatgtcttcgaaggaggagcagatcaggctggagaaagaaccttttctgaaaacggaaatcaggcggaaggagaggtttttttcgccggaagtatacggcaggcggctgattttctggatcgcgtgcagggacgagccctgatcaccacaggttcgaaggaagcggcggaatacatgaagataaaagacgccgaagagcggctgacgttccgggttcttccctcaagggaagcgctggcggcctgtgaggcggcgggaatttccggaaagaatctgatctgcatgcagggacctttttccgcggagatgaatgcctgtatgatgcgggaatgcggcgcgtcttatctggtgacgaaaatttcaggaaaaaacggaggctttgaggagaaaatcgaagctgcgcgcagagtcggagcgcgcgtaatcgccgtactgccgccggagagccgcagcggaatttccatgcgcgatgcggaagatgtcatctgccgtattgcagaggaactgaacagggcgaagaaatctgccggaagaaattcgggccggccgaagcattttccggggctgtaaaaggcggagcggtctgaaaaacggcgggaagaagtatcgaagcggagggaggagacggaggataagaatgaagtacagcaaagagacagccggaaaaatgatgccggaacgattcgcaccgggtggttccgtgacgattgcaggaatcggtccggggcatccggatatgatgacagaagctcttcgccgggcctttttgagagcggacacggtgatcggcgcggcgcggatgattgaagaactgaagaggatcccggcggcagaggggatgaaaaacggcccgaaaatctataaagaagagtatcgttctcagaaagtggcggagtatatcgcagacgacggacgtgattatccgaaccggcgttatctcgtggcggtttccggggacagcggttttttcagcgccgcgtcgggaattttcagcaccctcgagaaaaaggggatcgctgcagagattcttcccgggatttcttctttgtcctatctctgtgccaaggcaggggtttcttgggaggatacggtaagtctcagcgctcacggcagaaaagcgagcatcgcggcatgcgtccgccgaaaccggaagacgtttttgctgacgggcagcaacggagcgcagctgcttcgtcatctgacggacttcggcctgggggacgtgcgggtgatcgccggagaaaggctttcctgctgcgacgaacggatttcagagggcagagtgtctgagatggcctgccgcaagtattctgtgctgacgtcgatgcttctgatcaattccgatcccagacctttttttctctgcggaatggaagacggcagttttctccgcggcagtgttcctatgacaaagcgggaaatccgcgcccaagcgctgtcgcttctgcagctcaaagaggagagcgtcgcttacgatatcggtgcgggaaccggttctgtcaccgtggagatggcgctggcgggctggaggggaaacgtctttgctgtggaacgaaacccggagggcgcggcgctcatccgtcagaactgcagaatgttttcggcagataatgtaacggtcgtcgaaggggacgcgccagaggcgctgaaagatcttcctgcaccggatgccgtttttatcggaggttccggggggcggctggatgagattctggaatttctgcgctttaagggcgcggagaaacgagagggcgagaaagagagcggcttcgcgatgcgcctggtgatgaccgcggtcacactggagacggtcggatcgggggtgaaaaaattagaaaaattcggttttgaagatgcacaggtcgtccagatcgccgcggcgcgcggggagaaggccgggaaatatcatcttctgaaagctcagtctcccgtttttatcctcagcggcgagctccgtctgtaagactgccggacagatttgcggtattttttcagagacagcgtttctgaaacgtgcagaattgagctgtgcgaaggctgtgaaacgcgcgaagatccgggaagtacagagaagacggaaaatgaaaaaattttgaacatgcagaaatgaaaaagaggaatggatgaagagaaggaaccatgtgtgaaaaagacggaaagagaccggaatctgcggattcggattgtgggacagaacgaatctccctgcccgggagcagaatcgttatcgccggtaccggcagcggatgcggaaagacgacggtcacgtcgggactccttcagtgcctgaaagacagaggggtctccgccgccgcttttaaatgcggtcccgattatatcgatcccatgtttcatgaaaaagtcctgggaacaaaatcggaaaatctcgatctttttttctccggccgtgaggcactgcggtatctggcggcggacagcggacggggatgcgatatcggtgtggcggaaggtgtgatgggtttttatgacggcgtcggcatgacagagacggcgtctacttacgaggtggcgaaagccctggacgctccggtgattctcgtgctcagcgccgccggagtggcatcttccgtgctggcagtactggaaggattcttaaatcatcgaagtgacagcggtatccggggggtgatttttaaccgtctgccggcgaagctgtatgaccatctggcagatcgtgtgcgtcgtctgggaatagaaccccttggatatctgcccgccgacggcagagcggaaatcaggagccgtcatctgggactgataacggcaggagaaatcaccgatctaaaagaaaaaatgaaagttatcgcccgatggatggagaagacagtggatatcgacggtgttcttcgcctggcatccgaagcgaagcctgcgtcagcggagattcctctgcagattgtatcggcagagaagcgggcgaaagagcgccgtaattttgccagaatcgctgtggcttcggacgaagctttttgttttacatataaatcaaatctctcgctgctggaacgtctgggcgcggagctggtccctttcagtcctcttcgggacaggcgtcttccggcagacgtggacggactgcttctcagcggcggttatccggagctttacgccgaacagctggagagcaataaagacatgaggtcgcagattcgcggtgcggtacggcgtaatatgcctactcttgcggagtgcggcggatttctgtatctgcacactttcatcgaagcggcggaaaacgcggtaaaggacgacgctggtcaaaaaaaaggaactgtgcagagaactgctgcgagccggcggaaaaaaatgtgtgaaatggcggatgtaattcccggagaatgccggcggaaggggctttccggccagttcggatatattatcatggaagcccgaaaagacggtttgatcgcgtctgagggcgagcgtctgagggcgcatgagtttcactactggcagagttcatcgccgggagaagatttctcagcggaaaaggcggaccggagcagagaatggaaatgcggctattcttcggagacgttatacgccggatttcctcatttgtttttgtattcttcgccgaaagcggcagagcgctttgtgaacagatgcgctgaattccgccgcggaagaaaggcggaagaggaaagatcgtgaagacaggagccgtgtcatggaagaaaaagaagagaaaaacttacagatcagagaacgagagagccggcggagcggagtatggaacgatcttcggtgtgaggcgggaaaaagtcagaagtatagagcggaaagaccgtatgaaatttttctcgctgagctgatttcctgcagccgcgtattcgatcgggaagctgaggcggagagccgccgccggtgggatcgtatcggaaaacccatcgacggactgggaaagctggaaaccatggtctcaaagattgccggaatgacgggaacgccggatgtgaagatacgaagaaaagcggtggctgtcatgtgcggagatcacggcgtggtggcggaaggtgtgactcagaccgggcaagaggtgacggcgctggtagcggagcatatcgccggaggaacctcgaccgtctgtctcatggcccgcgccgcaggcgcggacgtatttgcagcggatctggggatcgcctgtgagttttcctcggaatggaacagcatggcgcgggaatcagtgttatcagcgggatctgaggattctttcgccgatgtaaagaaggagcgtccccgcggtccggaaaggagccgtggtctggtgaaagagggctgcggcacagcggattttgccgatgagagctttgatcataagaagtttattctttctccttccggacggctcgcaccgggaaaaatagcgggcaagaaagtgtccaaagggacggaaaatatgatgcgcaagcctgctatgacgagggaacaggcggcgctggctgtatgccggggtgtggaaacggcggtggaacttgcacagatgggatatgacatcatcgtcaccggggagatgggaatcggcaacacaacagccgccagcgcggccgcctgctgtatctgcggtcttacaccggaagaagctgtaggcagaggagccggtttatcgaaggaggggcttatgcgcaagaccggggcggtgaggggagccctttctctccatcgtccgaatgctgaggacgcgctcgatgtgctctctaaggtgggaggttatgatatcgccggtatgacgggtctgtttctcggcggtgctgtctgcgggattcccgtggtggtggacggtgtgatatcggcggtctccgcggctttggcctcgcggctgtgtccggactgcagggagttcatgctggcgtctcatctgggaaaagaaccggcgatgaaacctctgctggacatgctcggcctttctccggtgatctgcgcggatctcgcgctgggagaggggactggcggaacggcgctgctccctcttctggatatggcgctgtgcgtatataaggaaaacgtcacttttgaagatatccatatggatgcttatgagagaatgaaatgatttattttatctttggaggcagcgccagcggaaaatcggaatatgcggaaaatctggcggtattctgcgcgtcaggcggatgcgcagatctctctgcggacggcggggcggtggactgccggaaatactgtaattccgatgccggcggaaaagaggaaaggaacggtcgcagttttgagaaaacggagaacggcgggcggctgctgtacgtggcgacgatgcgccgggacagcggagaagcggcggcccgcataagaaaacaccgggagcagcggcgcggaaaagggtttcggctgtatgaggcggaatcgctttccgcgctgaaaggcgctccctgcgcacatacgattctgttcgactgtctgtcggattttgccgcaaacgttatgttttcagaggaaaatctgcggcgctttacagagtctgagagcttgtcggagtccgggagaaattctcttctggaaacataccggatttctctgtcggaagaaatcgggacaggcgtccgggaactggaggaaaagtgcgaaaatctcgtgatcgtatcggatttcgttttttccgacggtgcggtctatgattctctgacggaattatacatatgtctgctgggggacttatggagaaagatagcagagcgggctgatgaggtgacagagatcgtattcgggctgcccgtaaaactgaaacagcgcggcagaagcagtatgcgatcagccggaaattgaacggaaaccgcgagatgcaaagccgagcagcgcaatgagaagcagtccggaaacgcgtacgggatctgcgaaaaatgcaggtgtcttctccgctgccgtaagggaggagtattttttgaatattttgcagtcttttcttatcacactgtctatgtatacggtgattccaatgcccgcaacagagtggaacggccgaaatcttcggtactgtatggcgtttttgcctgcggcgggatttgtcatcagcgccgcggagtgggtgctttttttcgtatgctattctttgcatctttcggatgttttttttgcttcgtttttctgcgcgctgccggttttggttacgggaaaaattcacatcgacgggctgatcgatacctgtgatgccttgggatctcacagtgcgagggaaaaaaagcttcagatactggacgatcctcacgcgggagctttcggaatcgccggtgcggtcgtctattttcttctgtttttcggtgtggctgcggaactctatcctctcctgacaccggagacggccgccgctgtttttctgatctttgcggcatcgagagcaatggctgcggctcagattgtgacgatgcggctgtccaaacagagcggcctgctctatacttttcggaaggcggcttccggcagagggactctgatttcttctgcggcggtttcgctgtgctgtctcgctgcggctgctgcgtccttttcttatgcgggtctcatccccggggctgcgggactgcttttctgtctttattttcgttccatggcggcgagacaattcggtggaatttcaggcgatctgtgcggttggctgattcatatgcaggaactgatcttgctgctgagttttctgccggcgctgctgcagttaggcggcatggcagacttcttctgatgccggggtgttcgcgggaagcgaatcgattgtacaaacgagaaagggatcctcaattttaaaagagaatgcagaacgaacccgctgcctcccgaaagggagacaaacgggatccgcgcgaaggtgagaaaacgccggaaaggagattttgatggaatttatcgtgggaggaaaagctcagggcaaattggactacgttctgaaaaaatacgggctgacggaagagcaggtctgcgacggcgctgtctgcaccccggaggagcttgcggcagctccggcggtgaatcattttcatgaatttatccgcagatttccggagagcagaccgttgttccgcagagatgcggcggtgatctgcgatgaagtgggctgcggcgtcgtgccggtgaatgctgaggaacggttttggcgagacgcggtcggccgggctggatgccgggcggctgcggaggcggacagcgtcgtgcgcatcgtctgtggtatcgcgataccgttgaagtgatgcggattcatcaaatcgtcacagaaggaacgcagaaaaaacacgttttacatatattaaaatcataaatgtcgggtatcataagagtgtaaaaagaaataaacaaatctttttcataactctcctaaaataattgcttagaaaaagagcgaggatctcagaatcctcgctcttttttgtctttgccggaaagccggaaaagttttttctttcccggctcctgtttctcatcggagaagacaccgccgcacggccactgaaaattcacatcatcccgccgggtgccgcctggtgtattttatgcgaactgactgtaatacagttcggcataggcgccgttcttctgcagcagtgttttgtgggttccctgctcgataatatttccgtcgcgcataaacaggatcagatcggcatctgtaatcgtcgataatctgtgggcgatgacaaagctggttctgtttttcatcagggctttcatcgcttttcctatctcgatttccgtccgggtgtccacgctggacgtcgcttcgtccaagatgatgaccgaaggattgcagaggaagactctcgctatcgtcagaagctgtctttggccgacggaaatattttcggtatcgtcgtttaaaatcgtgtcgtatccgtggggcatcgtccggacgaagaaatccactctggccgctttggctgccgctgcgatttcatcccggctggcttcgggtctgctgtaagcgatattatctgcgatcgtcccgccgaaaagccatgtatcctgcagtaccatgccgaaattgcttctcagggcagaacggttcatttcttttgtatcgacaccgtccaggaagatcgcgcctccatttaattcataaaaccgcatgagcaggttgatcagcgtcgtctttcccgcgcccgtgcttccgacgacggcgactttttgtcccggttttacagagaaattgatgtctttcatcaaaatcctgtccggcgtatagccgaaacggacgtttttaaattctaccactcctcttgcttcgtttattgtggaaggtaccgccggatcggctgaaatttcctcttcatccagcagatcgtaaactctctccagggaagccagtgcggactgcatgctgttgaccatataggctacttcggtcagaggttcggacgcctggttgacgtactgaaaaaaggcctgaaatacgccgacagtcagcgaaccgtttaacagcatttttcctgcaaatacggccatcagtacctggccgagccggttgatcaggcggacggcgggattgatgacatttatcataaaatccgcttttctggacgcctctgccagttcttccgtaacccggtgcatattttcagagctgttttcttcctgctgaaacgctttgataattacccggccgctgtatccctcttccacatgagaggtgacgctgctcacacactgctgccgtttcgcggcgcatctcaatgttctggcagagatcagattggtcgctccgagggcgattcccgtgaatacgataaaaatcagagtcagcagagcgctgaagcggaacatcataatcagagatcccgtcaccatgcccgctgcggtaaaaagtttcagcattccggtctgaagcgcttccgctgtcttatccagatcatttacagctctgctgaggaccgctcccgtttttgtgcggtcgaaataggagaggggcagtctgttcagcttttggctgatttccgtccgcagacgaagactgagggtttctgcaaagctcgacatgagaaaagactggagcgtgtagaaaagagccgtcgccaggtagatcagcagaagaaaaaagatatcgcggcccccgtccgcccatgtgatatgaaacgcggcgccgcctgaaacagcctctttgacactgttccagagaagatctacgatatgagcgctgtacaaaggcgcgatgatagacagcagcgtataaaaaatgaccgatacgagcacgatgatcagccgcttatactgattactgacagagcgccagagtcttttcagtgttctccacgcatggccgggcgtttcaaattcgtcgccgccggcgaacagctccatattatcgttattctcactcatggaccacatctcccttcatctgagattctgcgatatcctgataaacaggacaggttttcatcaagtcgtcgtgacagccggtgccgacgattctgccttcttctaaaacgatgatctgatccgcgttccggatggtaccgatccgctgagcgataatcagaaccgcagcgtcctttgtttcttccgccagcgcttttcgcagcgcggcgtcggtcttgaagtccagtgcggaaaaactgtcgtcaaagatgtataattcggcttttttcatcaacgcccgggcgatggaaagacgctgtttctgccctcctgaaaaattcgtgcctccctgagatacggaggaaaagagaccctccggcagatcatacacaaaccgtgactgcgcgacggtcagggcgtgttccatctcttcttccgacgccaggctgtttccgcagcggagattgtcggcgatcgtgccggagaagagccatgctttttgcggtacgtaggaaatatgttttctcagctctctttgcgtcatttcacggatatctctgccattgaggagaagcgaaccggaagtgatatcgtggaatcgcagaatcagcttggcgacggtggattttccgctgcccgtactgccgatgatcgcagtcgtctgaccgcgccggcaggcgaaattcagatttgttagagtatcttcgccggcgtccgggaaacggaatccggtatttttaaaacggatcacatcctgcgccggaactttttgcctgacagcgggcgagatactggcgggaccgtctgcgatttccggcgtatgattgagcacatccgaaattcttccgacgcagatcatggctctgggaatcagaatgatcaccatctgagccatgataatataaaagagtatcatgacggcgtactgcgtcagagcggtgatgtcgccgatctgcatgaaacccgcgccgatccggtttccgcccaggtagagaatcgatacgatacacagattgatcgccagaagtgcgatgctttccaatccggcaaacaggcgattggctttgatcgatgattcggcgtaatcttcaaaggactttcgcatgcgtttttcttcgtatttttctttattaaatgcccggattacgcggactcccgtgatgttttcacgcagaaccacattcatccggtccaggaatttctgcagtttgtcaaaaatcaccgaagctttgcgggtgacgaaaaccgctaagaggatgataaaagcagtggcgcagatcaacaggccgcccatggcggtgtcgatggaaaacgacaggacaattcccataatgcagaccgccggaaccggaagtaccatctggataaaccatacgacgccctgctgaatgacatttacgtcattgagtgtgcgggtgatcatcgaacccgttccgaattgctcaaagtcgcaggctgaaaattcaagcgatttgtcgtaaagcgcattgcgcatatcgcgtccgatttttgatgacaggtccgcactgagataactgcccagaattcctcccagactggcggcgatcgttacagctgtcatgcgtattccgctgcggatcagatattccatgtcgccgccgccgattcccgcattgatcatatccgccgcgatggtggggatcagaagacctcccgcgacgtccgccaccatgacgaggagcgtgaaaaaacaaagccgccggtatggttttataaattgtagaattgttttcattgcgtgatttccccctgtagaaaaattatttcagactgtgcagagctctgagagaaccggtgcgtcagagctcgttcagcttttcttttaagctttcgatatagatttttgtcaggcgcagcagctcttcctgttcctccggctgcagcgctgtgaaggctgcgttttccttctgcactaccggaacgatatatctttccacgaattgtctgccggtttcggtaagaaaaatgtgtttgtcccgtccccgtccctgttttaaataaagatagccctcccgctccagctttcggatcgaggaattgaccgtctgtttgtttgcgaaagcttcgtaacagatatccttttgcagacagccgtcgcccaagtcgtggagaatatagaagattgaaaaggcgctgtctgaaatgcccattttcagagcgacttcatgatagatgtcattgaattctttgtcgatcctgttaaaatttctcagcagctcgtttgttttttctgtcattgcatggaacctccctttagtatgatttcgtacttgtacaggaacagtatagtatgaaatcgtactcgtttcaagtatgatttcatacttaatatcttaatttttttgtgaaaggaaattctttagcggtgcggcagcgggcttttgcggttttcgtctggttgatttcccgccgcgtcttcttaaaatcatcacagagacgacgcagaaattacatgtctcccatacgtgaaaaacataattcccggttaagataagagcgtagaaagaaacaacaaatctttttcataaactctcctaaaataattgcttgaaaaaatgcggaggcagcgatgtctccgcattttttcatttgcggacatttccatcgctgcgagatatgattcgttcctgagatctgcggatcattaaaaatgcgctgcgggtgaatttgacgggaagtccggcgggtacgggccgtcccttcgtcgcggcttttcggggtgatgaaattttccttcgcagagagcggatacagtagcatcggctacggcaaacggatataatgttgtatgcggaaaatatcagatgtaagattcgtaaaaaataagatacacgacgaaaagaacagctgtaaatcttctcggcaagaaaagaggcatactatgaaactgatatttataagacacggacagacccagggcaacgcggaaggccgctatctggggaaaacagacgagccgctgtgtccggaaggaattgagtatataaaaaagaaagtaagagaaagaggttatcctgaggcggagatcgtatggtccagtccgatgaaacgctgtctgcagaccgcccggctgatttatccggatgcggatgtccggatcgaagaggatttgagagaatgcgatttcggaaaatttgaatacaagaattatgtggagatgtcgcaggacgaagaataccgcgcctgggtcaacagcggcggaacgcttccttttcccggaggagaagatgcggacgatttccggcggcggtcccgtgaggcatttctgcgcgtggtccggcagtatgaggacgatgatgtgatcgcatttgccgtacacggaggtacgatgatgtcggtcttttctaaatttgaggaaccgccttctggttattttgaccgtcagccggaaaacggctgcggctatatctgtgagttcgacaaagcggcggaaaaactgacggttttgcaggaaatttaaagatctgtatctggaggaaggcgataaatgctggagaattggatctatttttgtgcactgccggcggctgccggcttcatcctggatttgatattcggtgatccgaaatcaatcccgcatcccgtggtgatcatcggcagactgatttcgtttttcgagaagcggctgctggcttcggccggaaggggcgaagtcagctgccgccgaaagaaggtgaaggaatgttctgaaaaagacgcagggggcggcagaagcggtgcgccaggcgaagagaacgccggcgggacagcggcgggcggcggggaaagcgatgaaaaaacagacgaaaacgcagccggcggcaggagatctcctgagaggaaaaaaatacagaggcggcagtttgtatcgggatgtgtgacggccgtatctgtggttctgctgtcagtgatgtttcccgccgcggcagtctggctgttctgccggatttcccgcgctgccggcatcgtttctgccagtcttttgtgctggcagatgtacgcggcgaagggactgagaaaagagagcatgaaagtatggacggccctgcggtctcaggatgtggaaggcgccagatatgcggtctccatgatcgtgggcagggatacttctgtgctggatgagaagggcatcctcaaggcggctgttgagacggtggcggaaaacacgtcggacggtgtcatcgcccccatgttttatatggcgctggccggtcctgccggagcgtacttttacaaatcggtcaatacgatggattccatgatcggttatcgaagcgaaaaatacgagtattttggaaaatgcgccgcaaagatggacgacgcgctcaatttcctgccgtcccggatttcgggactgttgatcgtggctgcggcggcatttctgccccgggagaggaagacgggatttcgcggaagcggaaaaaacgcgctgcggatttttctgagagaccggaaaaaacatgccagtcccaactcggcacagacagaatccgcctgtgcgggggcgctgggcatacagttagcggggcctgcggtatatttcggaattctgcacgaaaaaccgaaaatcggcgattctctgagaacgcctgaatatgatgacattcggcgggcaaaccggctgatgtatacggcttcttgcagtgcggtgggaattctgctggcgatcgccgctgctctgacgatgatatttattatttgacgcggacaggacggggaatttttatgagagaaaaaaatcggcatggaggagaaaacagaagcggagagatccgctgggatttttcggtgaatatcaatccgctgggaatgccggaggccgcaaaggcggctctgctctccggatggaatgtctttgaaaactatccggatgacgactgtgaggcgctgaggcaggctctcgccggacgtttcggcgtggacggaggacaagtc

SEQ ID NO: 3851 - DNA, 3559 bp, Unknown
  16S sequences of unknown bacteria
gtagattcacaaggagacggcgtctgagtctccttgtgcgccctccgcgtaggagtagcccctcaccgcagtgagatataataaatctgaaagacgcaagtcttttcttctattttctcactttaatcgaaagtgaatcttcattcaacggagtttcttagaagtttagagaaagataaggtagaaagactaacgtctttcaactattcccttcgccatttccggcggaaatccctcgcctccgcgacaggggaattttctcttttcccatttcccacgagcgcgcaccctttccacgcatttccgtcggaaatcccacccccatattgcgccgatatacgcatagcggaatttgctataatatccccgcaggcaggagaaaaccacggccgggtcttcaattgccaaataattacatatcgaggttttttatgaaaaacgaaaaaatgctctccgttgccgtaagagaatcgaaaaagaaaaatcccgcaaccatcagaatcgtcaaacgcgttgtcatgaccgcttttctgctcatagcttccgtagtcctcgccgctgccccactcttcccgggagcttatcctttcggcatcgcgctcaccgcagccgctcctacggtttcaacagctctcacggcttttgtcggcggagtcgtcggctcatctctcatcccgaccgtcgggggacagtacgcgctcctcctcaccctgactatagccacacgcgccgtcctctcactgtacctcgcaaacgaccgcctgtccgacgtcttcggcaaaagcagaaataatatccgcggagagccgaaaaataaaacggggaccatgctccgcttcatgccgaacacaagcgaaatcggcgaaaagcttcactccctcggtttgttcagggaaaacgtcagagtccgcatgactgtctcggcggcggcagcgctcatcggcggagcatggtcggtggttttgggtgggtacggctactacgatctcttcggcgctgtcttttcacttctcatcacacctgtggttacatatttattctatgcggcgtcggagcggagtatgaaagcgtccgtcatgtgcgaaatcggcgtgttctgcatgatgtccgctctggcttacgcctttcatacagttccgtcaaataagctcgtcgacctcggagcaatcttcggctacgcggcggtcatgcttgttacggtaaagttcgggatataccgcggaattgcggcggcggttgcgtgcggtatcgcggtgtcgtcagagtccgtcccgtgctatgctgcggtaactctcatgacggcggcgttgtcgaagttctcgctcccgctctctctttgctcgtcagctgcgtcggcttctgctgtcggcattcttctcggcgggatgaacggattcctcgcggcgtttccacccgtcgtagtctcgtgcgctctgtcagctccgctcatcagactgaaggacgagctgatacccgacaggctcttcggcagtgaaataaaaagcagagcgggaacgtccgagggtgaggctgtgcgtgcgtcggcggaggaatacaaaaagcgcgtcacggatttttcgggctcgctcatcacctcggcagccgtcatgaacggaatcgcgtcaaagctcagaaaagttcgtccggacgagatacacgacgtggtggagggaacgttctcgcgctactgcggactgtgcaaaaatcgggataaatgcgcggataaagtttcggcactcgtctcggatatgacaaagaagataagcgcggtcggagaggtcggtgcaggggacgttccggcaaaggtagcgacagtctgctataatataggaaggattatagacgaaatcaacggctcgattgcacaaaaggtaaacggaatgcgcgaaggagactttttaactgtcgcggcggaggatatggcggcggtgggagagcttctttgcaggatggacaagtcgctcgcggaggaattcagggagaaccgtgagcttacggcaaagctgaagagacttttagcttacaataacttccacgcgtcgggagttaaggtaatcggcgagaggagaaagagggtatatgtaggggatattgagctatcgtccaccagaatgggcggagacgacatacagcgccttgtcagcgagattttgggcgggaaattctcgtgtccggagttttcgcttgacggagcagtgctgtcgatgcgccttgagtcggagaagcgggtgaaatctgtatcgggaacgtacacaatagcggcgtcgagcgtacaagcgtactgtgatgcgaaaaacgacattaaaaatgtctgcataaaaaaaagctgcggcgcagactgctatgatacaccgagcattgtcataaacgacgaaccgacaactcccattccgacagaggacgtatccggcgacacgatagaggtttttgaagcatacggacggcagtatatgatgctctccgacggaatgggaagcggaagagaagcgtccgttgcgtcgggaatgtctgttaagctgctccgggaatacatagaggggggagcggatcttgaaagcgcattaaagctggtcaacagaattctcagaagcgcgggcagggaatgctctgcgacgattgacatatgcgagatagatctgtacacgtcggaagcgagattcataaaatcgggagccgcgccgtcgttcgtgctgagaaacgggtcgatatacaggcttcagtcaaagacagtgccgataggcataatccgtgcgcttgacgcggaggcgataaagtttgacattgagccgggcgacaccgtagtaatgctctcggacggagtggcaaggtcgtacgatgaagttccgtggctgctcgacatgatgacaagcgacgagacagttctccacggagacgaaaagttagcggcaatgacgatagtgagcgaagcggcagtgagaggttcgagggacgacatcacctgcggaataatgcgcgtggcgtgacaatatcgctcgtctaaacgaattcaataaaatcgaagaaagagcgaagctattttctcttccttagattacttgcgatttctgagaaactgaatttgaagtagttgcatggaggttcaagttcggtctttgaatttcgtgcagtgaaatggctggataggacacggtttacgtcagcttgaatttgaacttcaccttcgtgctcttatactttagtctaaagggaagcttgccgcgagggcgcggagtagtagagaaccatgctgtcgcacctgcgcgtattgttcagcgaaatcgtaagacagttggcgcagccttcctcaagccgaagaattcagtcaacctgtgataatgttagccgtagcttagttaagacatgaaactaaactaatttggacgttcgcaccacgtcagcgcacaaacaaacgcccatccgcggttagcctatatcgaattgactgtaagtttcggcttcacaagattggtgatagtgtagaaatttaagctaaaaatctggctataagctacagaataaatcaggtataaatcggcggttagccaaaatctaagaagac
